United States Patent Application Publication US 2020/0109395 A1 - sequence listing, part 5

SEQ ID NO: 25232 - protein, 978 aa, Escherichia coli
MIENESGYLITYFRRIYQALRGQSSQYPAAKIAQELGDTIPVTMQNELVYEIAGEFCETLCRLLSEHPPHSSDPVSALRKLSPDWHLQLPLVLPEANAAEIVRRLLSQSSEIRSASSLQVERIWVDVDDSWYCDARFRFPATMRTEQLTSLFECHIQPEQTRLIISGKWKNGGARLAMLSRYEQQDWRVELLPIAMQKLSGADAMAEISLSLHEGPILLGHTIPKGGYELTEELPWVFEAMNESESQLKLVGMGSVGSRLNALFISLPKNSHLDISGEGEFDIPRLLKNSERSLTKISGVFSVVLHDGAVCTIRTQQLYDSAIEYYIKSTEVELVKSDYPVHRAWPKIGWKKDLQYGIVPEKELFWRSIRSGNNAWYSVASEMPKGQIEVRRIVNDEVLFSGKVVVLPADFDINIIPESAQQGIIMLSGITDTRIDKYSNNEKVTLKSDYSQNECAIYYNSSLMLENTVDLRVSWKDGSNLKLLLPKPVSGGRFVTNDGSVHFDGVASIAHLHGIDAELLTISCAGRGYLNIELLDENPVAEKFRYLHADLPLLSGLNDKLQQISLYENYNLLNAMLACAWNSNSTLCVDFYSDRFGKDKATLNIKRYDGSFIEHDQGLLVDIKNSVVFPANRIDELVVDAISLKNPGLHISLLKKDEFAYDLSALNVQDSPWLIVGKLDGTARIAPVIKWMLPVLQTNDLLLNALCEADPEQRKKNFNELIFEIDNNPLQNYCCLLTEYIKEYKMNNGLSLLDLDLFRCISSNYRVVVQLLISSCLSGDSDTIYDIQEELPFSWGWIPVSIWKDVFQKCWTYLEKQINDKTLALHILQPFIAFMNHRAHIDRRLAPIANMLLTYSESLPTGCDVLPTVSREQFNEAKQMLLRNPDSFGRISIFPKELWSSAITPELKSVFNKLWIEDKYHSRLEKRFNLMLVAALLTQKDNNLIHQLSALFEFHYQQAPQQLGVIYQYYFEQAGVCH

SEQ ID NO: 25233 - protein, 2114 aa, Escherichia coli; identical to SEQ ID NO: 25217

SEQ ID NO: 25234 - protein, 1112 aa, Escherichia coli
MLWGFVFVSFISKELALGQSEYISWVKCTSWLSNFVNLRGLRQPDGRPLYEYHATNAEYNQLTQLLCAVGQSQSNICNRDFAACFVLFCSEWYRRDYERQCGWTWDPIYKKIGISFTATELGTIVPKGMEDYWLRPIRFYESERRNFLGTLFSEGGLPFRLLKESDSRFLAVFSRILGQYEQAKQSGFSALSLARAVIEKSALPTVFSEDTSVELISHMADNLNSLVLTHNLTNHKEPVQQLDKVHPTWRSEFPIPLDDETGTHFLNGLLCAASVEAKPRLQKNKSTRCQFYWSEKHPDELRVIVSLPDEVSFPVTSEPSTTRFELAIYEDGEEVSGLGPAYASLENRQATVRLRKSEVRFVRQNPSAGLSLVARAGGMIVGSIKLDDSEIAIGEVPLTFIVDADQWLLQGQASCSVRSSDVLIVLPRDNSTVAGFDGQSSAVNVLGLKALPVKGCQDVTVTANETYRIRTGREQISIGRFALNGKRASWVCHPDETFIGVPKVISTLPDIQSIDVTRYLSGISIEQCHIQEMLGAQYLSIRNSNNETLLRRKIGILPADFSIEIKGGMHANEGTIVITTQHPCVATLKDKTLEATRKRTEGRTEIQLKAEGVPPAFITLQVLPNLAADTIDIELPFPAKGCLALDVNGRPLDKNITLHDLLGSRAFLFSRNGEPTKYTLQLHLRSISGLQAWHEWSYTALSERPVELNLYSLREHIENLISLEAGIDQVVEMRITGAGVVMAWQIRRYKYSLRYDYEKELLLSQSVNHRAGQIPSPVIMLLSEPERKSIPLASRMSEGVPVGEYELSSIVNKNGPWLVVPKPGEEMAFRPCFIRGESSLPVEESNIRSLQKATQLFNPQAEVNTITRVLGQMANDPAHSGWQFMRSLYDQFGYLPLATFEVWRALVQHPQALAMSLFKFEMSAEYLSRIENEFPILWEFFPIFEIKAASERFKLFLSQKGAPEETQKLLVTNMFQRLGLVFPTYADEIEKWLSNGYLPPSIPESCVHGWYQELLREHSEARWPEYGCKRLYKWMMSQKNPVIGINPDANHRYSVAWLPVFAAAVASGNASFESVFDRKPGAVFFLRQVRDFDSRWFKAIFQFSLLRYVAKK

SEQ ID NO: 25235 - protein, 2104 aa, Escherichia coli
MDVQQLHYAPLLNQLHQRAVRSVVSQLALRSKSLTHYLESQYFQPPGQEGSLLADPVFESTFGWMPADETMEDLRDKLISSPLVDALSKAPVPFRHQLTAWRTILEDKKSLLVSSGTGSGKTECFMVPVLEDLIRQQKSTRQSLTGTQAIFLYPLNALINSQQERLREWTRGFKGKIRFALYNGETRHTKYEIQEDQLKVPEQALSREAIYEAPPSIMVTNTTMLEYMLIRRKDAPIIEKSQGMLKYIVLDEAHSYIGSQAAELALLLRRVMQAFNVGPGTDKPVQIIATSATIGEDSPEGNKELAKFVADLAGVTERDVKVVRGYRQIPRVSESLIRHEYPTSLTSLKSLSPQDLYQQLCHYRVAQQLRQALTHPGRQAVRLSELLNVARRTWPDINHRELLQLLDLMARSREGELAFTPLRMHGFIRTLAGLWACSNKQCSHKAHELNQSDWPFGQVWFEQRQYCDCGAPVFEVLRCSGCGSAYLSAKEEMRGDGTNWLVAQPAAAEVDEFALDVDVYSEDEDNDELDNNSQFDRLIASDGEKYIISLEETTAGKIDSEAQKHYEINLLRPESRGEGRNNSFACVCCGDTQRKNNPLFRPLRLGAPFFLNEIIPTLLEFSPLPQTREEQLGPFNGRRLLTFTDSRQGTARISARLQQDADKATLRALCYQELANITEPSAKLSPAHCALLEKVISQFSVLPLKNSIDALKKAMAANEELSPTDIQALKIIEPMVSSLSTEHAEAMQILQANSGNQQKKTMSWQTLSEQLVGSVDLADRMRGSFKELSGLDLTKQQFADFCLYSEFGRRPKNAWTLESLGLVAIHYPFIDKVTTCPQDWKTLLPDPDKQLAEWRNLLKITLDFFIRENSAVFYENEQYPRWMGARFPVKMLQGPDKKNKGQKRDQLWPQIRDRHYNRVIKLLIAVFPAIQPEQAHWKSLVNHLMIEVWDAIRPCLRQFESGYQLDIKQQAEFYSPKQVWRCPYTRRALDVTLLGYSPYLPGSKEIAPEKAVLIEMPELPVRHWRLSGGGEIAREERLEWLESNALIQHAREEGLWSTRSDRLALKDSWYRLEEHSAQRTPEQNQFNEKQFKSGKVNVLNCSTTMEMGVDIGGMSLVAMNNVPPAPANYLQRAGRAGRRGESASAAITLCKNTAHGMEVFKDPLWAFNTTASAPRVRFGSSSIVQRHVNALVLGLFLRAEVPDATKLSCKWFFEGDESQCLRFLHWLNHQADQLADKLKRLTQGTVLMSLTATQLLTRTQAMMQQVDIRWRSQLAILLENIEALKADNSAWEETPAGKAIAYQLRDYRGAYLFSKLISEAFLPGHGFPVGVVNFNYLTADELEKRRAIKATQADPNEGGESFSRRIEKLPSRDLPTALREYAPGADVVLGGKVYRSSGIMLGKVLASGQELSGDHHIPWFWHCRKCGAGATSTTHPVECSHCKADIQQLDVKRYLQPVGFATDIRYQAHNDVSMPAQLPWKDPRVLVPSSVWVSLPDAGLGRYRFSHSGELFHFSEGEFGHGYAICLSCGRAESQTQPQRTPENLKNPERENTHYLLRGGSNDRQGSNKLCHGHVHKDLWLGYSSRTDMVELQLNDDNGLLIRDEVAARSLAVALREGLAHKLGIENTELGVTTQQARDINGYTGYSIFIYDNNAGGAGYAVQLIDHWADVFNYARKLLDCSCDKFCHHCLLSYDSQHYVNRLDRHHALTLLTNVRLQRLNLAPEYQYFGDGSRVETNPLSLRIAQCLNSEIYDSCSLVLAGPQEQWDFAQWPLFKELLQFASSGGNVELLVATPLANLTDSSRHQLSALAAMPGGRLQVKSIATAQLMQGKGRWLAQVTREGQSQQWAADDSATVAPGELWGQSASSPVVTLKGTSGKTFSGQTLSAEDLLPALPTGAVRINLCEQLDGPLEGFGSRFWSLVTQQHAGWKQAFTRHKEITHVEYSDRYLNSPFTARLLGEILTELVEQGMAERASLTVCVKKLDYNSRQHDALYNAWLNEEDRQQVVTTLLEEGYLGPAWPGAISWLTGDNQSTEHGRELTVTFSDGSQHYVLLDMGLSYWRCIEDTFFDFALRVPQQVERLANTRARAVAPGNDLRSYIIAG

SEQ ID NO: 25236 - protein, 978 aa, Escherichia coli; identical to SEQ ID NO: 25216

SEQ ID NO: 25237 - protein, 2104 aa, Escherichia coli; identical to SEQ ID NO: 25235

SEQ ID NO: 25238 - protein, 978 aa, Escherichia coli; identical to SEQ ID NO: 25216

SEQ ID NO: 25239 - protein, 2104 aa, Escherichia coli; identical to SEQ ID NO: 25235

SEQ ID NO: 25240 - protein, 978 aa, Escherichia coli; identical to SEQ ID NO: 25216

SEQ ID NO: 25241 - protein, 2104 aa, Escherichia coli; identical to SEQ ID NO: 25215

SEQ ID NO: 25242 - protein, 978 aa, Escherichia coli; identical to SEQ ID NO: 25216

SEQ ID NO: 25243 - protein, 2104 aa, Escherichia coli
MDVQQLHYAPLLNQLHQRAVRSVVSQLALRSKSLTHYLESQYFQPPGQEGSLLADPVFESTFGWMPADETMEDLRDKLISSPLVDALSKAPVPFRHQLTAWRTILEDKKSLLVSSGTGSGKTECFMVPVLEDLIRQQKSTRQSLTGTQAIFLYPLNALINSQQERLREWTRGFKGKIRFALYNGETRHTKYEIQEDQLKVPEQALSREAIYEAPPSIMVTNTTMLEYMLIRRKDAPIIEKSQGMLKYIVLDEAHSYIGSQAAELALLLRRVMQAFNVGPGTDKPVQIIATSATIGEDSPEGNKELAKFVADLAGVTERDVKVVRGYRQIPRVSESLIRHEYPTSLTSLKSLSPQDLYQQLCHYRVAQQLRQALTHPGRQAVRLSELLNVARRTWPDINHRELLQLLDLMARSREGELAFTPLRMHGFIRTLAGLWACSNKQCSHKAHELNQSDWPFGQVWFEQRQYCDCGAPVFEVLRCSGCGSAYLSAKEEMRGDGTNWLVAQPAAAEVDEFALDVDVYSEDEDNDELDNNSQFDRLIASDGEKYIISLEETTAGKIDSEAQKHYEINLLRPESRGEGRNNSFACVCCGDTQRKNNPLFRPLRLGAPFFLNEIIPTLLEFSPLPQTREEQLGPFNGRRLLTFTDSRQGTARISARLQQDADKATLRALCYQELANITEPSAKLSPAHCALLEKVISQFSVLPLKNSIDALKKAMAANEELSPTDIQALKIIEPMVSSLSTEHAEAMQILQANSGNQQKKTMSWQTLSEQLVGSVDLADRMRGSFKELSGLDLTKQQFADFCLYSEFGRRPKNAWTLESLGLVAIHYPFIDKVTTCPQDWKTLLPDPDKQLAEWRNLLKITLDFFIRENSAVFYENEQYPRWMGARFPVKMLQGPDKKNKGQKRDQLWPQIRDRHYNRVIKLLIAVFPAIQPEQAHWKSLVNHLMIEVWDAIRPCLRQFESGYQLDIKQQAEFYSPKQVWRCPYTRRALDVTLLGYSPYLPGSKEIAPEKAVLIEMPELPVRHWRLSGGGEIAREERLEWLESNALIQHAREEGLWSTRSDRLALKDSWYRLEEHSAQRTPEQNQFNEKQFKSGKVNVLNCSTTMEMGVDIGGMSLVAMNNVPPAPANYLQRAGRAGRRGESASAAITLCKNTAHGMEVFKDPLWAFNTTASAPRVRFGSSSIVQRHVNAQVLGLFLRAEVPDATKLSCKWFFEGDESQCLRFLHWLNHQADELADKLKRLTQGTVLMSLTATQLLTRTQAMMQQVDIRWRSQLAILLENIEALKADNSAWEETPAGKAIAYQLRDYRGAYLFSKLISEAFLPGHGFPVGVVNFNYLTADELEKRRAIKATQADPNEGGESFSRRIEKLPSRDLPTALREYAPGADVVLGGKVYRSSGIMLGKVLASGQELSGDHHIPWFWHCRKCGAGATSTTHPVECSHCKADIQQLDVKRYLQPVGFATDIRYQAHNDVSMPAQLPWKDPRVLVPSSVWVSLPDAGLGRYRFSHSGELFHFSEGEFGHGYAICLSCGRAESQTQPQRTPENLKNPERENTHYLLRGGSNDRQGSNKLCHGHVHKDLWLGYSSRTDMVELQLNDDNGLLIRDEVAARSLAVALREGLAHKLGIENTELGVTTQQARDINGYTGYSIFIYDNNAGGAGYAVQLIDHWADVFNYARKLLDCSCDKFCHHCLLSYDSQHYVNRLDRHHALTLLTNVRLQRLNLAPEYQYFGDGSRVETNPLSLRIAQCLNSEIYDSCSLVLAGPQEQWDFAQWPLFKELLQFASSGGNVELLVATPLENLTDSSRHQLSALAAMPGGRLQVKSIATAQLMQGKGRWLAQVTRKGQSQQWAADDSATVAPGELWGQSASSPVVTLKGTSGKTFSGQTLSAEDLLPALPTGAVRINLCEQLDGPLEGFGSRFWSLVTQQHAGWKQAFTRHKEITHVEYSDRYLNSPFTARLLGEILTELVEQGMAERASLTVCVKKLDYNSRQHDALYNAWLNEEDRQQVVTTLLEEGYLGPAWPGAISWLTGDNQSTEHGRELTVTFSDGSQHYVLLDMGLSYWRCIEDTFFDFALRVPQQVERLANTRARAVAPGNDLRSYIIAG

SEQ ID NO: 25244 - protein, 978 aa, Escherichia coli
MIENESGYLITYFRRIYQALRGQSSQYPAAKIAQELGDTIPVTMQNELVYEIAGEFCETLCRLLSEHPPHSSDPVSALRKLSPDWHLQLPLVLPEANAAEIVRRLLSQSSEIRSASSLQVERIWVDVDDSWYCDARFRFPATMRTEQLTSLFECHIQPEQTRLIISGKWKNGGARLAMLSRYEQQDWRVELLPIAMQKLSGADAMAEISLSLHEGPILLGHTIPKGGYELTEELPWVFEAMNESESQLKLVGMGSVSSRLNALFISLPKNSHLDISGEGEFDIPRLLKNSERSLTKISGVFSVVLHDGAVCTIRTQQLYDSAIEYYIKSTEVELVKSDYPVHRAWPKIGWKKDLQYGIVPEKELFWRSIRSGNNAWYSVASEMPKGQIEVRRIVNDEVLFSGKVVVLPADFDINIIPESAQQGIIMLSGITDTRIDKYSNNEKVTLKSDYSQNECAIYYNSSLMLENTVDLRVSWKDGSNLKLLLPKPVSGGRFVTNDGSVHFDGVASIAHLHGIDAELLTISCAGRGYLNIELLDENPVAEKFRYLHADLPLLSGRNDKLQQISLYENYNLLNAMLACAWNSNSTLCVDFYSDRFGKDKATLNIKRYDGSFIEHDQGLLVDIKISVVFPANRIDELVVDAISLKNPGLHISLLKKDEFAYDLSALNVQDSPWLIVGKLDGTARIAPVIKWMLPVLQTNDLLLNALCEADPEQRKKNFNELIFEIDNNPLQNYCCLLTEYIKKYKMNNGLSLLDLDLFRGISSNYRVVVQLLISSCLSGDSDTIYDIQEELPFSWGWIPVSIWKDVFQKCWTYLEKQINDKTLALHILQPFIAFMNHRAHIDRRLAPIANMLLTYSESLPTGCDVLPTVSREQFNEAKQMLLRNPDSFGRISIFPKELWSSAITPELKSVFNKLWIEDKYHSRLEKRFNLMLVAALLTQKDNNLIHQLSALFEFHYQQAPQQLGVIYQYYFEQAGVCH

SEQ ID NO: 25245 - protein, 2104 aa, Escherichia coli; identical to SEQ ID NO: 25215

SEQ ID NO: 25246 - protein, 978 aa, Escherichia coli; identical to SEQ ID NO: 25216

SEQ ID NO: 25247 - protein, 2114 aa, Escherichia coli
MTTRYFSSLIEQSLSRSTEATLSIMGVTNPQLREHLAQQMGADCGKPGSFLASPVFQQMFGWKESNHTMRSLTEGNALLSKAVVDSLDDQSNGRYRFGADWKPFTHQLASWKALLEKKHSVVVTSGTGSGKTECFMVPVLEDLYRELHENGNNPLVGVRALFLYPLNALINSQRERLDAWTRGFGTGIRYCLYNGNTEELHAKMKTVQDNRPNEVLSREKMRLEPAPILVTNGTMLEYMMVRQVDAPIIQQSKAQKSLRWIVLDEAHTYVGSQAAELALQLRRVMTAFGVTPDDVRFVATSATIACSDAEKQLKKFLSELSGIPQERIDVLDGSRVIPELEPSKNVSVPLDEIEQIPDLDLKDKNDNKIKGISPDRFYALTHSPEARYIREMLVSQPNPMKLDEMTQRLNALTKQHYSQQEVLRWIDVCSGTQPNAKDPAFLKVRAHIFQRNTQGIWACVDKDCRLKHGTPLEKGWPFGYVYVNQRQNCDCGSPVYEVAFCNDCNEPHLLAQDKKGKLVQWENKGGDEFSLQDEVPVEHDTTEEKVEKENGFLPPLIIAAGETSETGYTLQRLDHQTRRIGVINNDSIPLIINDVEQVCSASGCGYRGMSGKQPFRRALLGGPFYVTNIVPTVLEYCQDFTSDEGKEGVGPDSLPGRGRRLITFTDSRQGTARMAVRMQQEAERSLLRGSVVEILSWHQRTQTSTAPNANADLEKLAARAKQAREQAEEYRSWGMPDQAKLSQAQAEQLEQAYQAATGGKAATTLVSRTWTEMVNELKDKADIRGPVLKYNHYLQPEVFNKNGGPLKLSEMLLFREFMRRPKRTNSLETQGLVQVGYQGLEKIHKSPLHWQEKGLTLDDWRDFLKVTLDLYVRESNFTQLDDELKNWIGSRFSSKFVRNPESKDPEDNQNRRWPQIRNGNVSHRLAKLLMLGAGFKTVNTATIDIINTWLKEAWAQLTGPLAVLKPDGNRFYLPKEHMTFSLITDAWICPVTNKILDTAFKGLTPYLPTHISFEHLTQAQYDTFVAQKVTMPEIWKLDRSQEDYAEGLAKARDWVNNDPLIAQLRSENVWTDINDRVVEGGFYYRTAEHSAQQSSERLQSYEKMFKNGQLNVLNCSTTMEMGVDIGGITAVVMNNVPPHPANYLQRAGRAGRSKESRAISYTLCKGNPHDQQVFANPLWPFETMIPAPMVAMNSARLVQRHVNALLLSDFLCNVIGETDKEKTSLDSLWFFGEDDGQSKCERFKVWLERPVLDIDTALERLVKGTALHGARAEHLRDKTINAITFLQQRWLSVYRDLVTQERESQPQTPYRKRIELEKKRHCGEYLLRDLAARTFLPGYGFPTDVVTFDNFTMEDYIREKSQKSRDKKDREDNVSRYKGLPSRNLGVAIREYAPGAEIILDGRVFRSAGVSLHWHNINADTNEAQRLDCAWRCHKCGTIGYEEGMSSSGMLFCSNSACGEKITMDNRRQVLQPAGFVTDAHAPVTNNIETMKFVPVVPAWVFVKAEPVPLPNPLMGYMASGADGHVFQQSLGEGGHGYALCLSCGRAESMLNENDAPKSMEAHYPPRPGKADRDSQNHRLICPGSTALMKNVTLGALARTDVFEMVLRKPQNGEYLPDNTEEGRIVAMTLAVALRQALAGVLGISAAELGYSVRPVRLEDGQSVLAVQLYDVISGGAGFASSAPVHIEAILQGMVKQLGCRHCDTACSECLLDSQTRHDHDLLDRKVALAWLGDDFTYYIGLPDEETFSLPDARYCPGAIGDTIRRAINEGAEKLTLWMTGAPNEWDLYARQFRAAIQSYRLKDNVEVDLVIPAGVDDPDLLHELSQFTALGVRLCHVEQELQLPIVAQVTFADRVMTLASRSQQATIPGPEWHLNDELVVRSLGYQTVELNEFILPAKAANAVERVKDIQIHKQLNGPLSQFGQRFWDVLFNDHEEAQSLMKNTRITGVHYTDRYLQNPVALALLGSILKPLKTKLTDGAEVALDTLFKDKDRPGNRPFHDWMSIADFQDFADQWFAAALGRPIELTVFDSPRDIPHHRKLTVTFEDGQVLKIRFDQGMGYWRINFASQWHYFDFRDDVSFQLVKMAQACKEGNVANSEESWATDVLVEVIAS

SEQ ID NO: 25248 - protein, 1096 aa, Escherichia coli; identical to SEQ ID NO: 25218

SEQ ID NO: 25249 - protein, 2104 aa, Escherichia coli; identical to SEQ ID NO: 25215

SEQ ID NO: 25250 - protein, 978 aa, Escherichia coli; identical to SEQ ID NO: 25216

SEQ ID NO: 25251 - protein, 2104 aa, Escherichia coli; identical to SEQ ID NO: 25215

SEQ ID NO: 25252 - protein, 978 aa, Escherichia coli; identical to SEQ ID NO: 25216

SEQ ID NO: 25253 - protein, 2104 aa, Escherichia coli
MDVQQLHYAPLLNQLHQRAVRSVVSQLALRSKSLTHYLESQYFQPPGQEGSLLADPVFESTFGWMPADETMEDLRDKLISSPLVDALSKAPVPFRHQLTAWRTILEDKKSLLVSSGTGSGKTECFMVPVLEDLIRQQKSTRQSLTGTQAIFLYPLNALINSQQERLREWTRGFKGKIRFALYNGETRHTKYEIQEDQLKVPEQALSREAIYEAPPSIMVTNTTMLEYMLIRRKDAPIIEKSQGMLKYIVLDEAHSYIGSQAAELALLLRRVMQAFNVGPGTDKPVQIIATSATIGEDSPEGNKELAKFVADLAGVTERDVKVVRGYRQIPRVSESLIRHEYPTSLTSLKSLSPQDLYQQLCHYRVAQQLRQALTHPGRQAVRLSELLNVARRTWPDINHRELLQLLDLMARSREGELAFTPLRMYGFIRTLAGLWACSNKQCSHKAHELNQSDWPFGQVWFEQRQYCDCGAPVFEVLRCSGCGSAYLSAKEEMRGDGTNWLVAQPAAAEVDEFALDVDVYSEDEDNDELDNNSQFDRLIASDGEKYIISLEETTAGKIDSEAQKHYEINLLRPESRGEGRNNSFACVCCGDTQRKNNPLFRPLRLGAPFFLNEIIPTLLEFSPLPQTREEQLGPFNGRRLLTFTDSRQGTARISARLQQDADKATLRALCYQELANITEPSAKLSPAHCALLEKVISQFSVLPLKNSIDALKKAMAANEELSPTDIQALKIIEPMVSSLSTEHAEAMQILQANSGNQQKKTMSWQTLSEQLVGSVDLADRMRGSFKELSGLDLTKQQFADFCLYSEFGRRPKNAWTLESLGLVAIHYPFIDKVTTCPQDWKTLLPDPDKQLAEWRNLLKITLDFFIRENSAVFYENEQYPRWMGARFPVKMLQGPDKKNKGQKRDQLWPQIRDRHYNRVIKLLIAVFPAIQPEQAHWKSLVNHLMIEVWDAIRPCLRQFESGYQLDIKQQAEFYSPKQVWRCPYTRRALDVTLLGYSPYLPGSKEIAPEKAVLIEMPELPVRHWRLSGGGEIAREERLEWLESNALIQHAREEGLWSTRSDRLALKDSWYRLEEHSAQRTPEQNQFNEKQFKSGKVNVLNCSTTMEMGVDIGGMSLVAMNNVPPAPANYLQRAGRAGRRGESASAAITLCKNTAHGMEVFKAPLWAFNTTASAPRVRFGSSSIVQRHVNAQVLGLFLRAEVPDATKLSCKWFFEGDESQCLRFLHWLNHQADELADKLKRLTQGTVLMSLTATQLLTRTQAMMQQVDIRWRSQLAILLENIEALKADNSAWEETPAGKAIAYQLRDYRGAYLFSKLISEAFLPGHGFPVGVVNFNYLTADELEKRRAIKATQADPNEGGESFSRRIEKLPSRDLPTALREYAPGADVVLGGKVYRSSGIMLGKVLASGQELSGDHHIPWFWHCRKCGAGATSTTHPVECSHCKADIQQLDVKRYLQPVGFATDIRYQAHNDVSMPAQLPWKDPRVLVPSSVWVSLPDAGLGRYRFSHSGELFHFSEGEFGHGYAICLSCGRAESQTQPQRTPENLKNPERENTHYLLRGGSNDRQGSNKLCHGHVHKDLWLGYSSRTDMVELQLNDDNGLLIRDEVAARSLAVALREGLAHKLGIENTELGVTTQQARDINGYTGYSIFIYDNNAGGAGYAVQLIDHWADVFNYARKLLDCSCDKFCHHCLLSYDSQHYVNRLDRHHALTLLTNVRLQRLNLAPEYQYFGDGSRVETNPLSLRIAQCLNSEIYDSCSLVLAGPQEQWDFAQWPLFKELLQFASSGGNVELLVATPLENLTDSSRHQLSALAAMPGGRLQVKSIATAQLMQGKGRWLAQVTRKGQSQQWAADDSATVAPGELWGQSASSPVVTLKGTSGKTFSGQTLSAEDLLPALPTGAVRINLCEQLDGPLEGFGSRFWSLVTQQHAGWKQAFTRHKEITHVEYSDRYLNSPFTARLLGEILTELVEQGMAERASLTVCVKKLDYNSRQHDALYNAWLNEEDRQQVVTTLLEEGYLGPAWPGAISWLTGDNQSTEHGRELTVTFSDGSQHYVLLDMGLSYWRCIEDTFFDFALRVPQQVERLANTRARAVAPGNDLRSYIIAG

SEQ ID NO: 25254 - protein, 978 aa, Escherichia coli; identical to SEQ ID NO: 25216

SEQ ID NO: 25255 - protein, 2104 aa, Escherichia coli; identical to SEQ ID NO: 25215

SEQ ID NO: 25256 - protein, 978 aa, Escherichia coli; identical to SEQ ID NO: 25216

SEQ ID NO: 25257 - protein, 2114 aa, Escherichia coli
MTTRYFSSLIEQSLSRSTEATLSIMGVTNPQLREHLAQQMGADCGKPGSFLASPVFQQMFGWKESNHTMRSLTEGNALLSKAVVDSLDDQNNGRYRFGADWRPFTHQLASWKALLEKKHSVVVTSGTGSGKTECFMVPVLEDLYRELHENGNNPLVGVRALFLYPLNALINSQRERLDAWTRGFGTGIRYCLYNGNTENLHASVKSEQAKRPNEVLSREKMREEPAPILVTNGTMLEYMMVRQVDAPIIQQSKAQKSLRWIVLDEAHTYVGSQAAELALQLRRVMTAFGVTPDDVRFVATSATIAGSDAEKQLKKFLSELSGIPQERIDVLDGSRVIPELEPSKNVSVPLDEIEQIPDLDLRDKNDNKIKGISPERFYALTHSPEARYIREMLVKQPNPMKLDEITERLHVLTKQHYSQQEVLRWIDVCSGTQPNAKDPAFLKVRAHIFQRNTQGIWACVDKDCRLKHGTPLDKGWPFGYVYVNQRQNCDCGSPVYEVAFCNDCNEPHLLARDKKGKLVQWENKGGDEFSLQDEVPVEHDATEEKVEKENSFQPPLIIAAGETSEAGYTLQRLDRQTRRIGVINNDSIPLIINDIEQVCSASGCGYRGMSGKQPFRRALLGGPFYVTNIVPTVLEYCQDFTSDEGKEGVGPDSLPGRGRRLITFTDSRQGTARMAVRMQQEAERSRLRGSVVEILSWHQRTQTSTAPNANADLEKLAARAKQAREQAEEYRSWGMPDQAKLSQAQAEQLEQAYQAATGGKAATILVSRTWTEMVNELKERADIRGPVLQYNHYLKPEVFNENGGPLKLSEMLLFREFMRRPKRTNSLETQGLVQVGYQGLEKIHKSPLHWQEKGLTLDDWRDFLKVTLDHYVRESNFTQLDDELKNWIGSRFSSKFVRNPESKDPEDNQNRRWPQIRNGNVSHRLAKLLMLGAGFKTVNAATIDIINTWLKEAWAQLTGPLAVLKPDGNRFYLPKEHMTFSLITDAWICPVTNKILDTAFKGLTPYLPTHISFEHLTLAQYDTFVAQKVTMPEIWKLDRSQEDYAEGLAKARDWVSHDPLIAQLRSENVWTDINDRVVEGGFYYRTAEHSAQQSSERLQSYEKMFKNGQLNVLNCSTTMEMGVDIGGITAVVMNNVPPHPANYLQRAGRAGRSKESRAISYTLCKGNPHDQQVFANPLWPFETMIPAPMVAMNSARLVQRHVNALLLSDFLCNVIGETDKEKTSLDSLWFFGEDDGQSKCERFKIWLERPVLDIDTALERLVKGTALHGARAEYLRDKTINAITFLQQRWLSVYRDLVTQERESQPQTPYRKRIELEKKRHCGEYLLRDLAARTFLPGYGFPTDVVTFDNFTMEDYIREKSQKSRDKKDREDNVSRYKGLPSRNLGVAIREYAPGAEIILDGRVFRSAGVSLHWHNINADTNEAQRLDCAWRCHKCGTIGYEEGMSSSGMLFCSNSACGEKIIMDNRRQVLQPAGFVTDAHAPVTNNIETMKFVPVVPAWVFVKAEPVPLPNPLMGYMASGADGHVFQQSLGEGGHGYALCLSCGRAESMLNENDAPKSMEAHYPPRPGKADRDSQNHRLICPGSTALMKNVTLGALARTDVFEMVLRKPQNGEYLPDNTEEGRIVAMTLAVALRQALAGVLGISAAELGYSVRPVRLEDGQSVLAVQLYDVISGGAGFASSAPVHIEAILQGMVKQLGCRHCETACSECLLDSQTRHDHDLLDRKAALAWLGDDFTYYIGLPDEETFSLPDARYCPGAIGDTIRRAINEGAEKLTLWMTGAPNEWDLYARQFRAAVQNYRLKDNVEVDLVIPTGVDDPDLLHELSQFTALGVRLCHVEQDLQLPIVAQVTFTDRVMTLASRSQQATIPGPEWHLNDELVVRSLGYKTVELNEFILPAKATNAVERVKDIQIHKQLNGPLSQFGQRFWDVLFNDHEEAQSLMNNTRITGVHYTDRYLQNPVALALLGSILRPLKTKLTDGAEVTLDTLFKDKDRPGNRPFHDWMSIADFQDFADQWFAAALGRPVELTVFDSPRDIPHHRKLTVTFEDGQVLKIRFDQGMGYWRINFSSQWHYFDFRDDVSFQLVKMAQACKEGNVANSEESWATDVLVEVIAS

SEQ ID NO: 25258 - protein, 1096 aa, Escherichia coli
MGQSEYISWVKCTSWLSNFVNLRGLRQPDGRPLYEYHATNDEYTQLTQLLRAVGQSQSNICNRDFAACFVLFCSEWYRRDYERQCGWTWDPIYKKIGISFTATELGTIVPKGMEDYWLRPIRFYESERRNFLGTLFSEGGLPFRLLKESDSRFLAVFSRILGQYEQAKQSGFSALSLARAVIEKSALPTVFSEDTSVELISHMADNLNSLVLTHNLINHKEPVQQLEKVHPTWRSEFPIPLDDETGTHFLNGLLCAASVEAKPRLQKNKSTRCQFYWSEKHPDELRVIVSLPDEVSFPVTSEPSTTRFELAICEDGEEVSGLGPAYASLENRQATVRLRKSEVRFGRQNPSAGLSLVARAGGMIVGSIKLDDSEIAIGEVPLTFIVDADQWLLQGQASCSVRSSDVLIVLPRDNSNVAGFDGQSRAVNVLGLKALPVKGCQDVTVTANETYRIRTGREQISIGRFALNGKRASWVCHPDETFIGVPKVISTLPDIQSIDVTRYLSGISIEQCHIQEMLGAQYLSIRNSKNETLLRRKIGILPADFSIEIKGGIHANEGTIVITTQHPCVAKLKDKTLEATRKRTEGRTEIQLKAEGVPPAFITLQVLPNLAADPIDIELPFPAKGCLALDVNGRPLDKNITLHDLLGSRAFLFSRNGEPTRYTLQLHLRSVSGLQAWHEWCYTALSDRPVELNLYSLREHIENLISLEAGIDQVVEMRITGAGVVMAWQIRRYKYSLRYDYEKELLLSQSVNHRAGQIPSPVIMLLSEPERKSIPLASRMSEGVPVGEYELSSIVNKNGPWLVVPKPGEEMAFRPCFIRGESSLPVEESNIRSLQKATQLFNPQAEVNTITLVLGQMANDPAHSGWQFMRSLYDQFGYLPLATFEVWRALVQHPQALAMSLFKFEMSAEYLSRIENEFPILWEFFPIFEIKAASERFKLFLSQKGAPEETQKLLVTNMFQRLGLVFPTYADEIEKWLSNGHLPPSIPESFVHVWYQELLREHSEAQWPEYGSKRLHSWMASQKNPVIGINPDANHRYSVALLPVFAAAVASGNASFESVFDRKTGAVFFLRQVRDFDSRWFKAIFQCSLLRYVAKK

SEQ ID NO: 25259 - protein, 2104 aa, Escherichia coli; identical to SEQ ID NO: 25235

SEQ ID NO: 25260 - protein, 978 aa, Escherichia coli; identical to SEQ ID NO: 25216

SEQ ID NO: 25261 - protein, 2104 aa, Escherichia coli; identical to SEQ ID NO: 25235

SEQ ID NO: 25262 - protein, 978 aa, Escherichia coli; identical to SEQ ID NO: 25216

SEQ ID NO: 25263 - protein, 2104 aa, Escherichia coli; identical to SEQ ID NO: 25235

SEQ ID NO: 25264 - protein, 978 aa, Escherichia coli; identical to SEQ ID NO: 25216

SEQ ID NO: 25265 - protein, 2104 aa, Escherichia coli
MDVQQLHYAPLLNQLHQRAVRSVVSQLALRSKSLTHYLESQYFQPPGQEGSLLADPVFESTFGWMPADETMEDLRDKLISSPLVDALSKAPVPFRHQLTAWRTILEDKKSLLVSSGTGSGKTECFMVPVLEDLIRQQKSTRQSLTGTQAIFLYPLNALINSQQERLREWTRGFKGKIRFALYNGETRHTKYEIQEDQLKVPEQALSREAIYEAPPSIMVTNTTMLEYMLIRRKDAPIIEKSQGMLKYIVLDEAHSYIGSQAAELALLLRRVMQAFNVGPGTDKPVQIIATSATIGEDSPEGNKELAKFVADLAGVTERDVKVVRGYRQIPRVSESLIRHEYPTSLTSLKSLSPQDLYQQLCHYRVAQQLRQALTHPGRQAVRLSELLNVARRTWPDINHRELLQLLDLMARSREGELAFTPLRMHGFIRTLAGLWACSNKQCSHKAHELNQSDWPFGQVWFEQRQYCDCGAPVFEVLRCSGCGSAYLSAKEEMRGDGTNWLVAQPAAAEVDEFALDVDVYSEDEDNDELDNNSQFDRLIASDGEKYIISLEETTAGKIDSEAQKHYEINLLRPESRGEGRNNSFACVCCGDTQRKNNPLFRPLRLGAPFFLNEIIPTLLEFSPLPQTREEQLGPFNGRRLLTFTDSRQGTARISARLQQDADKATLRALCYQELANITEPSAKLSPAHCALLEKVISQFSVLPLKNSIDALKKAMAANEELSPTDIQALKIIEPMVSSLSTEHAEAMQILQANSGNQQKKTMSWQTLSEQLVGSVDLADRMRGSFKELSGLDLTKQQFADFCLYSEFGRRPKNAWTLESLGLVAIHYPFIDKVTTCPQDWKTLLPDPDKQLAEWRNLLKITLDFFIRENSAVFYENEQYPRWMGARFPVKMLQGPDKKNKGQKRDQLWPQIRDRHYNRVIKLLIAVFPAIQPEQAHWKSLVNHLMIEVWDAIRPCLRQFESGYQLDIKQQAEFYSPKQVWRCPYTRRALDVTLLGYSPYLPGSKEIAPEKAVLIEMPELPVRHWRLSGGGEIAREERLEWLESNALIQHAREEGLWSTRSDRLALKDSWYRLEEHSAQRTPEQNQFNEKQFKSGKVNVLNCSTTMEMGVDIGGMSLVAMNNVPPAPANYLQRAGRAGRRGESASAAITLCKNTAHGMEVFKDPLWAFNTTASAPRVRFGSSSIVQRHVNALVLGLFLRAEVPDATKLSCKWFFEGDESQCLRFLHWLNHQADQLADKLKRLTQGTVLMSLTATQLLTRTQAMMQQVDIRWRSQLAILLENIEALKADNSAWEETPAGKAIAYQLRDYRGAYLFSKLISEAFLPGHGFPVGVVNFNYLTADELEKRRAIKATQADPNEGGESFSRRIEKLPSRDLPTALREYAPGADVVLGGKVYRSSGIMLGKVLASGQELSGDHHIPWFWHCRKCGAGATSTTHPVECSHCKADIQQLDVKRYLQPVGFATDIRYQAHNDVSMPAQLPWKDPRVLVPSSVWVSLPDAGLGRYRFSHSGELFHFSEGEFGHGYAICLSYGRAESQTQPQRTPENLKNPERENTHYLLRGGSNDRQGSNKLCHGHVHKDLWLGYSSRTDMVELQLNDDNGLLIRDEVAARSLAVALREGLAHKLGIENTELGVTTQQARDINGYTGYSIFIYDNNAGGAGYAVQLIDHWADVFNYARKLLDCSCDKFCHHCLLSYDSQHYVNRLDRHHALTLLTNVRLQRLNLAPEYQYFGDGSRVETNPLSLRIAQCLNSEIYDSCSLVLAGPQEQWDFAQWPLFKELLQFASSGGNVELLVATPLANLTDSSRHQLSALAAMPGGRLQVKSIATAQLMQGKGRWLAQVTREGQSQQWAADDSATVAPGELWGQSASSPVVTLKGTSGKTFSGQTLSAEDLLPALPTGAVRINLCEQLDGPLEGFGSRFWSLVTQQHAGWKQAFTRHKEITHVEYSDRYLNSPFTARLLGEILTELVEQGMAERASLTVCVKKLDYNSRQHDALYNAWLNEEDRQQVVTTLLEEGYLGPAWPGAISWLTGDNQSTEHGRELTVTFSDGSQHYVLLDMGLSYWRCIEDTFFDFALRVPQQVERLANTRARAVAPGNDLRSYIIAG

SEQ ID NO: 25266 - protein, 978 aa, Escherichia coli; identical to SEQ ID NO: 25216

SEQ ID NO: 25267 - protein, 2104 aa, Escherichia coli; identical to SEQ ID NO: 25235

SEQ ID NO: 25268 - protein, 978 aa, Escherichia coli; identical to SEQ ID NO: 25216

SEQ ID NO: 25269 - protein, 2104 aa, Escherichia coli; identical to SEQ ID NO: 25235

SEQ ID NO: 25270 - protein, 978 aa, Escherichia coli; identical to SEQ ID NO: 25216

SEQ ID NO: 25271 - protein, 2104 aa, Escherichia coli; identical to SEQ ID NO: 25235

SEQ ID NO: 25272 - protein, 978 aa, Escherichia coli
MIENESGYLITYFRRIYQALRGQSSQYPAAKIAQELGDTIPVTMQNELVYEIAGEFCETLCRLLSEHPPHSSDPVSALRKLSPDWHLQLPLVLPEANAAEIVRRLLSQSSEIRSASSLQVERIWVDVDDSWYCDARFRFPATMRTEQLTSLFECHIQPEQTRLIISGKWKNGGARLAMLSRYEQQDWRVELLPIAMQKLSGADAMAEISLSLHEGPILLGHTIPKGGYELTEELPWVFEAMNESESQLKLVGMGSVSSRLNALFISLPKNSHLDISGEGEFDIPRLLKNSERSLTKISGVFSVVLHDGAVCTIRTQQLYDSAIEYYIKSTEVELVKSDYPVHRAWPKIGWKKDLQYGIVPEKELFWRSIRSGNNAWYSVASEMPKGQIEVRRIVNDEVLFSGKVVVLPADFDINIIPESAQQGIIMLSGITDTRIDKYSNNEKVTLKSDYSQNECAIYYNSSLMLENTVDLRVSWKDGSNLKLLLPKPVSGGRFVTNDGSVHFDGVASIAHLHGIDAELLTISCAGRGYLNIELLDENPVAEKFRYLHADLPLLSGRNDKLQQISLYENYNLLNAMLACAWNSNSTLCVDFYSDRFGKDKATLNIKRYDGSFIEHDQGLLVDIKNSVVFPANRIDELVVDAISLKNPGSHISLLKKDEFAYDLSALNVQDSPWLIVGKLDGTARIAPVIKWMLPVLQTNDLLLNALCEADPEQRKKNFNELIFEIDNNPLQNYCCLLTEYIKKYKMNNGLSLLDLDLFRGISSNYRVVVQLLISSCLSGDSDTIYDIQEELPFSWGWIPVSIWKDVFQKCWTYLEKQINDKTLALHILQPFIAFMNHRAHIDRRLAPIANMLLTYSESLPTGCDVLPTVSREQFNEAKQMLLRNPDSFGRISIFPKELWSSAITPELKSVFNKLWIEDKYHSRLEKRFNLMLVAALLTQKDNNLIHQLSALFEFHYQQAPQQLGVIYQYYFEQAGVCH

SEQ ID NO: 25273 - protein, 2104 aa, Escherichia coli; identical to SEQ ID NO: 25235

SEQ ID NO: 25274 - protein, 978 aa, Escherichia coli; identical to SEQ ID NO: 25216

SEQ ID NO: 25275 - protein, 2104 aa, Escherichia coli; identical to SEQ ID NO: 25235

SEQ ID NO: 25276 - protein, 978 aa, Escherichia coli; identical to SEQ ID NO: 25216

SEQ ID NO: 25277 - protein, 2104 aa, Escherichia coli; identical to SEQ ID NO: 25235

SEQ ID NO: 25278 - protein, 978 aa, Escherichia coli; identical to SEQ ID NO: 25216

SEQ ID NO: 25279 - protein, 2104 aa, Escherichia coli; identical to SEQ ID NO: 25235

SEQ ID NO: 25280 - protein, 978 aa, Escherichia coli; identical to SEQ ID NO: 25216

SEQ ID NO: 25281 - protein, 2104 aa, Escherichia coli; identical to SEQ ID NO: 25235

SEQ ID NO: 25282 - protein, 978 aa, Escherichia coli; identical to SEQ ID NO: 25216

SEQ ID NO: 25283 - protein, 2104 aa, Escherichia coli; identical to SEQ ID NO: 25235

SEQ ID NO: 25284 - protein, 978 aa, Escherichia coli; identical to SEQ ID NO: 25216

SEQ ID NO: 25285 - protein, 2104 aa, Escherichia coli; identical to SEQ ID NO: 25235

SEQ ID NO: 25286 - protein, 978 aa, Escherichia coli; identical to SEQ ID NO: 25216

SEQ ID NO: 25287 - protein, 2104 aa, Escherichia coli; identical to SEQ ID NO: 25235

SEQ ID NO: 25288 - protein, 978 aa, Escherichia coli; identical to SEQ ID NO: 25216

SEQ ID NO: 25289 - protein, 2104 aa, Escherichia coli; identical to SEQ ID NO: 25235

SEQ ID NO: 25290 - protein, 978 aa, Escherichia coli; identical to SEQ ID NO: 25216

SEQ ID NO: 25291 - protein, 2104 aa, Escherichia coli; identical to SEQ ID NO: 25235

SEQ ID NO: 25292 - protein, 978 aa, Escherichia coli; identical to SEQ ID NO: 25216

SEQ ID NO: 25293 - protein, 2104 aa, Escherichia coli; identical to SEQ ID NO: 25235

SEQ ID NO: 25294 - protein, 978 aa, Escherichia coli; identical to SEQ ID NO: 25216

SEQ ID NO: 25295 - protein, 2116 aa, Escherichia coli
MTTRYFSSLIEQSLSRSTEATLSIMGVTNPQLREHLAQQMGADCGKPGSFLASPVFQQMFGWKESNHTMRSLTEGNALLSKAVVDSLDNQSNGRYRFGADWKPFTHQLASWKALLEKKHSVVVTSGTGSGKTECFMVPVLEDLYRELHENGNNPLVGVRALFLYPLNALINSQRERLDAWTRGFGTGIRYCLYNGNTEELHAKMKTVQDNRPNEVLSREKMRLEPAPILVTNGTMLEYMMVRQVDAPIIQQSKAQKSLRWIVLDEAHTYVGSQAAELALQLRRVMTAFGVTPDDVRFVATSATIAGSDAEKQLKKFLSELSGIPQERIDVLDGSRVIPELEPSKNVSVPLDEIEQIPDLDLKDKNDNKIKGISPERFYALTHSPEARYIREMLVKHPNPMKLDEMTERLNILTKQHHSQHEVLRWIDVCSGTQPNAKDPAFLKVRAHIFQRNTQGIWACVDKDCRLKHGTPLEKGWPFGYVYVNQRQNCDCGSPVYEVAFCNDCNEPHLLARDKKGKLVQWENKGGDEFSLQDEVPVEHDATAEKVEKENSFQPPLIIAAGETSEAGYTLQRLDRQTRRIGVINNDSIPLIINDVEQVCSASGCGCGYRGMSGKQPFRRALLGGPFYVTNIVPTVLEYCQDFTSDEGKEGVGPDSLPGRGRRLITFTDSRQGTARMAVRMQQEAERSRLRGSVVEILSWHQRTQTSTAPNANADLEKLATRAKQAREQAEEYRSWGMPDQAKLSQAQAEQLEQAYQFAIGGKAATTLVSRTWTEMVNELKDKADIRGPVLKYNYYLKPEVFNENGGPLKLSEMLLFREFMRRPKRTNSLETQGLVQVGYLGLEKIHKLPMHWQERELTLDDWRDFLKVTLDHYVRESNFTQLDDELKNWIGSRFSSKFVRNPESKDPEDNQNRRWPQIRNGNVSHRLAKLLMLGAGFKTVNTATIDIINTWLKEAWAQLTGPLAVLKPDGNRFYLPKEHMTFSLITDAWICPVTNKILDTAFKGLTPYLPTHISFEHLTQAQYDTFVAQKVTMPEIWKLDRSQEDYAEGLAKARDWVSNDPLIAQLRSENVWTDINDRVVEGGFYYRTAEHSAQQSSERLQSYEKMFKNGQLNVLNCSTTMEMGVDIGGITAVVMNNVPPHPANYLQRAGRAGRSKESRAISYTLCKGNPHDQQVFANPLWPFETMIPAPMVAMNSARLVQRHVNALLLSDFLCNVIGETDKEKTSLDSLWFFGEDDGQSKCERFKIWLERPVLDIDTALERLVKGTALHGARAEHLRDKTISAITFLQQRWLSVYRDLVTQERESQPQTPYRKRIELEKKRHCGEYLLRDLAARTFLPGYGFPTDVVTFDNFTMEDYIREKLQKSRDKKDREDNVSRYKGLPSRNLGVAIREYAPGAEIILDGRVFRSAGVSLHWHNINADTNEAQRLDCAWRCHKCGTIGYEEGMSSSGMLFCSNSACGEKIIMDNRRQVLQPAGFVTDAHAPVTNNIETMKFVPVVPAWVFVKAEPVPLPNPLMGYMASGADGHVFQQSLGEGGHGYALCLSCGRAESMLNENDAPKSMEAHYPPRPGKADRDSQNHRLICPGSTALMKNVTLGALARTDVFEMVLRKPQKGEYLPDNTEEGRIVAMTLAVALRQALAGVLGISGAELGYSVRPVRLEDGQSVLAVQLYDVISGGAGFASSAPVHIEAILQGMVKQLGCRHCDTACSECLLDSQTRHDHDLLDRKAALAWLGDDFTYYIGLPDEETFSLPDARYCPGAIGDTIRRAINEGAEKLTLWMTGAPNEWDLYARQFRAAVQSYRLKDNVEVDLVIPAGVDDPDLLYELSQFTALGVRLCHVEQDLQLPIVAQVTFADRVMTLASRSQQATIPGPEWHLNDELVVRSLGYKTVELNEFILPAKAANAVERVKDIQIHKQLNGPLSQFGQRFWDVLFNDHEEAQSLMNNTRITGVHYTDRYLQNPVALALLGSILRPLKTKLTDGAEVALDTLFKDKDRPGNRPFHDWMSIADFQDFADQWFAAALGRPIELTVFDSPRDIPHHRKLTVTFEDGQVLKIRFDQGMGYWRINFASQWHYFDFRDDVSFQLVKMAQACNEGNVANSEESWATDVLVEVSAS

SEQ ID NO: 25296 - protein, 847 aa, Escherichia coli
MNGLLCAASVEAKPRLQKNKSTRCQFYWSEKHPDELRAIVSLPDEVSFPVTSEPSTTRFELAICEDGEEVSGLGPAYASLENRQATVRLRKSEVRFVRQNPSAGLSLVARAGGMIVGSIKLDDSEIAIGEVPLTFIVDADQWLLQGQASCSVQSSDVLIVLPRDNSTVAGFDGQSSAVNVLGLKALPVKGCQDVTVTANETYRIRTGREQISIGRFALNGKRASWVCHPDETFIGVPKVISTLPDIQSIDVTRYLSGISIEQCHIQEMLGAQYLSIRNSNNETLLRRKIGILPADFSIEIKGGMHANEGTIVITTQHPCVAKLKDKTLEATRKRTEGRTEIQLKAEGVPPAFITLQVLPNLAADPIDIELPFPAKGCLALDVNGRPLDKNITLHDLLGSRAFLFSRNGEPTKYTLQLYLRSVSGLQAWHEWCYTALSDRPVELNLYSLREHIENLISLEAGIDQVVEMRITGAGVVMAWQIRRYKYSLRYDYEKELLLSQSVNHRAGQIPSPVIMLLSEPERKSIPLASRMSEGVPVGEYELSSIVNKNGPWLVVPKPGEEMAFRPCFIRGESSLPVEESNIRSLQKATQLFNPQAEVNTITRVLGQMANDPAHSGWQFMRSLYDQFGYLPLATFEVWRALVQHPQALAMSLFKFEMSAEYLSRIENEFPILWEFFPIFEIKAASERFKLFLSQKGAPEETQKLLVTNMFQRLGLVFPTYADEIEKWLSNGYLPPSIPESCVHGWYQELLREHSEARWPEYGCKRLYEWMMSQKNPVIGINPDADYRYSVAWLPVFAAAVASGNASFESVFDRKPGAVFFLRQVRDFDSRWFKAIFQCSLLRYVAKK

SEQ ID NO: 25297 - protein, 2104 aa, Escherichia coli; identical to SEQ ID NO: 25235

SEQ ID NO: 25298 - protein, 978 aa, Escherichia coli; identical to SEQ ID NO: 25216

SEQ ID NO: 25299 - protein, 2104 aa, Escherichia coli; identical to SEQ ID NO: 25235

SEQ ID NO: 25300 - protein, 978 aa, Escherichia coli; identical to SEQ ID NO: 25216

SEQ ID NO: 25301 - protein, 2104 aa, Escherichia coli; identical to SEQ ID NO: 25235

SEQ ID NO: 25302 - protein, 978 aa, Escherichia coli; identical to SEQ ID NO: 25216

SEQ ID NO: 25303 - protein, 2104 aa, Escherichia coli; identical to SEQ ID NO: 25235

SEQ ID NO: 25304 - protein, 978 aa, Escherichia coli; identical to SEQ ID NO: 25216

SEQ ID NO: 25305 - protein, 2104 aa, Escherichia coli; identical to SEQ ID NO: 25235

SEQ ID NO: 25306 - protein, 978 aa, Escherichia coli; identical to SEQ ID NO: 25216

SEQ ID NO: 25307 - protein, 2104 aa, Escherichia coli; identical to SEQ ID NO: 25215

SEQ ID NO: 25308 - protein, 978 aa, Escherichia coli; identical to SEQ ID NO: 25216

SEQ ID NO: 25309 - protein, 2104 aa, Escherichia coli; identical to SEQ ID NO: 25243

SEQ ID NO: 25310 - protein, 978 aa, Escherichia coli; identical to SEQ ID NO: 25216

SEQ ID NO: 25311 - protein, 2104 aa, Escherichia coli
MDVQQLHYAPLLNQLHQRAVRSVVSQLALRSKSLTHYLESQYFQPPGQEGSLLADPVFESTFGWMPADETMEDLRDKLISSPLVDALSKAPVPFRHQLTAWRTILEDKKSLLVSSGTGSGKTECFMVPVLEDLIRQQKSTRQSLTGTQAIFLYPLNALINSQQERLREWTRGFKGKIRFALYNGETRHTKYEIQEDQLKVPEQALSREAIYEEPPSIMVTNTTMLEYMLIRRKDAPIIEKSQGMLKYIVLDEAHSYIGSQAAELALLLRRVMQAFNVGPGTDKPVQIIATSATIGEDSPEGNKELAKFVADLAGVTERDVKVVRGYRQIPRVSESLIRHEYPTSLTSLKSLSPQDLYQQLCHYRVAQQLRQALTHPGRQAVRLSELLNVARRTWPDINHRELLQLLDLMARSREGELAFTPLRMHGFIRTLAGLWACSNKQCSHKAHELNQSDWPFGQVWFEQRQYCDCGAPVFEVLRCSGCGSAYLSAKEEMRGDGTNWLVAQPAAAEVDEFALDVDVYSEDEDNDELDNNSQFDRLIASDGEKYIISLEETTAGKIDSEAQKHYEINLLRPESRGEGRNNSFACVCCGDTQRKNNPLFRPLRLGAPFFLNEIIPTLLEFSPLPQTREEQLGPFNGRRLLTFTDSRQGTARISARLQQDADKATLRALCYQELANITEPSAKLSPAHCALLEKVISQFSVLPLKNSIDALKKAMAANEELSPTDIQALKIIEPMVSSLSTEHAEAMQILQANSGNQQKKTMSWQTLSEQLVGSVDLADRMRGSFKELSGLDLTKQQFADFCLYSEFGRRPKNAWTLESLGLVAIHYPFIDKVTTCPQDWKTLLPDPDKQLAEWRNLLKITLDFFIRENSAVFYENEQYPRWMGARFPVKMLQGPDKKNKGQKRDQLWPQIRDRHYNRVIKLLIAVFPAIQPEQAHWKSLVNHLMIEVWDAIRPCLRQFESGYQLDIKQQAEFYSPKQVWRCPYTRRALDVTLLGYSPYLPGSKEIAPEKAVLIEMPELPVRHWRLSGGGEIAREERLEWLESNALIQHAREEGLWSTRSDRLALKDSWYRLEEHSAQRTPEQNQFNEKQFKSGKVNVLNCSTTMEMGVDIGGMSLVAMNNVPPAPANYLQRAGRAGRRGESASAAITLCKNTAHGMEVFKDPLWAFNTTASAPRVRFGSSSIVQRHVNALVLGLFLRAEVPDATKLSCKWFFEGDESQCLRFLHWLNHQADQLADKLKRLTQGTVLMSLTATQLLTRTQAMMQQVDIRWRSQLAILLENIEALKADNSAWEETPAGKAIAYQLRDYRGAYLFSKLISEAFLPGHGFPVGVVNFNYLTADELEKRRAIKATQADPNEGGESFSRRIEKLPSRDLPTALREYAPGADVVLGGKVYRSSGIMLGKVLASGQELSGDHHIPWFWHCRKCGAGATSTTHPVECSHCKADIQQLDVKRYLQPVGFATDIRYQAHNDVSMPAQLPWKDPRVLVPSSVWVSLPDAGLGRYRFSHSGELFHFSEGEFGHGYAICLSCGRAESQTQPQRTPENLKNPERENTHYLLRGGSNDRQGSNKLCHGHVHKDLWLGYSSRTDMVELQLNDDNGLLIRDEVAARSLAVALREGLAHKLGIENTELGVTTQQARDINGYTGYSIFIYDNNAGGAGYAVQLIDHWADVFNYARKLLDCSCDKFCHHCLLSYDSQHYVNRLDRHHALTLLTNVRLQRLNLAPEYQYFGDGSRVETNPLSLRIAQCLNSEIYDSCSLVLAGPQEQWDFAQWPLFKELLQFASSGGNVELLVATPLANLTDSSRHQLSALAAMPGGRLQVKSIATAQLMQGKGRWLAQVTREGQSQQWAADDSATVAPGELWGQSASSPVVTLKGTSGKTFSGQTLSAEDLLPALPTGAVRINLCEQLDGPLEGFGSRFWSLVTQQHAGWKQAFTRHKEITHVEYSDRYLNSPFTARLLGEILTELVEQGMAERASLTVCVKKLDYNSRQHDALYNAWLNEEDRQQVVTTLLEEGYLGPAWPGAISWLTGDNQSTEHGRELTVTFSDGSQHYVLLDMGLSYWRCIEDTFFDFALRVPQQVERLANTRARAVAPGNDLRSYIIAG

SEQ ID NO: 25312 - protein, 978 aa, Escherichia coli; identical to SEQ ID NO: 25216

SEQ ID NO: 25313 - protein, 2104 aa, Escherichia coli; identical to SEQ ID NO: 25235

SEQ ID NO: 25314 - protein, 978 aa, Escherichia coli; identical to SEQ ID NO: 25216

SEQ ID NO: 25315 - protein, 2104 aa, Escherichia coli; identical to SEQ ID NO: 25235

SEQ ID NO: 25316 - protein, 978 aa, Escherichia coli; identical to SEQ ID NO: 25216

SEQ ID NO: 25317 - protein, 2104 aa, Escherichia coli; identical to SEQ ID NO: 25235

SEQ ID NO: 25318 - protein, 978 aa, Escherichia coli; identical to SEQ ID NO: 25216

SEQ ID NO: 25319 - protein, 2104 aa, Escherichia coli; identical to SEQ ID NO: 25235

SEQ ID NO: 25320 - protein, 978 aa, Escherichia coli; identical to SEQ ID NO: 25216

SEQ ID NO: 25321 - protein, 2104 aa, Escherichia coli; identical to SEQ ID NO: 25235

SEQ ID NO: 25322 - protein, 978 aa, Escherichia coli; identical to SEQ ID NO: 25216

SEQ ID NO: 25323 - protein, 2104 aa, Escherichia coli; identical to SEQ ID NO: 25235

SEQ ID NO: 25324 - protein, 978 aa, Escherichia coli; identical to SEQ ID NO: 25216

SEQ ID NO: 25325 - protein, 2104 aa, Escherichia coli; identical to SEQ ID NO: 25235

SEQ ID NO: 25326 - protein, 978 aa, Escherichia coli; identical to SEQ ID NO: 25216

SEQ ID NO: 25327 - protein, 2104 aa, Escherichia coli
MDVQQLHYAPLLNQLHQRAVRSVVSQLALRSKSLTHYLESQYFQPPGQEGSLLADPVFESTFGWMPADETMEDLRDKLISSPLVDALSKAPAPFRHQLTAWRTILEDKKSLLVSSGTGSGKTECFMVPVLEDLIRQQKSTRQSLTGTQAIFLYPLNALINSQQERLREWTRGFKGKIRFALYNGETRHTKYEIQEDQLKVPEQALSREAIYEAPPSIMVTNTTMLEYMLIRRKDAPIIEKSQGMLKYIVLDEAHSYIGSQAAELALLLRRVMQAFNVGPGTDKPVQIIATSATIGEDSPEGNKELAKFVADLAGVTERDVKVVRGYRQIPRVSESLIRHEYPTSLTSLKSLSPQDLYQQLCHYRVAQQLRQALTHPGRQAVRLSELLNVARRTWPDINHRELLQLLDLMARSREGELAFTPLRMHGFIRTLAGLWACSNKQCSHKAHELNQSDWPFGQVWFEQRQYCDCGAPVFEVLRCSGCGSAYLSAKEEMRGDGTNWLVAQPAAAEVDEFALDVDVYSEDEDNDELDNNSQFDRLIASDGEKYIISLEETTAGKIDSEAQKHYEINLLRPESRGEGRNNSFACVCCGDTQRKNNPLFRPLRLGAPFFLNEIIPTLLEFSPLPQTREEQLGPFNGRRLLTFTDSRQGTARISARLQQDADKATLRALCYQELANITEPSAKLSPAHCALLEKVISQFSVLPLKNSIDALKKAMAANEELSPTDIQALKIIEPMVSSLSTEHAEAMQILQANSGNQQKKTMSWQTLSEQLVGSVDLADRMRGSFKELSGLDLTKQQFADFCLYSEFGRRPKNAWTLESLGLVAIHYPFIDKVTTCPQDWKTLLPDPDKQLAEWRNLLKITLDFFIRENSAVFYENEQYPRWMGARFPVKMLQGPDKKNKGQKRDQLWPQIRDRHYNRVIKLLIAVFPAIQPEQAHWKSLVNHLMIEVWDAIRPCLRQFESGYQLDIKQQAEFYSPKQVWRCPYTRRALDVTLLGYSPYLPGSKEIAPEKAVLIEMPELPVRHWRLSGGGEIAREERLEWLESNALIQHAREEGLWSTRSDRLALKDSWYRLEEHSAQRTPEQNQFNEKQFKSGKVNVLNCSTTMEMGVDIGGMSLVAMNNVPPAPANYLQRAGRAGRRGESASAAITLCKNTAHGMEVFKDPLWAFNTTASAPRVRFGSSSIVQRHVNALVLGLFLRAEVPDATKLSCKWFFEGDESQCLRFLHWLNHQADELADKLKRLTQGTVLMSLTATQLLTRTQAMMQQVDIRWRSQLAILLENIEALKADNSAWEETPAGKAIAYQLRDYRGAYLFSKLISEAFLPGHGFPVGVVNFNYLTADELEKRRAIKATQADPNEGGESFSRRIEKLPSRDLPTALREYAPGADVVLGGKVYRSSGIMLGKVLASGQELSGDHHIPWFWHCRKCGAGATSTTRPVECSHCKADIQQLDVKRYLQPVGFATDIRYQAHNDVSMPAQLPWKDPRVLVPSSVWVSLPDAGLGRYRFSHSGELFHFSEGEFGHGYAICLSCGRAESQTQPQRTPENLKNPERENTHYLLRGGSNDRQGSNKLCHGHVHKDLWLGYSSRTDMVELQLNDDNGLLIRDEVAARSLAVALREGLAHKLGIENTELGVTTQQARDINGYTGYSIFIYDNNAGGAGYAVQLIDHWADVFNYARKLLDCSCDKFCHHCLLSYDSQHYVNRLDRHHVLTLLTNVRLQRLNLAPEYQYFGDGSRVETNPLSLRIAQCLNSEIYDSCSLVLAGPQEQWDFAQWPLFKELLQFASSGGNVELLVATPLANLTDSSRHQLSALAAMPGGRLQVKSIATAQLMQGKGRWLAQVTREGQSQQWAADDSATVAPGELWGQSASSPVVTLKGTSGKTFSGQTLSAEDLLPALPTGAVRINLCEQLDGPLEGFGSRFWSLVTQQHAGWKQAFTRHKEITHVEYSDRYLNSPFTARLLGEILTELVEQGMAERASLTVCVKKLDYNSRQHDALYNAWLNEEDRQQVVTTLLEEGYLGPAWPGAISWLTGDNQSMEHGRELTVTFSDGSQHYVLLDMGLSYWRCIEDTFFDFALRVPQQVERLANTRARAVAPGNDLRSYVIAG

SEQ ID NO: 25328 - protein, 978 aa, Escherichia coli
MIENESGYLITYFRRIYQALRGQSSQYPAAKIAQELGDTIPVTMQNELVYEIAGEFCETLCRLLSEHPPHSSDPVSALRKLSPDWHLQLPLVLPEANAAEIVRRLLSQSSEIRSASSLQVERIWVDVDDSWYCDARFRFPATMRTEQLTSLFECHIQPEQTRLIISGKWKNGGARLAMLSRYEQQDWRVELLPIAMQKLSGADAMAEISLSLHEGPILLGHTIPKGGYELTEELPWVFEAMNESESQLKLVGMGSVSSRLNALFISLPKNSHLDISGEGEFDIPRLLKNSERSLTKISGVFSVVLHDGAVCTIRTQQLYDSAIEYYIKSTEVELVKSDYPVHRAWPKIGWKKDLQYGIVPEKELFWRSIRSGNNAWYSVASEMPKGQIEVRRIVNDEVLFSGKVVVLPADFDINIIPESAQQGIIMLSGITDTRIDKYSNNEKVTLKSDYSQNECAIYYNSSLMLENTVDLRVSWKDGSNLKLLLPKPVSGGRFVTNDGSVHFDGVASIAHLHGIDAELLTISCAGRGYLNIELLDENPVAEKFRYLHADLPLLSGLNDKLQQISLYENYNLLNAMLACAWNSNSTLCVDFYSDRFGKDKATLNIKRYDGSFIEHDQGLLVDIKNSVVFPANRIDELVVDAISLKNPGLHISLLKKDEFAYDLSALNVQDSPWLIVGKLDGTARIAPVIKWMLPVLQTNDLLLNALCEADPEQRKKNFNELIFEIDNNPLQNYCCLLTEYIKKYKMNNGLSLLDLDLFRCISSNYRVVVQLLISSCLSGDSDTIYDIQEELPFSWGWIPVSIWKDVFQKCWTYLEKQINDKTLALHILQPFIAFMNHRAHIDRRLAPIANMLLTYSESLPTGCDVLPTVSREQFNEAKQMLLRNPDSFGRISIFPKELWSSAITPELKSVFNKLWIEDKYHSRLEKRFNLMLVAALLTQKDNNLIHQLSALFEFHYQQAPQQLGVIYQYYFEQAGVCH

SEQ ID NO: 25329 - protein, 2114 aa, Escherichia coli
MTTRYFSSLIEQSLSRSTEATLSIMGVTNPQLREHLAQQMGADCGKPGSFLASPVFQQMFGWKESNHTMRSLTEGNALLSKAVVDSLDNQSNGRYRFGADWKPFTHQLASWKALLEKKHSVVVTSGTGSGKTECFMVPVLEDLYRELHENGNNPLVGVRALFLYPLNALINSQRERLDAWTRGFGTGIRYCLYNGNTEELHAKMKTVQDNRPNEVLSREKMRLEPAPILVTNGTMLEYMMVRQVDAPIIQQSKAQKSLRWIVLDEAHTYVGSQAAELALQLRRVMTAFGVTPDDVRFVATSATIAGSDAEKQLKKFLSELSGIPKERIDVLDGSRVIPELEPSKNVSLPLDEIEQIPDLDLRDKNDNKIKGISPDRFYALTHSPEARYIREMLVKQPNPMKLDEITERLNVLTKQHYSQQEVLRWIDVCSGTQPNAKDPAFLKVRAHIFQRNTQGIWACVDKDCRLKHGTPLEKGWPFGYVYVNQRQNCDCGSPVYEVAFCNDCNEPHLLAQDKKGKLVQWENKGGDEFSLQDEVPVEHDTTEEKVEKENSFQPPLIIAAGETSETGYTLQRLDRQTRRIGVINNDSIPLIINDIEQVCSASGCGYRGMSGKQPFRRALLGGPFYVTNIVPTVLEYCQDFASDEGKEGVGPDSLPGRGRRLITFTDSRQGTARMAVRMQQEAERSRLRGSVVEILSWHQRTQTPTAPNANADLEKLATRVKQAREQAEEYRSWGLPDQAKLSEAQAEQLEQAYQSAIGGKAAITLVSRTWTEMVNELKERADIRGPVLQYNHYLKPEVFNENGGPLKLSEMLLFREFMRRPKRTNSLETQGLVQVGYLGLEKIHKIPLHWQEKGLTLDDWRDFLKVTLDHYVRESNFTQLDDELKNWIGSRFSSKFVRNPESKDPEDNQNRRWPQIRNGNVSHRLAKLLMLGAGFKTVNTATIDIINTWLKEAWAQLTGPLAVLKPDGNRFYLPKEHMTFSLITDAWICPVTNKILDTAFKGLTPYLPTHISFEHLTQAQYDTFVAQKVTMPEIWKLDRSQEDYAEGLAKARDWVSNDPLIAQLRSENVWTDINDRVVEGGFYYRTAEHSAQQSSERLQSYEKMFQIGQLNVLNCSTTMEMGVDIGGITAVVMNNVPPHPANYLQRAGRAGRSKESRAISYTLCKGNPHDQQVFANPLWPFETMIPAPMVAMNSPRLVQRHVNALLLSDFLCNVIGETDKEKTSLDSLWFFGEDDGQSKCERFKIWLERPVLDIDTALERLVKGTALHGARAEYLRDKTINAITFLQQRWLSVYRDLVTQERESQPQTPYRKRIELEKKRHCGEYLLRDLAARTFLPGYGFPTDVVTFDNFTMEDYIREKSQKSRDKKDREDNVSRYKGLPSRNLGVAIREYAPGAEIILDGRVFRSAGVSLHWHNINADTNEAQRLDCAWRCHKCGTIGYEEGMSSSGMLFCSNSACGEKIIMDNRRQVLQPAGFVTDAHAPVTNNIETMKFVPVVPAWVFVKAEPVPLPNPQMGYMASGADGHVFQQSLGEGGHGYALCLSCGRAESMLNENDAPKSMEAHYPPRPGKADRDSQNHRLICPGSTALMKNVTLGALARTDVFEMVLRKPQNGEYLPDNTEEGRIVAMTLAVALRQALAGVLGISAAELGYSVRPVRLEDGQSVLAVQLYDVISGGAGFASSAPVHIEAILQGMVKQLGCRHCETACSECLLDSQTRHDHDLLDRKAALAWLGDDFTYYIGLPDEETFSLPDARYCPGAIGDTIRRAINEGAEKLTLWMTGAPNEWDLYARQFRAAVQNYRLKDNVEVDLVIPAGVDDPDLLHELSQFTALGVRLCHVEQDLKLPIVAQVTFADRVMTLASRSQQATIPGPEWHLNDELVVRSLGYKTVELNEFILPAKAANAVERVKDIQIHKQLNGPLSQFGQRFWDVLFNDHEEAQSLMNNTRITGVHYTDRYLQNPVALALLGSILRPLKTKLTDGAEVTLDTLFKDKDHPGNRPFHDWMSIADFQDFADQWFAAALGRPVELTVFDSPRDIPHHRKLTVTFDDGQVLKIRFDQGMGYWRINFASQWHYFDFRDDVSFQLVKMAQACKEGNVANSEESWATDVLVEVIAS

SEQ ID NO: 25330 - protein, 734 aa, Escherichia coli
MIVGSIKLDDSEIAIGEVPLTFIVDADQWLLQGQASCSVRSSDVLIVLPRDNSNVAGFDGQSSAVNVLGLKALPVKGCQDVTVTANETYRIRTGREQISIGRFALNGKRASWVCHPDETFIGVPKVISTLPDIQSIDVTRYLSGISIEQCHIQEMLGAQYLSIRNSNNETLLRRKIGILPADFSIEIKGGMHANEGTILITTQHPCVAKLKDKTLEATRKRTEGRTEIQLKAEGVPPAFITLQVLPNLAADPIDIELPFPAKGCLALDVNGRPLDKNITLHDLLGSRAFLFSRNGEPTKYTLQLYLRSVSGLQAWHEWCYTALSDRPVELNLYSLREHIENLISLEAGIDQVVEMRITEAGVVMAWQIRRYKYSLRYDYEKELLLSQSVNHRAGQIPSPVIMLLSELERKSIPLASRMSEGVPVGEYELSSIVNKNGPWLVVPKPGEEMAFRPCFIRGESSLPVEESNIRSLQKATQLFNPQAEVNTITLVLGQMANDPAHSGWQFMRSLYDQFGYLPLATFEVWRALVQHPQALAMSLFKFEMSAEYLSRIENEFPILWEFFPIFEIKAASERFKLFLSQKGAPEETQKLLVTNMFQRLGLVFPTYADEIEKWLSNGYLPPSIPESCVHGWYQELLREHSEARWPEYGCKRLYKWMMSQKNPVIGINPDANHRYSVAWLPVFAAAVASGNTSFEAVFDRKPGAVFFLRQVRDFDSRWFKTIFQCSLLRYVAKK

SEQ ID NO: 25331 - protein, 2114 aa, Escherichia coli; identical to SEQ ID NO: 25257

SEQ ID NO: 25332 - protein, 1096 aa, Escherichia coli
MGQSEYISWVKCTSWLSNFVNLRGLRQPDGRPLYEYHATNDEYTQLTQLLRAVGQSQSNICNRDFAACFVLFCSEWYRRDYERQCGWTWDPIYKKIGISFTATELGTIVPKGMEDYWLRPIRFYESERRNFLGTLFSEGGLPFRLLKESDSRFLAVFSRILGQYEQAKQSGFSALSLARAVIEKSALPTVFSEDTSVELISHMADNLNSLVLTHNLINHKEPVQQLEKVHPTWRSEFPIPLDDETGTHFLNGLLCAASVEAKPRLQKNKSTRCQFYWSEKHPDELRVIVSLPDEVSFPVTSEPSTTRFELAICEDGEEVSGLGPAYASLENRQATVRLRKSEVRFGRQNPSAGLSLVARAGGMIVGSIKLDDSEIAIGEVPLTFIVDADQWLLQGQASCSVRSSDVLIVLPRDNSNVAGFDGQSRAVNVLGLKALPVKGCQDVTVTANETYRIRTGREQISIGRFALNGKRASWVCHPDETFIGVPKVISTLPDIQSIDVTRYLSGISIEQCHIQEMLGAQYLSIRNSKNETLLRRKIGILPADFSIEIKGGIHANEGTIVITTQHPCVAKLKDKTLEATRKRTEGRTEIQLKAEGVPPAFITLQVLPNLAADPIDIELPFPAKGCLALDVNGRPLDKNITLHDLLGSRAFLFSRNGEPTRYTLQLHLRSVSGLQAWHEWCYTALSDRPVELNLYSLREHIENLISLEAGIDQVVEMRITGAGVVMAWQIRRYKYSLRYDYEKELLLSQSVNHRAGQIPSPVIMLLSEPERKSIPLASRMSEGVPVGEYELSSIVNKNGPWLVVPKPGEEMAFRPCFIRGESSLPVEESNIRSLQKATQLFNPQAEVNTITLVLGQMANDPAHSGWQFMRSLYDQFGYLPLATFEVWRALVQHPQALAMSLFKFEMSAEYLSRIENEFPILWEFFPIFEIKAASERFKLFLSQKGAPEETQKLLVTNMFQRLGLVFPTYADEIEKWLSNGHLPPSIPESFVHVWYQELLREHSEAQWPEYGSKRLHSWMASQKNPVIGINPDANHRYSVALLPVFAAAVASGNASFESVFDRKPGAVFFLRQVRDFDSRWFKAIFQCSLLRYVAKK

SEQ ID NO: 25333 - protein, 2114 aa, Escherichia coli; identical to SEQ ID NO: 25217

SEQ ID NO: 25334 - protein, 734 aa, Escherichia coli
MIVGSIKLDDSEIAIGEVPLTFIVDADQWLLQGQASCSVRSSDVLIVLPRDNSTVAGFDGQSSAVNVLGLKALPVKGCQDVTVTANETYRIRTGREQISIGRFALNGKRASWVCHPDETFIGVPKVISTLPDIQSIDVTRYLSGISIEQCHIQEMLGAQYLSIRNSNNETLLRRKIGILPADFSIEIKGGMHANEGTIVITTQHPCVATLKDKTLEATRKRTEGRTEIQLKAEGVPPAFITLQVLPNLAADTIDIELPFPAKGCLALDVNGRPLDKNITLHDLLGSRAFLFSRNGEPTKYTLQLHLRSISGLQAWHEWSYTALSERPVELNLYSLREHIENLISLEAGIDQVVEMRITGAGVVMAWQIRRYKYSLRYDYEKELLLSQSVNHRAGQIPSPVIMLLSEPERKSIPLASRMSEGVPVGEYELSSIVNKNGPWLVVPKPGEEMAFRPCFIRGESSLPVEESNIRSLQKATQLFNPQAEVNTITRVLGQMANDPAHSGWQFMRSLYDQFGYLPLATFEVWRALVQHPQALAMSLFKFEMSAEYLSRIENEFPILWEFFPIFEIKAASERFKLFLSQKGAPEETQKLLVTNMFQRLGLVFPTYADEIEKWLSNGYLPPSIPESCVHGWYQELLREHSEARWPEYGCKRLYKWMMSQKNPVIGINPDANHRYSVAWLPVFAAAVASGNASFESVFDRKPGAVFFLRQVRDFDSRWFKAIFQFSLLRYVAKK

SEQ ID NO: 25335 - protein, 2114 aa, Escherichia coli; identical to SEQ ID NO: 25257

SEQ ID NO: 25336 - protein, 1096 aa, Escherichia coli
MGQSEYISWVKCTSWLSNFVNLRGLRQPDGRPLYEYHATNDEYTQLTQLLRAVGQSQSNICNRDFAVCFVLFCSEWYRRDYERQCGWTWDPIYKKIGISFTATELGTIVPKGMEDYWLRPIRFYESERRNFLGTLFSEGGLPFRLLKESDSRFLAVFSRILGQYEQAKQSGFSALSLARAVIEKSALPTVFSEDTSVELISHMADNLNSLVLTHNLINHKEPVQQLEKVHPTWRSEFPIPLDDETGTHFLNGLLCAASVEAKPRLQKNKSTRCQFYWSEKHPDELRVIVSLPDEVSFPVTSEPSTTRFELAICEDGEEVSGLGPAYASLENRQATVRLRKSEVRFGRQNPSAGLSLVARAGGMIVGSIKLDDSEIAIGEVPLTFIVDADQWLLQGQASCSVRSSDVLIVLPRDNSNVAGFDGQSRAVNVLGLKALPVKGCQDVTVTANETYRIRTGREQISIGRFALNGKRASWVCHPDETFIGVPKVISTLPDIQSIDVTRYLSGISIEQCHIQEMLGAQYLSIRNSKNETLLRRKIGILPADFSIEIKGGIHANEGTIVITTQHPCVAKLKDKTLEATRKRTEGRTEIQLKAEGVPPAFITLQVLPNLAADPIDIELPFPAKGCLALDVNGRPLDKNITLHDLLGSRAFLFSRNGEPTRYTLQLHLRSVSGLQAWHEWCYTALSDRPVELNLYSLREHIENLISLEAGIDQVVEMRITGAGVVMAWQIRRYKYSLRYDYEKELLLSQSVNHRAGQIPSPVIMLLSEPERKSIPLASRMSEGVPVGEYELSSIVNKNGPWLVVPKPGEEMAFRPCFIRGESSLPVEESNIRSLQKATQLFNPQAEVNTITLVLGQMANDPAHSGWQFMRSLYDQFGYLPLATFEVWRALVQHPQALAMSLFKFEMSAEYLSRIENEFPILWEFFPIFEIKAASERFKLFLSQKGAPEETQKLLVTNMFQRLGLVFPTYADEIEKWLSNGHLPPSIPESFVHVWYQELLREHSEAQWPEYGSKRLHSWMASQKNPVIGINPDANHRYSVALLPVFAAAVASGNASFESVFDRKPGAVFFLRQVRDFDSRWFKAIFQCSLLRYVAKK

SEQ ID NO: 25337 - protein, 2114 aa, Escherichia coli; identical to SEQ ID NO: 25257

SEQ ID NO: 25338 - protein, 734 aa, Escherichia coli
MIVGSIKLDDSEIAIGEVPLTFIVDADQWLLQGQASCSVRSSDVLIVLPRDNSNVAGFDGQSRAVNVLGLKALPVKGCQDVTVTANETYRIRTGREQISIGRFALNGKRASWVCHPDETFIGVPKVISTLPDIQSIDVTRYLSGISIEQCHIQEMLGAQYLSIRNSKNETLLRRKIGILPADFSIEIKGGIHANEGTIVITTQHPCVAKLKDKTLEATRKRTEGRTEIQLKAEGVPPAFITLQVLPNLAADPIDIELPFPAKGCLALDVNGRPLDKNITLHDLLGSRAFLFSRNGEPTRYTLQLHLRSVSGLQAWHEWCYTALSDRPVELNLYSLREHIENLISLEAGIDQVVEMRITGAGVVMAWQIRRYKYSLRYDYEKELLLSQSVNHRAGQIPSPVIMLLSEPERKSIPLASRMSEGVPVGEYELSSIVNKNGPWLVVPKPGEEMAFRPCFIRGESSLPVEESNIRSLQKATQLFNPQAEVNTITLVLGQMANDPAHSGWQFMRSLYDQFGYLPLATFEVWRALVQHPQALAMSLFKFEMSAEYLSRIENEFPILWEFFPIFEIKAASERFKLFLSQKGAPEETQKLLVTNMFQRLGLVFPTYADEIEKWLSNGHLPPSIPESFVHVWYQELLREHSEAQWPEYGSKRLHSWMASQKNPVIGINPDANHRYSVALLPVFAAAVASGNASFESVFDRKPGAVFFLRQVRDFDSRWFKAIFQCSLLRYVAKK

SEQ ID NO: 25339 - protein, 2114 aa, Escherichia coli; identical to SEQ ID NO: 25257

SEQ ID NO: 25340 - protein, 1096 aa, Escherichia coli; identical to SEQ ID NO: 25332

SEQ ID NO: 25341 - protein, 2104 aa, Escherichia coli
MDVQQLHYAPLLNQLHQRAVRSVVSQLALRSKSLTHYLESQYFQPPGQEGSLLADPVFESTFGWMPADETMEDLRDKLISSPLVDALSKAPVPFRHQLTAWRTILEDKKSLLVSSGTGSGKTECFMVPVLEDLIRQQKSTRQSLTGTQAIFLYPLNALINSQQERLREWTRGFKGKIRFALYNGETRHTKYEVQEDQLKVPEQALSREAIYEAPPSIMVTNTTMLEYMLIRRKDAPIIEKSQGILKYIVLDEAHSYIGSQAAELALLLRRVMQAFNVGPGTDKPVQIIATSATIGEDSPEGNKELAKFVADLAGVTERDVKVVRGYRQIPRVSESLIRHEYPTSLTSLKSLSPQDLYQQLCHYRVAQQLRQALTHPGRQAVRLSELLNVARRTWPDINHRELLQLLDLMARSREGELAFTPLRMHGFIRTLAGLWACSNKQCLHKAHELNQSDWPFGQVWFEQRQYCDCGAPVFEVLRCSGCGSAYLSAKEEVRGDGTNWLVAQPAAAEVDEFALDVDVYSEDEDNDELDNNSQFDRLIAIDGEKYIISLEETTAGKIDSEAQKHYEINLLRPESRGEGRNNSFACVCCGDTQRKNNPLFRPLRLGAPFFLNEIIPTLLEFSPLPQTREEQLGPFNGRRLLTFTDSRQGTARISARLQQDADKATLRALCYQELANINEPSAKLSPAHCALLESFITQFSILPLKNSIDALKKAMVANEELSPADIQALKIIEPMVSSLSPDHAEAMQILQANSGNQQKKTMSWQTLSEQLVGSVDLADRMRGSFKELSGLDLTKQQFADFCLYSEFGRRPKNAWTLESMGLVAIHYPFIDKVTTCPQDWKTLLPDPDKQLAEWRNLLKITLDFFIRENSAVFYENEQYPRWMGARFPVKMLQGPDKKNKGQKRDQLWPQIRDRHYNRVIKLLIAVFPAIQPEQAHWKSLVNHLMIEVWDAIRPCLRQFESGYQLDIKQQAEFYSPKQVWRCPYTRRALDVTLLGYSPYLPGSKEIAPEKAVLIEMPELPVRHWRLSGGGEIAREERLEWLESNALIQHAREEGLWSTRSDRLALKDSWYRLEEHSAQRTPEQNQFNEKQFKSGKVNVLNCSTTMEMGVDIGGMSLVAMNNVPPAPANYLQRAGRAGRRGESASAAITLCKNTAHGMEVFKDPLWAFNTTASAPRVRFGSSSIVQRHVNALVLGLFLRAEVPDATKLSCKWFFEGDESQCLRFLHWLNNQADQLADKLKRLTQGTVLMSLTATQLLTRTQAMMQQVDIRWRSQLAILLENIEALKADNSAWEETPAGKAIAYQLRDYRGAYLFSKLISEAFLPGHGFPVGVVNFNYLTADELEKRRAIKATQADPNEGGESFSRRIEKLPSRDLPTALREYAPGADVVLGGKVYRSSGIMLGKVLASGQELSGDHHIPWFWHCRKCGAGATSTTRPVECSHCKADIQQLDVKRYLQPVGFATDIRYQAHNDVSMPAQPPWKDPRVLVPSSVWVSLPDAGLGRYRFSHSGELFHFSEGEFGHGYAICLSCGRAESQNQPQRTPENLKNPERENTHYLLRGGSNDRLGSNKLCHGHVHKDLWLGYSSRTDMVELQLNDDNGLLIRDEVAARSLAVALREGLAHKLGIENTELGVTTQQARDINGYTGYSIFIYDNNAGGAGYAVQLIDHWADVFNYARKLLDCSCDKFCHHCLLSYDSQHYVNRLDRHHALTLLTNVRLQRLNLAPEYQYFGDGSRVETNPLSLRIAQCLNSEIYDSCSLVLAGPQEQWDFAQWPLFKELLQFASSGGNVELLVATPLANLTDSSRHQLSALAAMPGGRLQVKSIATAQLMQGKGRWLAQVTREGQSQQWAADDSATVAPGELWGQSASSPVVTLKGTSGKTFSGQTLSAEDLLPALPTGAVRINLCEQLDGPLEGFGSRFWSLVTQQHAGWKQAFTRHKEITHVEYSDRYLNSPFTARLLGEILTELVEQGMAERASLTVCVKKLDYNSRQHDALYNAWLNEEDRQQVVTTLLEEGYLGPAWPGAISWLTGDNQSTEHGRELTVTFSDGSQHYVLLDMGLSYWRCIEDTFFDFALRVPQQVERLANTRARAVASGNDLRSYVIAG

SEQ ID NO: 25342 - protein, 978 aa, Escherichia coli
MIENESGYLITYFRRIYQALRGQASQYPAAKIAQELGDTIPVTMQNELVYEIAGEFCETLCRLLSEHPPQSSDPVSALRKLSPDWHLQLPLVLPEANAAEIVRRLLSQSSEIRSASSLQVERIWVDVDDSWYCDARFRFPATMRTEQLTSLFECNIQPEQTRLIISGKWRNGGARLAMLSRYEQQDWRVELLPIAMQKLSGADAMAEISLSLHEGPILLGHTIPKGGYELTEELPWVFEAMNESESQLKLVGMGSVSSRLNALFISLPKNSHLDISGEGEFDIPRLLKNSERSLTKISGVFSVVLHDGAVCTIRTQQLYDSAIEYYIKSTEVELVKSDYPVHRAWPKIGWKKDLQYGIVPEKELFWRSIRSGNNAWHSVASEMPKGQIEVRRIVNDEVLFSGKVVVLPADFDINIIPESVQQGIIMLSGITDTRIDKYSNNEKVTLKSDYSQNECAIYYNSSEMLENTVDLRVSWKDGSNLKLLLPKPVSGGRFVTHDGSVHFDGVASIAHLHGIDAELLTISCAGRGYLNIELLDENPVAEKFRYLHADLPLLSGCNDKLKQISLYENYNLLNAMLACAWNSNSTLCVDFYSDRFGKDKATLSIKRYDGSFIEHDQGLLVDIKNSVVFPANRIDELVVDAISLKDPGLHISLLKKDEFAYDLSALNVQDSPWLIVGKLDGTARIAPVIKWGLPVLQTNDLLLNALCEADSEQRKKYFNELIFEIDNNPLQNYCCLLTEYIKKYKMNNGLSLLDLDLFRGISSNYRVVVQLLISSCLSGDSDTIYDIQDELPFSWGWIPVSIWKDVFQKCWAYLEKQINDKTLALHILQPFIAFMNHRAHIDRRLAPIANMLLTYSELLPAGCNVLPTVSREQFNEAKQMLLRNPDSFGRISIFPKELWSSAITPELKSVFNKLWIEDKYHSRLEKRFNLMLVAALLTQKDNNLIYQLSALFEFHYQQAPQQLGVIYQYYFEQAGVCH

SEQ ID NO: 25343 - protein, 2104 aa, Escherichia coli
MDVQQLHYAPLLNQLHQRAVRSVVSQLALRSKSLTHYLESQYFQPPGQEGSLLADPVFESTFGWMPADETMEDLRDKLISSPLVDALSKAPVPFRHQLTAWRTILEDKKSLLVSSGTGSGKTECFMVPVLEDLIRQQKSTRQSLTGTQAIFLYPLNALINSQQERLREWTRGFKGKIRFALYNGETRHTKYEVQEDQLKVPEQALSREAIYEAPPSIMVTNTTMLEYMLIRRKDAPIIEKSQGMLKYIVLDEAHSYIGSQAAELALLLRRVMQAFNVGPGTDKPVQIIATSATIGEDSPEGNKELAKFVADLAGVTERDVKVVRGYRQIPRVSESLIRHEYPTSLTSLKSLSPQDLYQQLCHYRVAQQLRQALTHPGRQAVRLSELLNVARRTWPDINHRELLQLLDLMARSREGELAFTPLRMHGFIRTLAGLWACSNKQCSHKAHELNQSDWPFGQVWFEQRQYCDCGAPVFEVLRCSGCGSAYLSAKEEVRGDGTNWLVAQPAAAEVDEFALDVDVYSEDEDNDELDNNSQFDRLIAIDGEKYIISLEETTAGKIDSEAQKHYEINLLRPESRGEGRNNSFACVCCGDTQRKNNPLFRPLRLGAPFFLNEIIPTLLEFSPLPQTREEQLGPFNGRRLLTFTDSRQGTARISARLQQDADKATLRALCYQELANINEPSAKLSPAHCALLESFITQFSILPLKNSIDALKKAMVANEELSPADIQALKIIEPMVSSLSPDHAEAMQILQANSGNQQKKTMSWQTLSEQLVGSVDLADRMRGSFKELSGLDLTKQQFADFCLYSEFGRRPKNAWTLESLGLVAIHYPFIDKVTTCPQDWKTLLPDPDKQLAEWRNLLKITLDFFIRENSAVFYENEQYPRWMGARFPVKMLQGPDKKNKGQKRDQLWPQIRDRHYNRVIKLLIAVFPAIQPEQAHWKSLVNHLMIEVWDAIRPCLRQFESGYQLDIKQQAEFYSPKQVWRCPYTRRALDVTLLGYSPYLPGSKEIAPEKAVLIEMPELPVRHWRLSGGGEIAREERLEWLESNALIQHAREEGLWSTRSDRLALKDSWYRLEEHSAQRTPEQNQFNEKQFKSGKVNVLNCSTTMEMGVDIGGMSLVAMNNVPPAPANYLQRAGRAGRRGESASAAITLCKNTAHGMEVFKDPLWAFNTTASAPRVRFGSSSIVQRHVNALVLGLFLRAEVPDATKLSCKWFFEGDESQCLRFLHWLNNQADQLADKLKRLTQGTVLMSLTATQLLTRTQAMMQQVDIRWRSQLAILLENIEALKADNSAWEETPAGKAIAYQLRDYRGAYLFSKLISEAFLPGHGFPVGVVNFNYLTADELEKRRAIKATQADPNEGGESFSRRIEKLPSRDLPTALREYAPGADVVLGGKVYRSSGIMLGKVLASGQELSGDHHIPWFWHCRKCGAGATSTTRPVECSHCKADIQQLDVKRYLQPVGFATDIRYQAHNDVSMPAQLPWKDPRVLVPSSVWVSLPDAGLGRYRFSHSGELFHFSEGEFGHGYAICLSCGRAESQNQPQRTPENLKNPERENTHYLLRGGSNDRQGSNKLCHGHVHKDLWLGYSSRTDMVELQLNDDNGLLIRDEVAARSLAVALREGLAHKLGIENTELGVTTQQARDINGYTGYSIFIYDNNAGGAGYAVQLIDHWADVFNYARKLLDCSCDKFCHHCLLSYDSQHYVNRLDRHHALTLLTNVRLQRLNLAPEYQYFGDGSRVETNPLSLRIAQCLNSEIYDSCSLVLAGPQEQWDFAQWPLFKELLQFASSGGHVELLVATPLANLTDSSRHQLSALAAMPGGRLQVKSIATAQLMQGKGRWLAQVTREGQSQQWAADDSATVAPGELWGQSASSPVVTLKGTSGKTFLGQILSAEDLLPALPTGAVRINLCEQLDGPLEGFGSRFWSLVTQQHAGWKQAFTRHKEITHVEYSDRYLNSPFTARLLGEILTELVEQGMAERASLTVCVKKLDYNSRQHDALYNAWLNEEDRQQVVTTLLEEGYLGPAWLGAISWLTGDNQSTEHGRELTVTFSDGSQHYVLLDMGLSYWRCIEDTFFDFALRVPQQVERLANTRARAVAPGNDLRSYIIAG

SEQ ID NO: 25344 - protein, 978 aa, Escherichia coli
MIENESGYLITYFRRIYQALRGQASQYPAAKIAQELGDTIPVTMQNELVYEIAGEFCETLCRLLSEHPPQSSDPVSALRKLSPDWHLQLPLVLPEANAAEIVRRLLSQSSEIRSASSLQVERIWVDVDDSWYCDARFRFPATMRTEQLTSLFECNIQPEQTRLIISGKWRNGGARLAMLSRYEQQDWRVELLPIAMQKLSGADAMAEISLSLHEGPILLGHTIPKGGYELTEELPWVFEAMNESESQLKLVGMGSVSSRLNALFISLPKNSHLDISGEGEFDIPRLLKNSERSLTKISGVFSVVLHDGAVCTIRTQQLYDSAIEYYIKSTEVELVKSDYPVHRAWPKIGWKKDLQYGIVPEKELFWRSIRSGNNAWYSVASKMPKGQIEVRRIVNDEVLFSGKVVVLPADFDINIIPESAQQGIIMLSGITDTRIDKYSNNEKVTLKSDYSQNECAIYYNSSEMLENTVDLRVSWKDGSNLKLLLPKPVSGGRFVTHDGSVHFDGVASIAHLHGIDAELLTISCAGRGYLNIELLDENPVAEKFRYLHADLPLLSGCNDKLKQISLYENYNLLNAMLACAWSSNSTLCVDFYSDRFGKDKATLSIKRYDGSFIEHDQGLLVDIKNSVVFPANRIDELVVDAISLKDPGLHISLLKKDEFAYDLSALNVQDSPWLIVGKLDGTARIAPVIKWGLPVLQTNDLLLNALCEADSEQRKKYFNELIFEIDNNPLQNYCCLLTEYIKKYKMNNGLSLLDLDLFRGISSNYRVVVQLLISSCLSGDSDTIYDIQEELPFSWGWIPVSIWKDVFQKCWAYLEKQINDKTLALHILQPFIAFMNHRAHIDRRLAPIANMLLTYSKLLPAGCNVLPTVSREQFNEAKQMLLRNPDSFGRISIFPKELWSSAITPELKSVFNKLWIKNKYHSRLEKRFNLMLVAALLTQKDNNLIHQLSALFEFHYQQAPQQLGVIYQYYFEQAGVCH

SEQ ID NO: 25345 - protein, 2104 aa, Escherichia coli
MDVQQLHYAPLLNQLHQRAVRSVVSQLALRSKSLTHYLESQYFQPPGQEGSLLADPVFESTFGWMPADETMEDLRDKLISSPLVDALSKAPVPFRHQLTAWRTILEDKKSLLVSSGTGSGKTECFMVPVLEDLIRQQKSTRQSLTGTQAIFLYPLNALINSQQERLREWTRGFKGKIRFALYNGETRHTKYEVQEDQLKVPEQALSREAIYEAPPSIMVTNTTMLEYMLIRRKDAPIIEKSQGILKYIVLDEAHSYIGSQAAELALLLRRVMQAFNVGPGTDKPVQIIATSATIGEDSPEGNKELAKFVADLAGVTERDVKVVRGYRQIPRVSESLIRHEYPTSLTSLKSLSPQDLYQQLCHYRVAQQLRQALTHPGRQAVRLSELLNVARRTWPDINHRELLQLLDLMARSREGELAFTPLRMHGFIRTLAGLWACSNKQCLHKAHELNQSDWPFGQVWFEQRQYCDCGAPVFEVLRCSGCGSAYLSAKEEVRGDGTNWLVAQPAAAEVDEFALDVDVYSEDEDNDELDNNSQFDRLIAIDGEKYIISLEETTAGKIDSEAQKHYEINLLRPESRGEGRNNSFACVCCGDTQRKNNPLFRPLRLGAPFFLNEIIPTLLEFSPLPQTREEQLGPFNGRRLLTFTDSRQGTARISARLQQDADKATLRALCYQELANINEPSAKLSPAHCALLESFITQFSILPLKNSIDALKKAMVANEELSPADIQALKIIEPMVSSLSPDHAEAMQILQANSGNQQKKTMSWQTLSEQLVGSVDLADRMRGSFKELSGLDLTKQQFADFCLYSEFGRRPKNAWTLESMGLVAIHYPFIDKVTTCPQDWKTLLPDPDKQLAEWRNLLKITLDFFIRENSAVFYENEQYPRWMGARFPVKMLQGPDKKNKGQKRDQLWPQIRDRHYNRVIKLLIAVFPAIQPEQAHWKSLVNHLMIEVWDAIRPCLRQFESGYQLDIKQQAEFYSPKQVWRCPYTRRALDVTLLGYSPYLPGSKEIAPEKAVLIEMPELPVRHWRLSGGGEIAREERLEWLESNALIQHAREEGLWSTRSDRLALKDSWYRLEEHSAQRTPEQNQFNEKQFKSGKVNVLNCSTTMEMGVDIGGMSLVAMNNVPPAPANYLQRAGRAGRRGESASAAITLCKNTAHGMEVFKDPLWAFNTTASAPRVRFGSSSIVQRHVNALVLGLFLRAEVPDATKLSCKWFFEGDESQCLRFLHWLNNQADQLADKLKRLTQGTVLMSLTATQLLTRTQAMMQQVDIRWRSQLAILLENIEALKADNSAWEETPAGKAIAYQLRDYRGAYLFSKLISEAFLPGHGFPVGVVNFNYLTADELEKRRAIKATQADPNEGGESFSRRIEKLPSRDLPTALREYAPGADVVLGGKVYRSSGIMLGKVLASGQELSGDHHIPWFWHCRKCGAGATSTTRPVECSHCKADIQQLDVKRYLQPVGFATDIRYQAHNDVSMPAQLPWKDPRVLVPSSVWVSLPDAGLGRYRFSHSGELFHFSEGEFGHGYAICLSCGRAESQNQPQRTPENLKNPERENTHYLLRGGSNDRLGSNKLCHGHVHKDLWLGYSSRTDMVELQLNDDNGLLIRDEVAARSLAVALREGLAHKLGIENTELGVTTQQARDINGYTGYSIFIYDNNAGGAGYAVQLIDHWADVFNYARKLLDCSCDKFCHHCLLSYDSQHYVNRLDRHHALTLLTNVRLQRLNLAPEYQYFGDGSRVETNPLSLRIAQCLNSEIYDSCSLVLAGPQEQWDFAQWPLFKELLQFASSGGNVELLVATPLANLTDSSRHQLSALAAMPGGRLQVKSIATAQLMQGKGRWLAQVTREGQSQQWAADDSATVAPGELWGQSASSPVVTLKGTSGKTFSGQTLSAEDLLPALPTGAVRINLCEQLDGPLEGFGSRFWSLVTQQHAGWKQAFTRHKEITHVEYSDRYLNSPFTARLLGEILTELVEQGMAERASLTVCVKKLDYNSRQHDALYNAWLNEEDRQQVVTTLLEEGYLGPAWPGAISWLTGDNQSTEHGRELTVTFSDGSQHYVLLDMGLSYWRCIEDTFFDFALRVPQQVERLANTRARAVASGNDLRSYVIAG

SEQ ID NO: 25346 - protein, 303 aa, Escherichia coli
MGKLDGTARIAPVIKWGLPVLQTNDLLLNALCEADSEQRKKYFNELIFEIDNNPLQNYCCLLTEYIKKYKMNNGLSLLDLDLFRGISSNYRVVVQLLISSCLSGDSDTIYDIQDELPFSWGWIPVSIWKDVFQKCWAYLEKQINDKTLALHILQPFIAFMNHRAHIDRRLAPIANMLLTYSELLPAGCNVLPTVSREQFNEAKQMLLRNPDSFGRISIFPKELWSSAITPELKSVFNKLWIEDKYHSRLEKRFNLMLVAALLTQKDNNLIYQLSALFEFHYQQAPQQLGVIYQYYFEQAGVCH

SEQ ID NO: 25347 - protein, 2114 aa, Escherichia coli; identical to SEQ ID NO: 25257

SEQ ID NO: 25348 - protein, 1096 aa, Escherichia coli; identical to SEQ ID NO: 25332

SEQ ID NO: 25349 - protein, 2104 aa, Escherichia coli; identical to SEQ ID NO: 25343

SEQ ID NO: 25350 - protein, 978 aa, Escherichia coli; identical to SEQ ID NO: 25344

SEQ ID NO: 25351 - protein, 2114 aa, Escherichia coli; identical to SEQ ID NO: 25257

SEQ ID NO: 25352 - protein, 1096 aa, Escherichia coli; identical to SEQ ID NO: 25332

SEQ ID NO: 25353 - protein, 2114 aa, Escherichia coli; identical to SEQ ID NO: 25257

SEQ ID NO: 25354 - protein, 1096 aa, Escherichia coli; identical to SEQ ID NO: 25332

SEQ ID NO: 25355 - protein, 2104 aa, Escherichia coli; identical to SEQ ID NO: 25345

SEQ ID NO: 25356 - protein, 978 aa, Escherichia coli; identical to SEQ ID NO: 25342

SEQ ID NO: 25357 - protein, 2104 aa, Escherichia coli; identical to SEQ ID NO: 25345

SEQ ID NO: 25358 - protein, 978 aa, Escherichia coli; identical to SEQ ID NO: 25342

SEQ ID NO: 25359 - protein, 2104 aa, Escherichia coli
MDVQQLHYAPLLNQLHQRAVRSVVSQLALRSKSLTHYLESQYFQPPGQEGSLLADPVFESTFGWMPADETMEDLRDKLISSPLVDALSKAPVPFRHQLTAWRTILEDKKSLLVSSGTGSGKTECFMVPVLEDLIRQQKSTRQSLTGTQAIFLYPLNALINSQQERLREWTRGFKGKIRFALYNGETRHTKYEVQEDQLKVPEQALSREAIYEAPPSIMVTNTTMLEYMLIRRKDAPIIEKSQGILKYIVLDEAHSYIGSQAAELALLLRRVMQAFNVGPGTDKPVQIIATSATIGEDSPEGNKELAKFVADLAGVTERDVKVVRGYRQIPRVSESLIRHEYPTSLTSLKSLSPQDLYQQLCHYRVAQQLRQALTHPGRQAVRLSELLNVARRTWPDINHRELLQLLDLMARSREGELAFTPLRMHGFIRTLAGLWACSNKQCLHKAHELNQSDWPFGQVWFEQRQYCDCGAPVFEVLRCSGCGSAYLSAKEEVRGDGTNWLVAQPAAAEVDEFALDVDVYSEDEDNDELDNNSQFDRLIAIDGEKYIISLEETTAGKIDSEAQKHYEINLLRPESRGEGRNNSFACVCCGDTQRKNNPLFRPLRLGAPFFLNEIIPTLLEFSPLPQTREEQLGPFNGRRLLTFTDSRQGTARISARLQQDADKATLRALCYQELANINEPSAKLSPAHCALLESFITQFSILPLKNSIDALKKAMVANEELSPADIQALKIIEPMVSSLSPDHAEAMQILQANSGNQQKKTMSWQTLSEQLVGSVDLADRMRGSFKELSGLDLTKQQFADFCLYSEFGRRPKNAWTLESMGLVAIHYPFIDKVTTCPQDWKTLLPDPDKQLAEWRNLLKITLDFFIRENSAVFYENEQYPRWMGARFPVKMLQGPDKKNKGQKRDQLWPQIRDRHYNRVIKLLIAVFPAIQPEQAHWKSLVNHLMIEVWDAIRPCLRQFESGYQLDIKQQAEFYSPKQVWRCPYTRRALDVTLLGYSPYLPGSKEIAPEKAVLIEMPELPVRHWRLSGGGEIAREERLEWLESNALIQHAREEGLWSTRSDRLALKDSWYRLEEHSAQRTPEQNQFNEKQFKSGKVNVLNCSTTMEMGVDIGGMSLVAMNNVPPAPANYLQRAGRAGRRGESASAAITLCKNTAHGMEVFKDPLWAFNTTASAPRVRFGSSSIVQRHVNALVLGLFLRAEVPDATKLSCKWFFEGDESQCLRFLHWLNNQADQLADKLKRLTQGTVLMSLTATQLLTRTQAMMQQVDIRWRSQLAILLENIEALKADNSAWEETPAGKAIAYQLRDYRGAYLFSKLISEAFLPGHGFPVGVVNFNYLTADELEKRRAIKATQADPNEGGESFSRRIEKLPSRDLPTALREYAPGADVVLGGKVYRSSGIMLGKVLASGQELSGDHHIPWFWHCRKCGAEATSTTRPVECSHCKADIQQLDVKRYLQPVGFATDIRYQAHNDVSMPAQLPWKDPRVLVPSSVWVSLPDAGLGRYRFSHSGELFHFSEGEFGHGYAICLSCGRAESQNQPQRTPENLKNPERENTHYLLRGGSNDRLGSNKLCHGHVHKDLWLGYSSRTDMVELQLNDDNGLLIRDEVAARSLAVALREGLAHKLGIENTELGVTTQQARDINGYTGYSIFIYDNNAGGAGYAVQLIDHWADVFNYARKLLDCSCDKFCHHCLLSYDSQHYVNRLDRHHALTLLTNVRLQRLNLAPEYQYFGDGSRVETNPLSLRIAQCLNSEIYDSCSLVLAGPQEQWDFAQWPLFKELLQFASSGGNVELLVATPLANLTDSSRHQLSALAAMPGGRLQVKSIATAQLMQGKGRWLAQVTREGQSQQWAADDSATVAPGELWGQSASSPVVTLKGTSGKTFSGQTLSAEDLLPALPTGAVRINLCEQLDGPLEGFGSRFWSLVTQQHAGWKQAFTRHKEITHVEYSDRYLNSPFTARLLGEILTELVEQGMAERASLTVCVKKLDYNSRQHDALYNAWLNEEDRQQVVTTLLEEGYLGPAWPGAISWLTGDNQSTEHGRELTVTFSDGSQHYVLLDMGLSYWRCIEDTFFDFALRVPQQVERLANTRARAVASGNDLRSYVIAG

SEQ ID NO: 25360 - protein, 978 aa, Escherichia coli; identical to SEQ ID NO: 25342

SEQ ID NO: 25361 - protein, 2104 aa, Escherichia coli; identical to SEQ ID NO: 25345

SEQ ID NO: 25362 - protein, 978 aa, Escherichia coli; identical to SEQ ID NO: 25342

SEQ ID NO: 25363 - protein, 2104 aa, Escherichia coli; identical to SEQ ID NO: 25345

SEQ ID NO: 25364 - protein, 978 aa, Escherichia coli; identical to SEQ ID NO: 25342

SEQ ID NO: 25365 - protein, 2104 aa, Escherichia coli; identical to SEQ ID NO: 25343

SEQ ID NO: 25366 - protein, 978 aa, Escherichia coli; identical to SEQ ID NO: 25344

SEQ ID NO: 25367 - protein, 2114 aa, Escherichia coli
MTTRYFSSLIEQSLSRSTEATLSIMGVTNPQLREHLAQQMGADCGKPGSFLASPVFQQMFGWKESNHTMRSLTEGNALLSKAVVDSLDDQNNGRYRFGADWRPFTHQLASWKALLEKKHSVVVTSGTGSGKTECFMVPVLEDLYRELHENGNNPLVGVRALFLYPLNALINSQRERLDAWTRGFGTGIRYCLYNGNTENLHASVKSEQAKRPNEVLSREKMREEPAPILVTNGTMLEYMMVRQVDAPIIQQSKAQKSLRWIVLDEAHTYVGSQAAELALQLRRVMTAFGVTPDDVRFVATSATIAGSDAEKQLKKFLSELSGIPQERIDVLDGSRVIPELEPSKNVSVPLDEIEQIPDLDLRDKNDNKIKGISPERFYALTHSPEARYIREMLVKQPNPMKLDEITERLHVLTKQHYSQQEVLRWIDVCSGTQPNAKDPAFLKVRAHIFQRNTQGIWACVDKDCRLKHGTPLDKGWPFGYVYVNQRQNCDCGSPVYEVAFCNDCNEPHLLARDKKGKLVQWENKGGDEFSLQDEVPVEHDATEEKVEKENSFQPPLIIAAGETSEAGYTLQRLDRQTRRIGVINNDSIPLIINDIEQVCSASGCGYRGMSGKQPFRRALLGGPFYVTNIVPTVLEYCQDFTSDEGKEGVGPDSLPGRGRRLITFTDSRQGTARMAVRMQQEAERSRLRGSVVEILSWHQRTQTSTAPNANADLEKLAARAKQAREQAEEYRSWGMPDQAKLSQAQAEQLEQAYQAATGGKAATILVSRTWTEMVNELKERADIRGPVLQYNHYLKPEVFNENGSPLKLSEMLLFREFMRRPKRTNSLETQGLVQVGYQGLEKIHKSPLHWQEKGLTLDDWRDFLKVTLDHYVRESNFTQLDDELKNWIGSRFSSKFVRNPESKDPEDNQNRRWPQIRNGNVSHRLAKLLMLGAGFKTVNAATIDIINTWLKEAWAQLTGPLAVLKPDGNRFYLPKEHMTFSLITDAWICPVTNKILDTAFKGLTPYLPTHISFEHLTLAQYDTFVAQKVTMPEIWKLDRSQEDYAEGLAKARDWVSHDPLIAQLRSENVWTDINDRVVEGGFYYRTAEHSAQQSSERLQSYEKMFKNGQLNVLNCSTTMEMGVDIGGITAVVMNNVPPHPANYLQRAGRAGRSKESRAISYTLCKGNPHDQQVFANPLWPFETMIPAPMVAMNSARLVQRHVNALLLSDFLCNVIGETDKEKTSLDSLWFFGEDDGQSKCERFKIWLERPVLDIDTALERLVKGTALHGARAEYLRDKTINAITFLQQRWLSVYRDLVTQERESQPQTPYRKRIELEKKRHCGEYLLRDLAARTFLPGYGFPTDVVTFDNFTMEDYIREKSQKSRDKKDREDNVSRYKGLPSRNLGVAIREYAPGAEIILDGRVFRSAGVSLHWHNINADTNEAQRLDCAWRCHKCGTIGYEEGMSSSGMLFCSNSACGEKIIMDNRRQVLQPAGFVTDAHAPVTNNIETMKFVPVVPAWVFVKAEPVPLPNPLMGYMASGADGHVFQQSLGEGGHGYALCLSCGRAESMLNENDAPKSMEAHYPPRPGKADRDSQNHRLICPGSTALMKNVTLGALARTDVFEMVLRKPQNGEYLPDNTEEGRIVAMTLAVALRQALAGVLGISAAELGYSVRPVRLEDGQSVLAVQLYDVISGGAGFASSAPVHIEAILQGMVKQLGCRHCETACSECLLDSQTRHDHDLLDRKAALAWLGDDFTYYIGLPDEETFSLPDARYCPGAIGDTIRRAINEGAEKLTLWMTGAPNEWDLYARQFRAAVQNYRLKDNVEVDLVIPTGVDDPDLLHELSQFTALGVRLCHVEQDLQLPIVAQVTFTDRVMTLASRSQQATIPGPEWHLNDELVVRSLGYKTVELNEFILPAKATNAVERVKDIQIHKQLNGPLSQFGQRFWDVLFNDHEEAQSLMNNTRITGVHYTDRYLQNPVALALLGSILRPLKTKLTDGAEVTLDTLFKDKDRPGNRPFHDWMSIADFQDFADQWFAAALGRPVELTVFDSPRDIPHHRKLTVTFEDGQVLKIRFDQGMGYWRINFSSQWHYFDFRDDVSFQLVKMAQACKEGNVANSEESWATDVLVEVIAS

SEQ ID NO: 25368 - protein, 1096 aa, Escherichia coli; identical to SEQ ID NO: 25332

SEQ ID NO: 25369 - protein, 2114 aa, Escherichia coli; identical to SEQ ID NO: 25367

SEQ ID NO: 25370 - protein, 1096 aa, Escherichia coli; identical to SEQ ID NO: 25332

SEQ ID NO: 25371 - protein, 2114 aa, Escherichia coli
MTTRYFSSLIEQSLSRSTEATLSIMGVTNPQLREHLAQQMGADCGKPGSFLASPVFQQMFGWKESNHTMRSLTEGNALLSKAVVDSLDDQSNGRYRFGADWKPFTHQLASWKALLEKKHSVVVTSGTGSGKTECFMVPVLEDLYRELHENGNNPLVGVRALFLYPLNALINSQRERLDAWTRGFGTGIRYCLYNGNTEELHAKMKTVQDNRPNEVLSREKMRLEPAPILVTNGTMLEYMMVRQVDAPIIQQSKAQKSLRWIVLDEAHTYVGSQAAELALQLRRVMTAFGVTPDDVRFVATSATIACSDAEKQLKKFLSELSGIPQERIDVLDGSRVIPELEPSKNVSVPLDEIEQIPDLDLKDKNDNKIKGISPERFYALTHSPEARYIREMLVSQPNPMKLDEMTQRLNALTKQHYSQQEVLRWIDVCSGTQPNAKDPAFLKVRAHIFQRNTQGIWACVDKDCRLKHGTPLEKGWPFGYVYVNQRQNCDCGSPVYEVAFCNDCNEPHLLAQDKKGKLVQWENKGGDEFSLQDEVPVEHDTTEEKVEKENGFLPPLIIAAGETSETGYTLQRLDHQTRRIGVINNDSIPLIINDVEQVCSASGCGYRGMSGKQPFRRALLGGPFYVTNIVPTVLEYCQDFTSDEGKEGVGPDSLPGRGRRLITFTDSRQGTARMAVRMQQEAERSLLRGSVVEILSWHQRTQTSTAPNANADLEKLAARAKQAREQAEEYRSWGMPDQAKLSQAQAEQLEQAYQAATGGKAATTLVSRTWTEMVNELKDKADIRGPVLKYNHYLQPEVFNKNGGPLKLSEMLLFREFMRRPKRTNSLETQGLVQVGYQGLEKIHKSPLHWQEKGLTLDDWRDFLKVTLDLYVRESNFTQLDDELKNWIGSRFSSKFVRNPESKDPEDNQNRRWPQIRNGNVSHRLAKLLMLGAGFKTVNTATIDIINTWLKEAWAQLTGPLAVLKPDGNRFYLPKEHMTFSLITDAWICPVTNKILDTAFKGLTPYLPTHISFEHLTQAQYDTFVAQKVTMPEIWKLDRSQEDYAEGLAKARDWVNNDPLIAQLRSENVWTDINDRVVEGGFYYRTAEHSAQQSSERLQSYEKMFKNGQLNVLNCSTTMEMGVDIGGITAVVMNNVPPHPANYLQRAGRAGRSKESRAISYTLCKGNPHDQQVFANPLWPFETMIPAPMVAMNSARLVQRHVNALLLSDFLCNVIGETDKEKTSLDSLWFFGEDDGQSKCERFKVWLERPVLDIDMALERLVKGTALHGARAEHLRDKTINAITFLQQRWLSVYRDLVTQERESQPQTPYRKRIELEKKRHCGEYLLRDLAARTFLPGYGFPTDVVTFDNFTMEDYIREKSQKSRDKKDREDNVSRYKGLPSRNLGVAIREYAPGAEIILDGRVFRSAGVSLHWHNINADTNEAQRLDCAWRCHKCGTIGYEEGMSSSGMLFCSNSACGEKITMDNRRQVLQPAGFVTDAHAPVTNNIETMKFVPVVPAWVFVKAEPVPLPNPLMGYMASGADGHVFQQSLGEGGHGYALCLSCGRAESMLNENDAPKSMEAHYPPRPGKADRDSQNHRLICPGSTALMKNVTLGALARTDVFEMVLRKPQNGEYLPDNTEEGRIVAMTLAVALRQALAGVLGISAAELGYSVRPVRLEDGQSVLAVQLYDVISGGAGFASSAPVHIEAILQGMVKQLGCRHCDTACSECLLDSQTRHDHDLLDRKVALAWLGDDFTYYIGLPDEETFSLPDARYCPGAIGDTIRRAINEGAEKLTLWMTGAPNEWDLYARQFRAAIQSYRLKDNVEVDLVIPAGVDDPDLLHELSQFTALGVRLCHVEQELQLPIVAQVTFAYRVMTLASRSQQATIPGPEWHLNDELVVRSLGYQTVELNEFILPAKAANAVERVKDIQIHKQLNGPLSQFGQRFWDVLFNDHEEAQSLMKNTRITGVHYTDRYLQNPVALALLGSILKPLKTKLTDGAEVALDTLFKDKDRPGNRPFHDWMSIADFQDFADQWFAAALGRPIELTVFDSPRDIPHHRKLTVTFEDGQVLKIRFDQGMGYWRINFASQWHYFDFRDDVSFQLVKMAQACKEGNVANSEESWATDVLVEVIAS

SEQ ID NO: 25372 - protein, 1096 aa, Escherichia coli
MGQSEYISWVKCTSWLSNFVNLRGLRQPDGRPLYEYHATNAEYNQLTQLLCAVGQSQSNICNRDFAACFVLFCSEWYRRDYERQCGWTWDPIYKKIGISFTATELGTIVPKGMEDYWLRPIRFYESERRNFLGTLFSEGGLPFRLLKESDSRFLAVFSRILGQYEQAKQSGFSALSLARAVIEKSALPTVFSEDTSVELISHMADNLNSLVLTHNLTNHKEPVQQLDKVHPTWRSEFPIPLDDETGTHFLNGLLCAASVEAKPRLQKNKSTRCQFYWSEKHPDELRVIVSLPDEVSFPVTSEPSTTRFELAIYEDGEEVSGLGPAYASLENRQATVRLRKSEVRFVRQNPSAGLSLVARAGGMIVGSIKLDDSEIAIGEVPLTFIVDADQWLLQGQASCSVRSSDVLIVLPRDNSTVAGFDGQSSAVNVLGLKALPVKGCQDVTVTANETYRIRTGREQISIGRFALNGKRASWVCHPDETFIGVPKVISTLPDIQSIDITRYLSGISIEQCHIQEMLGAQYLSIRNSNNETLLRRKIGILPADFSIEIKGGMHANEGTIVITTQHPCVATLKDKTLEATRKRTEGRTEIQLKAEGVPPAFITLQVLPNLAADTIDIELPFPAKGCLALDVNGRPLDKNITLHDLLGSRAFLFSRNGEPTKYTLQLHLRSISGLQAWHEWSYTALSERPVELNLYSLREHIENLISLEAGIDQVVEMRITGAGVVMAWQIRRYKYSLRYDYEKELLLSQSVNHRAGQIPSPVIMLLSEPERKSIPLASRMSEGVPVGEYELSSIVNKNGPWLVVPKPGEEMAFRPCFIRGESSLPVEESNIRSLQKATQLFNPQAEVNTITRVLGQMANDPAHSGWQFMRSLYDQFGYLPLATFEVWRALVQHPQALAMSLFKFEMSAEYLSRIENEFPILWEFFPIFEIKAASERFKLFLSQKGAPEETQKLLVTNMFQRLGLVFPTYADEIEKWLSNGYLPPSIPESCVHGWYQELLREHSEARWPEYGCKRLYKWMMSQKNPVIGINPDANHRYSVAWLPVFAAAVASGNASFESVFDRKPGAVFFLRQVRDFDSRWFKAIFQFSLLRYVAKK

SEQ ID NO: 25373 - protein, 2104 aa, Escherichia coli
MDVQQLHYAPLLNQLHQRAVRSVVSQLALRSKSLTHYLESQYFQPPGQEGSLLADPVFESTFGWMPADETMEDLRDKLISSPLVDALSKAPVPFRHQLTAWRTILEDKKSLLVSSGTGSGKTECFMVPVLEDLIRQQKSTRQSLTGTQAIFLYPLNALINSQQERLREWTRGFKGKIRFALYNGETRHTKYEIQEDQLKVPEQALSREAIYEEPPSIMVTNTTMLEYMLIRRKDAPIIEKSQGMLKYIVLDEAHSYIGSQAAELALLLRRVMQAFNVGPGTDKPVQIIATSATIGEDSPEGNKELAKFVADLAGVTERDIKVVRGYRQIPRVSESLIRHEYPTSLTSLKSLSPQDLYQQLCHYRVAQQLRQALTHPGRQAVRLSELLNVARRTWPDINHRELLQLLDLMARSREGELAFTPLRMHGFIRTLAGLWACSNKQCSHKAHELNQSDWPFGQVWFEQRQYCDCGAPVFEVLRCSGCGSAYLSAKEEMRGDGTNWLVAQPATAEVDEFALDVDVYSEDEDNDELDNNSQFDRLIASDGEKYIISLEETTAGKIDSEAQKHYEINLLRPESRGEGRNNSFACVCCGDTQRKNNPLFRPLRLGAPFFLNEIIPTLLEFSPLPQTREEQLGPFNGRRLLTFTDSRQGTARISARLQQDADKATLRALCYQELANITEPSAKLSPAHCALLEKVISQFSVLPLKNSIDALKKAMAANEELSPTDIQALKIIEPMVSSLSTEHAEAMQILQANSGNQQKKTMSWQTLSEQLVGSVDLADRMRGSFKELSGLDLTKQQFADFCLYSEFGRRPKNAWTLESLGLVAIHYPFIDKVTTCPQDWKTLLPDPDKQLAEWRNLLKITLDFFIRENSAVFYENEQYPRWMGARFPVKMLQGPDKKNKGQKRDQLWPQIRDRHYNRVIKLLIAVFPAIQPEQAHWKSLVNHLMIEVWDAIRPCLRQFESGYQLDIKQQAEFYSPKQVWRCPYTRRALDVTLLGYSPYLPGSKEIAPEKAVLIEMPELPVRHWRLSGGGEIAREERLEWLESNALIQHAREEGLWSTRSDRLALKDSWYRLEEHSAQRTPEQNQFNEKQFKSGKVNVLNCSTTMEMGVDIGGMSLVAMNNVPPAPANYLQRAGRAGRRGESASAAITLCKNTAHGMEVFKDPLWAFNTTASAPRVRFGSSSIVQRHVNALVLGLFLRAEVPDATKLSCKWFFEGDESQCLRFLHWLNHQADQLADKLKRLTQGTVLMSLTATQLLTRTQAMMQQVDIRWRSQLAILLENIEALKADNSAWEETPAGKAIAYQLRDYRGAYLFSKLISEAFLPGHGFPVGVVNFNYLTADELEKRRAIKATQADPNEGGESFSRRIEKLPSRDLPTALREYAPGADVVLGGKVYRSSGIMLGKVLASGQELSGDHHIPWFWHCRKCGAGATSTTHPVECSHCKADIQQLDVKRYLQPVGFATDIRYQAHNDVSMPAQLPWKDPRVLVPSSVWVSLPDAGLGRYRFSHSGELFHFSEGEFGHGYAICLSCGRAESQTQPQRTPENLKNPERENTHYLLRGGSNDRQGSNKLCHGHVHKDLWLGYSSRTDMVELQLNDDNGLLIRDEVAARSLAVALREGLAHKLGIENTELGVTTQQARDINGYTGYSIFIYDNNAGGAGYAVQLIDHWADVFNYARKLLDCSCDKFCHHCLLSYDSQHYVNRLDRHHALTLLTNVRLQRLNLAPEYQYFGDGSRVETNPLSLRIAQCLNSEIYDSCSLVLAGPQEQWDFAQWPLFKELLQFASSGGNVELLVATPLANLTDSSRHQLSALAAMPGGRLQVKSIATAQLMQGKGRWLAQVTREGQSQQWAADDSATVAPGELWGQSASSPVVTLKGTSGKTFSGQTLSAEDLLPALPTGAVRINLCEQLDGPLEGFGSRFWSLVTQQHAGWKQAFTRHKEITHVEYSDRYLNSPFTARLLGEILTELVEQGMAERASLTVCVKKLDYNSRQHDALYNAWLNEEDRQQVVTTLLEEGYLGPAWPGAISWLTGDNQSTEHGRELTVTFSDGSQHYVLLDMGLSYWRCIEDTFFDFALRVPQQVERLANTRARAVAPGNDLRSYIIAG

SEQ ID NO: 25374 - protein, 978 aa, Escherichia coli; identical to SEQ ID NO: 25216

SEQ ID NO: 25375 - protein, 2090 aa, Escherichia coli
MGVTNPQLREHLAQQMGADCGKPGSFLASPVFQQMFGWKESNHTMRSLTEGNALLSKAVVDSLDDQNNGRYRFGADWRPFTHQLASWKALLEKKHSVVVTSGTGSGKTECFMVPVLEDLYRELHENGNNPLVGVRALFLYPLNALINSQRERLDAWTRGFGTGIRYCLYNGNTENLHASVKSEQAKRPNEVLSREKMREEPAPILVTNGTMLEYMMVRQVDAPIIQQSKAQKSLRWIVLDEAHTYVGSQAAELALQLRRVMTAFGVTPDDVRFVATSATIAGSDAEKQLKKFLSELSGIPQERIDVLDGSRVIPELEPSKNVSVPLDEIEQIPDLDLRDKNDNKIKGISPERFYALTHSPEARYIREMLVKQPNPMKLDEITERLHVLTKQHYSQQEVLRWIDVCSGTQPNAKDPAFLKVRAHIFQRNTQGIWACVDKDCRLKHGTPLDKGWPFGYVYVNQRQNCDCGSPVYEVAFCNDCNEPHLLARDKKGKLVQWENKGGDEFSLQDEVPVEHDATEEKVEKENSFQPPLIIAAGETSEAGYTLQRLDRQTRRIGVINNDSIPLIINDIEQVCSASGCGYRGMSGKQPFRRALLGGPFYVTNIVPTVLEYCQDFTSDEGKEGVGPDSLPGRGRRLITFTDSRQGTARMAVRMQQEAERSRLRGSVVEILSWHQRTQTSTAPNANADLEKLAARAKQAREQAEEYRSWGMPDQAKLSQAQAEQLEQAYQAATGGKAATILVSRTWTEMVNELKERADIRGPVLQYNHYLKPEVFNENGGPLKLSEMLLFREFMRRPKRTNSLETQGLVQVGYQGLEKIHKSPLHWQEKGLTLDDWRDFLKVTLDHYVRESNFTQLDDELKNWIGSRFSSKFVRNPESKDPEDNQNRRWPQIRNGNVSHRLAKLLMLGAGFKTVNAATIDIINTWLKEAWAQLTGPLAVLKPDGNRFYLPKEHMTFSLITDAWICPVTNKILDTAFKGLTPYLPTHISFEHLTLAQYDTFVAQKVTMPEIWKLDRSQEDYAEGLAKARDWVSHDPLIAQLRSENVWTDINDRVVEGGFYYRTAEHSAQQSSERLQSYEKMFKNGQLNVLNCSTTMEMGVDIGGITAVVMNNVPPHPANYLQRAGRAGRSKESRAISYTLCKGNPHDQQVFANPLWPFETMIPAPMVAMNSARLVQRHVNALLLSDFLCNVIGETDKEKTSLDSLWFFGEDDGQSKCERFKIWLERPVLDIDTALERLVKGTALHGARAEYLRDKTINAITFLQQRWLSVYRDLVTQERESQPQTPYRKRIELEKKRHCGEYLLRDLAARTFLPGYGFPTDVVTFDNFTMEDYIREKSQKSRDKKDREDNVSRYKGLPSRNLGVAIREYAPGAEIILDGRVFRSAGVSLHWHNINADTNEAQRLDCAWRCHKCGTIGYEEGMSSSGMLFCSNSACGEKIIMDNRRQVLQPAGFVTDAHAPVTNNIETMKFVPVVPAWVFVKAEPVPLPNPLMGYMASGADGHVFQQSLGEGGHGYALCLSCGRAESMLNENDAPKSMEAHYPPRPGKADRDSQNHRLICPGSTALMKNVTLGALARTDVFEMVLRKPQNGEYLPDNTEEGRIVAMTLAVALRQALAGVLGISAAELGYSVRPVRLEDGQSVLAVQLYDVISGGAGFASSAPVHIEAILQGMVKQLGCRHCETACSECLLDSQTRHDHDLLDRKAALAWLGDDFTYYIGLPDEETFSLPDARYCPGAIGDTIRRAINEGAEKLTLWMTGAPNEWDLYARQFRAAVQNYRLKDNVEVDLVIPTGVDDPDLLHELSQFTALGVRLCHVEQDLQLPIVAQVTFTDRVMTLASRSQQATIPGPEWHLNDELVVRSLGYKTVELNEFILPAKATNAVERVKDIQIHKQLNGPLSQFGQRFWDVLFNDHEEAQSLMNNTRITGVHYTDRYLQNPVALALLGSILRPLKTKLTDGAEVTLDTLFKDKDRPGNRPFHDWMSIADFQDFADQWFAAALGRPVELTVFDSPRDIPHHRKLTVTFEDGQVLKIRFDQGMGYWRINFSSQWHYFDFRDDVSFQLVKMAQACKEGNVANSEESWATDVLVEVIAS

SEQ ID NO: 25376 - protein, 1112 aa, Escherichia coli
MLWGFVFVSFISKELALGQSEYISWVKCTSWLSNFVNLRGLRQPDGRPLYEYHATNDEYTQLTQLLRAVGQSQSNICNRDFAACFVLFCSEWYRRDYERQCGWTWDPIYKKIGISFTATELGTIVPKGMEDYWLRPIRFYESERRNFLGTLFSEGGLPFRLLKESDSRFLAVFSRILGQYEQAKQSGFSALSLARAVIEKSALPTVFSEDTSVELISHMADNLNSLVLTHNLINHKEPVQQLEKVHPTWRSEFPIPLDDETGTHFLNGLLCAASVEAKPRLQKNKSTRCQFYWSEKHPDELRVIVSLPDEVSFPVTSEPSTTRFELAICEDGEEVSGLGPAYASLENRQATVRLRKSEVRFGRQNPSAGLSLVARAGGMIVGSIKLDDSEIAIGEVPLTFIVDADQWLLQGQASCSVRSSDVLIVLPRDNSNVAGFDGQSRAVNVLGLKALPVKGCQDVTVTANETYRIRTGREQISIGRFALNGKRASWVCHPDETFIGVPKVISTLPDIQSIDVTRYLSGISIEQCHIQEMLGAQYLSIRNSKNETLLRRKIGILPADFSIEIKGGIHANEGTIVITTQHPCVAKLKDKTLEATRKRTEGRTEIQLKAEGVPPAFITLQVLPNLAADPIDIELPFPAKGCLALDVNGRPLDKNITLHDLLGSRAFLFSRNGEPTRYTLQLHLRSVSGLQAWHEWCYTALSDRPVELNLYSLREHIENLISLEAGIDQVVEMRITGAGVVMAWQIRRYKYSLRYDYEKELLLSQSVNHRAGQIPSPVIMLLSEPERKSIPLASRMSEGVPVGEYELSSIVNKNGPWLVVPKPGEEMAFRPCFIRGESSLPVEESNIRSLQKATQLFNPQAEVNTITLVLGQMANDPAHSGWQFMRSLYDQFGYLPLATFEVWRALVQHPQALAMSLFKFEMSAEYLSRIENEFPILWEFFPIFEIKAASERFKLFLSQKGAPEETQKLLVTNMFQRLGLVFPTYADEIEKWLSNGHLPPSIPESFVHVWYQELLREHSEAQWPEYGSKRLHSWMASQKNPVIGINPDANHRYSVALLPVFAAAVASGNASFESVFDRKPGAVFFLRQVRDFDSRWFKAIFQCSLLRYVAKK

SEQ ID NO: 25377 - protein, 2104 aa, Escherichia coli
MDVQQLHYAPLLNQLHQRAVRSVVSQLALRSKSLTHYLESQYFQPPGQEGSLLADPVFESTFGWMPADETMEDLRDKLISSPLVDALSKAPVPFRHQLTAWRTILEDKKSLLVSSGTGSGKTECFMVPVLEDLIRQQKSTRQSLTGTQAIFLYPLNALINSQQERLREWTRGFKGKIRFALYNGETRHTKYEVQEDQLKVPEQALSREAIYEAPPSIMVTNTTMLEYMLIRRKDAPIIEKSQGMLKYIVLDEAHSYIGSQAAELALLLRRVMQAFNVGPGTDKPVQIIATSATIGEDSPEGNKELAKFVADLAGVTERDVKVVRGYRQIPRVSESLIRHEYPTSLTSLKSLSPQDLYQQLCHYRVAQQLRQALTHPGRQAVRLSELLNVARRTWPDINHRELLQLLDLMARSREGELAFTPLRMHGFIRTLAGLWACSNKQCSHKAHELNQSDWPFGQVWFEQRQYCDCGAPVFEVLRCSGCGSAYLSAKEEVRGDGTNWLVAQPAAAEVDEFALDVDVYSEDEDNDELDNNSQFDRLIASDGEKYIISLEETTAGTIDSEAQKHYEINLLRPESRGEGRNNSFACVCCGDTQRKNNPLFRPLRLGAPFFLNEIIPTLLEFSPLPQTREEQLGPFNGRRLLTFTDSRQGTARISARLQQDADKATLRALCYQELANINEPSAKLSPAHCALLESFITQFSILPLKNSIDALKKAMVANEELSPADIQALKIIEPMVSSLSPDHAEAMQILLANSGNQQKKTMSWQTLSEQLVGSVDLADRMRGSFKELSGLDLTKQQFADFCLYSEFGRRPKNAWTLESLGLVAIHYPFIDKVTTCPQDWKTLLPDPDKQLAEWRNLLKITLDFFIRENSAVFYENEQYPRWMGARFPVKMLQGPDKKNKGQKRDQLWPQIRDRHYNRVIRLLIAVFPAIQPEQAHWKSLVNHLMIEVWDAIRPCLRQFESGYQLDIKQQAEFYSPKQVWRCPYTRRALDVTLLGYSPYLPGSKEIAPEKAVLIEMPELPVRHWRLSGGGEIAREERLEWLESNALIQHAREEGLWSTRSDRLALKDSWYRLEEHSAQRTPEQNQFNEKQFKSGKVNVLNCSTTMEMGVDIGGMSLVAMNNVPPAPANYLQRAGRAGRRGESASAAITLCKNTAHGMEVFKDPLWAFNTTASAPRVRFGSSSIVQRHVNALVLGLFLRAEVHDATKLSCKWFFEGDESQCLRFLHWLNNQADQLADKLKRLTQGTVLMSLTATQLLTRTQAMMQQVDIRWRSQLAILLENIEALKADNSAWEETPAGKAIAYQLRDYRGAYLFSKLISEAFLPGHGFPVGVVNFNYLTADELEKRRAIKATQADPNEGGESFSRRIEKLPSRDLPTALREYAPGADVVLGGKVYRSSGIMLGKVLASGQELSGDHHIPWFWHCRKCGAGATSTTRPVECSHCKADIQQLDVKRYLQPVGFATDIRYQAHNDVSMPAQLPWKDPRVLVPSSVWVSLPDAGLGRYRFSHSGELFHFSEGEFGHGYAICLSCGRAESQTQPQRTPENLKNPERENTHYLLRGGSNDRQGSNKLCHGHVHKDLWLGYSSRTDMVELQLNDDNGLLIRDEVAARSLAVALREGLAHKLGIENTELGVTTQQARDINGYTGYSIFIYDNNAGGAGYAVQLIDHWADVFNYARKLLDCSCDKFCHHCLLSYDSQHYVNRLDRHHALTLLTNVRLQRLNLAPEYQYFGDGSRVETNPLSLRIAQCLNSEIYDSCSLVLAGPQEQWDFAQWPLFKELLQFASSGGHVELLVATPLANLTDSSRHQLSALAAMPGGRLQVKSIATAQLMQGKGRWLAQVTREEQSQQWAADDSATVAPGELWGQSASSPVVTLKGTSGKTFSGQTLSAEDLLPALPTGAVRINLCEQLDGPLEGFGSRFWSLVTQQHAGWKQAFTRHKEITHVEYSDRYLNSPFTARLLGEILTELVEQGMAERASLTVCVKKLDYNSRQHDALYNAWLNEEDRQQVVTTLLEEGYLGPAWPGAISWLTGDNQSTEHGRELTVTFSDGSQHYVLLDMGLSYWRCIEDTFFDFALRVPQQVERLANTRARAVAPGNDLRSYIIAG

SEQ ID NO: 25378 - protein, 978 aa, Escherichia coli
MIENESGYLITYFRRIYQALRGQASQYPAAKIAQELGDTIPVTMQNELVYEIAGEFCETLCRLLSEHPPQSSDPVSALRKLSPDWHLQLPLVLPEANAAEIVRRLLSQSSEIRSASSLQVERIWVDVDDSWYCDARFRFPATMRTEQLTSLFECNIQPEQTRLIISGKWRNGGARLAMLSRYEQQDWRVELLPIAMQKLSGADAMAEISLSLHEGPILLGHTIPKGGYELTEELPWVFEAMNESESQLKLVGMGSVSSRLNALFISLPKNSHLDISGEGEFDIPRLLKNSERSLTKISGVFSVVLHDGAVCTIRTQQLYDSAIEYYIKSTEVELVKSDYPVHRAWPKIGWKKDLQYGIVPEKELFWRSIRSGNNAWYSVSSEMPKGQIEVRRIVNDEVLFSGKVVVLPADFDINIIPESAQQGIIMLSGITDTRIDKYSNNEKVTLKSDYSQNECAIYYNSSEMLENTVDLRVSWKDGSNLKLLLPKPVSGGRFVTHDGSVHFDGVASIAHLHGIDAELLTISCAGRGYLNIELLDENPVAEKFRYLHADLPLLSGCNDKLKQISLYENYNLINAMLACAWNSNSTLSVDFYSDRFGKDKATLSIKRYDGSFIEHDQGLLVDIKNSVVFPANRIDELVVDAISLKDPGLHISLLKKDEFAYELSALNVQDSPWLIVGKLDGIARIAPVIKWVLPVLQTNDLLLNALCEADSEQRKKYFNELIFEIDNNPLQNYCCLLTEYIKKYKMNNGLSLLDLDLFRGISSNYRVVVQLLISSCLSGDSDTIYDIQEELPFSWGWIPVSIWKDVFQKCWTYLEKQINDKTLALHILQPFIAFMNHRAHIDRRLAPIANMLLTYSELLPAGCNVLPTVSREQFNEAKQMLLRNPDSFGRISIFPKELWSSAITPELKSVFNKLWIEDKYHSRLEKRFNLMLVAALLTQKDNNLIHQLSALFEFHYQQAPQQLGVIYQYYFEQAGVCH

SEQ ID NO: 25379 - protein, 2104 aa, Escherichia coli
MDVQQLHYAPLLNQLHQRAVRSVVSQLALRSKSLTHYLESQYFQPPGQEGSLLADPVFESTFGWMPADETMEDLRDKLISSPLVDALSKAPVPFRHQLTAWRTILEDKKSLLVSSGTGSGKTECFMVPVLEDLIRQQKSTRQSLTGTQAIFLYPLNALINSQQERLREWTRGFKGKIRFALYNGETRHTKYEVQEDQLKVPEQALSREAIYEAPPSIMVTNTTMLEYMLIRRKDAPIIEKSQGMLKYIVLDEAHSYIGSQAAELALLLRRVMQAFNVGPGTDKPVQIITTSATIGEDSPEGNKELAKFVADLAGVTERDVKVVRGYRQIPRVSESLIRHEYPTSLTSLKSLSPQDLYQQLCHYRVAQQLRQALTHPGRQAVRLSELLNVARRTWPDINHRELLQLLDLMARSREGELAFTPLRMHGFIRTLAGLWACSNKQCSHKAHELNQSDWPFGQVWFEQRQYCDCGAPVFEVLRCSGCGSAYLSAKEEVRGDGTNWLVAQPAAAEVDEFALDVDVYSEDEDNDELDNNSQFDRLIAIDGEKYIISLEETTAGKIDSEAQKHYEINLLRPESRGEGRNNSFACVCCGDTQRKNNPLFRPLRLGAPFFLNEIIPTLLEFSPLPQTREEQLGPFNGRRLLTFTDSRQGTARISARLQQDADKATLRALCYQELANINEPSAKLSPAHCALLESFIAQFSILPLKNSIDALKKAMVANEELSPADIQALKIIEPMVSSLSPDHAEAMQILQANSGNQQKKTMSWQTLSEQLVGSVDLADRMRGSFKELSGLDLTKQQFADFCLYSEFGRRPKNAWTLESLGLVAIHYPFIDKVTTCPQDWKTLLPDPDKQLAEWRNLLKITLDFFIRENSAVFYENEQYPRWMGARFPVKMLQGPDKKNKGQKRDQLWPQIRDRHYNRVIKLLIAVFPAIQPEQAHWKSLVNHLMIEVWDAIRPCLRQFESGYQLDIKQQAEFYSPKQVWRCPYTRRALDVTLLGYSPYLPGSKEIAPEKAVLIEMPELPVRHWRLSGGGEIAREERLEWLESNALIQHAREEGLWSTRSDRLALKDSWYRLEEHSAQRTPEQNQFNEKQFKSGKVNVLNCSTTMEMGVDIGGMSLVAMNNVPPAPANYLQRAGRAGRRGESASAAITLCKNTAHGMEVFKDPLWAFNTTASAPRVRFGSSSIVQRHVNALVLGLFLRAEVPDATKLSCKWFFEGDESQCLRFLHWLNNQADQLADKLKRLTQGTVLMSLTATQLLTRTQAMMQQVDIRWRSQLAILLENIEALKADNSAWEETPAGKAIAYQLRDYRGAYLFSKLISEAFLPGHGFPVGVVNFNYLTADELEKRRAIKATQADPNEGGESFSRRIEKLPSRDLPTALREYAPGADVVLGGKVYRSSGIMLGKVLASGQELSGDHHIPWFWHCRKCGAGATSATHPVECSHCKADIQQLDVKRYLQPVGFATDIRYQAHNDVSMPAQLPWKDPRVLVPSSVWVSLPDAGLGRYRFSHSGELFHFSEGEFGHGYAICLSCGRAESQTQPQRTPENLKNPERENTHYLLRGGSNDRQGSNKLCHGHVHKDLWLGYSSRTDMVELQLNDDNGLLIRDEVAARSLAVALREGLAHKLGIENTELGVTTQQARDINGYTGYSIFIYDNNAGGAGYAVQLIDHWADVFNYARKLLDCSCDKFCHHCLLSYDSQHYVNRLDRHHALTLLTNVRLQRLNLAPEYQYFVDGSRVETNPLSLRIAQCLNSEIYDSCSLVLAGPQEQWDFAQWPLFKELLQFASSGGNVELLVATPLENLTDSSRHQLSALAAMPGGRLQVKSIATAQLMQGKGRWLAQVTREGQSQQWAADDCATVAPGELWGQSASSPVVTLKGTSGKTFSGQILSAEDLLPALPTGAVRINLCEQLDGPLEGFGSRFWSLVTQQHAGWKQAFTRHKEITHVEYSDRYLNSPFTARMLGEILTELVEQGMAERASLTVCVKKLDYNSRQHDALYNAWLNEEDRQQVVTTLLEEGYLGPAWPGAISWLTGDNQSTEHGRELTVTFSDGSQHYVLLDMGLSYWRCIEDTFFDFALRVPQQVERLANTRARAVAPGNDLRSYVIAG

SEQ ID NO: 25380 - protein, 978 aa, Escherichia coli
MIENESGYLITYFRRIYQALRGQASQYPAAKIAQKLGDTIPVTMQNELVYEIAGEFCETLCRLLSEHPPQSSDPVSALRKLSPDWHLQLPLVLPEANAAEIVRRLLSQSSEIRSASSLQVERIWVDVDDSWYCDARFRFPATMRTEQLTSLFECNIQPEQTRLIISGKWRNGGARLAMLSRYEQQDWRVELLPIAMQKLSGADAMAEISLSLHEGPILLGHTIPKGGYELTEELPWVFEAMNESESQLKLVGMGSVSSRLNALFISLPKNSHLDISGEGEFDIPRLLKNSERSLTKISGVFSVVLHDGAVCTIRTQQLYDSAIEYYIKSTEVELVKSDYPVHRAWPKIGWKKDLQYGIVPEKELFWRSIRSGNNAWYSVASEMPKGQIEVRRIVNDEVLFSGKVVVLPADFDINIIPESAQQGIIMLSGITDTRIDKYTNNEKVTLKSDYSQNECAIYYNSSQMLENTVDLRVSWKDGSNLKLLLPKPVSGGRFVTNDGSVHFDGVASIAHLHGIDAELLTMSCAGRGYLNIELLDENPVAEKFRYLHADLPLLSGRNDKLQQISLYENYNLLNSMLACAWNSNSTLCVDFYSDRFGKDKATLNIKRYDGSFIEHDQGLLVDIKNSVVFPANRIDELVVDAISLKDPGLHKSLLKKDEFAYDLSALNVQDSPWLIVGKLDGTARIAPVIKWMLPVLQTNDLLLNALCEADPEQRKKKFNELIFEIDNNPLQNYCCLLTEYIKEYKMNNGLSLLDLDLFRGISSNYRVVVQLLISSCLSGDSDTIYDIQEELPFSWGWIPVSIWKDVFQKCWAYLEKQINDKTLALHILQPFIAFMNHRAHIDRRLAPIANMLLTYSESLPTGCDVLPTVSREQFNEAKQMLLRNPDSFGRISIFPKELWSSAITPELKSVFNKLWIEDKYHSRLEKRFNLMLVAALLTQKDNNLIHQLSALFEFHYQQAPQQLGVIYQYYFEQAGVCH

SEQ ID NO: 25381 - protein, 2114 aa, Escherichia coli; identical to SEQ ID NO: 25257

SEQ ID NO: 25382 - protein, 1096 aa, Escherichia coli; identical to SEQ ID NO: 25332

SEQ ID NO: 25383 - protein, 2114 aa, Escherichia coli; identical to SEQ ID NO: 25257

SEQ ID NO: 25384 - protein, 850 aa, Escherichia coli
YRGKSRLLCAASVEAKPRLQKNKSTRCQFYWSEKHPDELRVIVSLPDEVSFPVTSEPSTTRFELAICEDGEEVSGLGPAYASLENRQATVRLRKSEVRFGRQNPSAGLSLVARAGGMIVGSIKLDDSEIAIGEVPLTFIVDADQWLLQGQASCSVRSSDVLIVLPRDNSNVAGFDGQSRAVNVLGLKALPVKGCQDVTVTANETYRIRTGREQISIGRFALNGKRASWVCHPDETFIGVPKVISTLPDIQSIDVTRYLSGISIEQCHIQEMLGAQYLSIRNSKNETLLRRKIGILPADFSIEIKGGIHANEGTIVITTQHPCVAKLKDKTLEATRKRTEGRTEIQLKAEGVPPAFITLQVLPNLAADPIDIELPFPAKGCLALDVNGRPLDKNITLHDLLGSRAFLFSRNGEPTRYTLQLHLRSVSGLQAWHEWCYTALSDRPVELNLYSLREHIENLISLEAGIDQVVEMRITGAGVVMAWQIRRYKYSLRYDYEKELLLSQSVNHRAGQIPSPVIMLLSEPERKSIPLASRMSEGVPVGEYELSSIVNKNGPWLVVPKPGEEMAFRPCFIRGESSLPVEESNIRSLQKATQLFNPQAEVNTITLVLGQMANDPAHSGWQFMRSLYDQFGYLPLATFEVWRALVQHPQALAMSLFKFEMSAEYLSRIENEFPILWEFFPIFEIKAASERFKLFLSQKGAPEETQKLLVTNMFQRLGLVFPTYADEIEKWLSNGHLPPSIPESFVHVWYQELLREHSEAQWPEYGSKRLHSWMASQKNPVIGINPDANHRYSVALLPVFAAAVASGNASFESVFDRKPGAVFFLRQVRDFDSRWFKAIFQCSLLRYVAKK

SEQ ID NO: 25385 - protein, 2114 aa, Escherichia coli
MTTRYFSSLIEQSLSRSTEATLSIMGVTNPQLREHLAQQMGADCGKPGSFLASPVFQQMFGWKESNHTMRSLTEGNALLSKAVVDSLDDQNNGRYRFGADWRPFTHQLASWKALLEKKHSVVVTSGTGSGKTECFMVPVLEDLYRELHENGNNPLVGVRALFLYPLNALINSQRERLDAWTRGFGTGIRYCLYNGNTENLYASVKSEQAKRPNEVLSREKMREEPAPILVTNGTMLEYMMVRQVDAPIIQQSKAQKSLRWIVLDEAHTYVGSQAAELALQLRRVMTAFGVTPDDVRFVATSATIAGSDAEKQLKKFLSELSGIPQERIDVLDGSRVIPELEPSKNVSVPLDEIEQIPDLDLRDKNDNKIKGISPERFYALTHSPEARYIREMLVKQPNPMKLDEITERLHVLTKQHYSQQEVLRWIDVCSGTQPNAKDPAFLKVRAHIFQRNTQGIWACVDKDCRLKHGTPLDKGWPFGYVYVNQRQNCDCGSPVYEVAFCNDCNEPHLLARDKKGKLVQWENKGGDEFSLQDEVPVEHDATEEKVEKENSFQPPLIIAAGETSEAGYTLQRLDRQTRRIGVINNDSIPLIINDIEQVCSASGCGYRGMSGKQPFRRALLGGPFYVTNIVPTVLEYCQDFTSDEGKEGVGPDSLPGRGRRLITFTDSRQGTARMAVRMQQEAERSRLRGSVVEILSWHQRTQTSTAPNANADLEKLAARAKQAREQAEEYRSWGMPDQAKLSQAQAEQLEQAYQAATGGKAATILVSRTWTEMVNELKERADIRGPVLQYNHYLKPEVFNENGGPLKLSEMLLFREFMRRPKRTNSLETQGLVQVGYQGLEKIHKSPLHWQEKGLTLDDWRDFLKVTLDHYVRESNFTQLDDELKNWIGSRFSSKFVRNPESKDPEDNQNRRWPQIRNGNVSHRLAKLLMLGAGFKTVNAATIDIINTWLKEAWAQLTGPLAVLKPDGNRFYLPKEHMTFSLITDAWICPVTNKILDTAFKGLTPYLPTHISFEHLTLAQYDTFVAQKVTMPEIWKLDRSQEDYAEGLAKARDWVSHDPLIAQLRSENVWTDINDRVVEGGFYYRTAEHSAQQSSERLQSYEKMFKNGQLNVLNCSTTMEMGVDIGGITAVVMNNVPPHPANYLQRAGRAGRSKESRAISYTLCKGNPHDQQVFANPLWPFETMIPAPMVAMNSARLVQRHVNALLLSDFLCNVIGETDKEKTSLDSLWFFGEDDGQSKCERFKIWLERPVLDIDTALERLVKGTALHGARAEYLRDKTINAITFLQQRWLSVYRDLVTQERESQPQTPYRKRIELEKKRHCGEYLLRDLAARTFLPGYGFPTDVVTFDNFTMEDYIREKSQKSRDKKDREDNVSRYKGLPSRNLGVAIREYAPGAEIILDGRVFRSAGVSLHWHNINADTNEAQRLDCAWRCHKCGTIGYEEGMSSSGMLFCSNSACGEKIIMDNRRQVLQPAGFVTDAHAPVTNNIETMKFVPVVPAWVFVKAEPVPLPNPLMGYMASGADGHVFQQSLGEGGHGYALCLSCGRAESMLNENDAPKSMEAHYPPRPGKADRDSQNHRLICPGSTALMKNVTLGALARTDVFEMVLRKPQNGEYLPDNTEEGRIVAMTLAVALRQALAGVLGISAAELGYSVRPVRLEDGQSVLAVQLYDVISGGAGFASSAPVHIEAILQGMVKQLGCRHCETACSECLLDSQTRHDHDLLDRKAALAWLGDDFTYYIGLPDEETFSLPDARYCPGAIGDTIRRAINEGAEKLTLWMTGAPNEWDLYARQFRAAVQNYRLKDNVEVDLVIPTGVDDPDLLHELSQFTALGVRLCHVEQDLQLPIVAQVTFTDRVMTLASRSQQATIPGPEWHLNDELVVRSLGYKTVELNEFILPAKATNAVERVKDIQIHKQLNGPLSQFGQRFWDVLFNDHEEAQSLMNNTRITGVHYTDRYLQNPVALALLGSILRPLKTKLTDGAEVTLDTLFKDKDRPGNRPFHDWMSIADFQDFADQWFAAALGRPVELTVFDSPRDIPHHRKLTVTFEDGQVLKIRFDQGMGYWRINFSSQWHYFDFRDDVSFQLVKMAQACKEGNVANSEESWATDVLVEVIAS

SEQ ID NO: 25386 - protein, 1096 aa, Escherichia coli; identical to SEQ ID NO: 25332

SEQ ID NO: 25387 - protein, 2114 aa, Escherichia coli; identical to SEQ ID NO: 25385

SEQ ID NO: 25388 - protein, 524 aa, Escherichia coli
IQGASLATRKRTEGRTEIQLKAEGVPPAFITLQVLPNLAADPIDIELPFPAKGCLALDVNGRPLDKNITLHDLLGSRAFLFSRNGEPTRYTLQLHLRSVSGLQAWHEWCYTALSDRPVELNLYSLREHIENLISLEAGIDQVVEMRITGAGVVMAWQIRRYKYSLRYDYEKELLLSQSVNHRAGQIPSPVIMLLSEPERKSIPLASRMSEGVPVGEYELSSIVNKNGPWLVVPKPGEEMAFRPCFIRGESSLPVEESNIRSLQKATQLFNPQAEVNTITLVLGQMANDPAHSGWQFMRSLYDQFGYLPLATFEVWRALVQHPQALAMSLFKFEMSAEYLSRIENEFPILWEFFPIFEIKAASERFKLFLSQKGAPEETQKLLVTNMFQRLGLVFPTYADEIEKWLSNGHLPPSIPESFVHVWYQELLREHSEAQWPEYGSKRLHSWMASQKNPVIGINPDANHRYSVALLPVFAAAVASGNASFESVFDRKPGAVFFLRQVRDFDSRWFKAIFQCSLLRYVAKK

SEQ ID NO: 25389 - protein, 2114 aa, Escherichia coli; identical to SEQ ID NO: 25385

SEQ ID NO: 25390 - protein, 78 aa, Escherichia coli
MASQKNPVIGINPDANHRYSVALLPVFAAAVASGNASFESVFDRKPGAVFFLRQVRDFDSRWFKAIFQCSLLRYVAKK

SEQ ID NO: 25391 - protein, 2114 aa, Escherichia coli; identical to SEQ ID NO: 25385

SEQ ID NO: 25392 - protein, 78 aa, Escherichia coli; identical to SEQ ID NO: 25390

SEQ ID NO: 25393 - protein, 2114 aa, Escherichia coli; identical to SEQ ID NO: 25385

SEQ ID NO: 25394 - protein, 524 aa, Escherichia coli; identical to SEQ ID NO: 25388

SEQ ID NO: 25395 - protein, 2114 aa, Escherichia coli
MTTRYFSSLIEQSLSRSTEATLSIMGVTNPQLREHLAQQMGADCGKPGSFLASPVFQQMFGWKESNHTMRSLTEGNALLSKAVVDSLDDQSNGRYRFGADWKPFTHQLASWKALLEKKHSVVVTSGTGSGKTECFMVPVLEDLYRELHENGNNPLVGVRALFLYPLNALINSQRERLDAWTRGFGTGIRYCLYNGNTENLHASVKSEQAKRPNEVLSREKMREEPAPILVTNGTMLEYMMVRQVDAPIIQQSKAQKSLRWIVLDEAHTYVGSQAAELALQLRRVMTAFGVTPDDVRFVATSATIAGSDAEKQLKKFLSELSGIPQERIDVLDGSRVIPELEPSKNVSLPLDEIEQIPDLELRDKNDNKIKGISSDRFYALTHSPEARYIREMLVKQPNPMKLDEITERLNVLTKQHYSQQEVLRWIDVCSGTQPNAKDPAFLKVRAHIFQRNTQGIWACVDKNCRLKHGTPLEKGWPFGYVYVNQRQNCDCGSPVYEVAFCNDCNEPHLLAQDKKGKLVQWENKGGDEFSLQDEVPVEHDTTEEKVEKENGFLPPLIIAAGETSETGYTLQRLDRQTRRIGVINNDSIPLIINDVEQVCSASGCGYRGMSGKQPFRRALLGGPFYVTNIVPTVLEYCQDFTSDEGKEGVGPDSLPGRGRRLITFTDSRQGTARMAVRMQQEAERSLLRGSVVEILSWHQRTQTSTAPNANADLEKLAARAKQAREQAEEYRSWGMPDQAKLSQAQAEQLEQAYQAATGGKAATTLVSRTWTEMVNELKDKADIRGPVLKYNHYLQPEVFNKNGGPLKLSEMLLFREFMRRPKRTNSLETQGLVQVGYQGLEKIHKSPLHWQEKGLTLDDWRDFLKVTLDLYVRESNFTQLDDELKNWIGSRFSSKFVRNPESKDPEDNQNRRWPQIRNGNVSHRLAKLLMLGAGFKTVNTATIDIINTWLKEAWAQLTGPLAVLKPDGNRFYLPKEHMTFSLITDAWICPVTNKILDTAFKGLTPYLPTHISFEHLTQAQYDTFVAQKVTMPEIWKLDRSQEDYAEGLAKARDWVNNDPLIAQLRSENVWTDINDRVVEGGFYYRTAEHSAQQSSERLQSYEKMFKNGQLNVLNCSTTMEMGVDIGGITAVVMNNVPPHPANYLQRAGRAGRSKESRAISYTLCKGNPHDQQVFANPLWPFETMIPAPMVAMNSARLVQRHVNALLLSDFLCNVIGETDKEKTSLDSLWFFGEDDGQSKCERFKVWLERPVLDIDTALERLVKGTALHGARAEHLRDKTINAITFLQQRWLSVYRDLVTQERESQPQTPYRKRIELEKKRHCGEYLLRDLAARTFLPGYGFPTDVVTFDNFTMEDYIREKSQKSRDKKDREDNVSRYKGLPSRNLGVAIREYAPGAEIILDGRVFRSAGVSLHWHNINADTNEAQRLDCAWRCHKCGTIGYEEGMSSSGMLFCSNSACGEKIILDNRRQVLQPAGFVTDAHAPVTNNIETMKFVPVVPAWVFVKAEPVPLPNPLMGYMASGADGHVFQQSLGEGGHGYALCLSCGRAESMLNENDAPKSMEAHYPPRPGKADRDSQNHRLICPGSTALVKKVTLGALARTDVFEMVLRKPQNGEYLPDNTEEGRIVAMTLAVALRQALAGVLGISAAELGYSVRPVRLEDGQSVLAVQLYDVISGGAGFASSAPVHIEAILQGMVKQLGCRHCDTACSECLLDSQTRHDHDLLDRKAALAWLGDDFTYYIGLPDEETFSLPDARYCPGAIGDTIRRAINEGAEKLTLWMTGAPNEWDLYARQFRAAIQSYRLKDNVEVDLVIPAGVDDPDLLHELSQFTALGVRLCHVEQDLQLPIVAQVTFADRVMTLASRSQQATIPGPEWHLNDELVVRSLGYKTVELNEFILPAKAANAVERVKDIQIHKQLNGPLSQFGQRFWDVLFNDHEEAQSLMNNTRITGVHYTDRYLQNPVALALLGSILKPLKTKLTDGAEVALDTLFKDKDRPGNRPFHDWMSIADFQDFADQWFAAALGRPVELTVFDSPRDIPHHRKLTVTFEDGQILKIRFDQGMGYWRINFASKWHYFDFSDDVSFQLVKMAQACQEGNVANSEDSWATDVLVEVIAS

SEQ ID NO: 25396 - protein, 1096 aa, Escherichia coli
MGQSEYISWVKCTSWLSNFVNLRGLRQPDGRPLYEYHATNAEYNQLTQLLCAVGQSQSNICNRDFAACFVLFCSEWYRRDYERQCGWTWDPIYKKIGISFTATELGTIVPKGMEDYWLRPIRFYESERRNFLGTLFSEGGLPFRLLKESDSRFLAVFSRILGQYEQAKQSGFSALSLARAVIEKSALPTVFSEDTSVELISHMADNLNSLVLTHNLTNHKEPVQQLDKVHPTWRSEFPIPLDDETGTHFLNGLLCAASVEAKPRLQKNKSTRCQFYWSEKHPDELRVIVSLPDEVSFPVTSEPSTTRFELAIYEDGEEVSGLGPAYASLENRQATVRLRKSEVRFVRQNPSAGLSLVARAGGMIVGSIKLDDSEIAIGEVPLTFIVDADQWLLQGQASCSVRSSDVLIVLPRDNSTVAGFDGQSSAVNVLGLKALPVKGCQDVTVTANETYRIRTGREQISIGRFALNGKRASWVCHPDETFIGVPKVISTLPDIQSIDVTRYLSGISIEQCHIQEMLGAQYLSIRNSNNETLLRRKIGILPADFSIEIKGGMHANEGTIVITTQHPCVATLKDKTLEATRKRTEGRTEIQLKAEGVPPAFITLQVLPNLAADTIDIELPFPAKGCLALDVNGRPLDKNITLHDLLGSRAFLFSRNGEPTKYTLQLHLRSISGLQAWHEWSYTALSERPVELNLYSLREHIENLISLEAGIDQVVEMRITGAGVVMAWQIRRYKYSLRYDYEKELLLSQSVNHRAGQIPSPVIMLLSEPERKSIPLASRMSEGVPVGEYELSSIVNKNGPWLVVPKPGEEMAFRPCFIRGESSLPVEESNIRSLQKATQLFNPQAEVNTITRVLGQMANDPAHSGWQFMRSLYDQFGYLPLATFEVWRALVQHPQALAMSLFKFEMSAEYLSRIENEFPILWEFFPIFEIKAASERFKLFLSQKGAPEETQKLLVTNMFQRLGLVFPTYADEIEKWLSNGYLPPSIPESCVHGWYQELLREHSEARWPEYGCKRLYKWMMSQKNPVIGINPDANHRYSVAWLPVFAAAVASGNASFESVFDRKPGAVFFLRQVRDFDSRWFKAIFQFSLLHYVAKK

SEQ ID NO: 25397 - protein, 2114 aa, Escherichia coli
MTTRYFSSLIEQSLSRSTEATLSIMGVTNPQLREHLAQQMGADCGKPGSFLASPVFQQMFGWKESNHTMRSLTEGNALLSKAVVDSLDDQNNGRYRFGADWRPFTHQLASWKALLEKKHSVVVTSGTGSGKTECFMVPVLEDLYRELHENGNNPLVGVRALFLYPLNALINSQRERLDAWTRGFGTGIRYCLYNGNTENLYASVKSEQAKRPNEVLSREKMREEPAPILVTNGTMLEYMMVRQVDAPIIQQSKAQKSLRWIVLDEAHTYVGSQAAELALQLRRVMTAFGVTPDDVRFVATSATIAGSDAEKQLKKFLSELSGIPQERIDVLDGSRVIPELEPSKNVSVPLDEIEQIPDLDLRDKNDNKIKGISPERFYALTHSPEARYIREMLVKQPNPMKLDEITERLHVLTKQHYSQQEVLRWIDVCSGTQPNAKDPAFLKVRAHIFQRNTQGIWACVDKDCRLKHGTPLDKGWPFGYVYVNQRQNCDCGSPVYEVAFCNDCNEPHLLARDKKGKLVQWENKGGDEFSLQDEVPVEHDATEEKVEKENSFQPPLIIAAGETSEAGYTLQRLDRQTRRIGVINNDSIPLIINDIEQVCSASGCGYRGMSGKQPFRRALLGGPFYVTNIVPTVLEYCQDFTSDEGKEGVGPDSLPGRGRRLITFTDSRQGTARMAVRMQQEAERSRLRGSVVEILSWHQRTQTSTAPNANADLEKLAARAKQAREQAEEYRSWGMPDQAKLSQAQAEQLEQAYQAATGGKAATILVSRTWTEMVNELKERADIRGPVLQYNHYLKPEVFNENGGPLKLSEMLLFREFMRRPKRTNSLETQGLVQVGYQGLEKIHKSPLHWQEKGLTLDDWRDFLKVTLDHYVRESNFTQLDDELKNWIGSRFSSKFVRNPESKDPEDNQNRRWPQIRNGNVSHRLAKLLMLGAGFKTVNAATIDIINTWLKEAWAQLTGPLAVLKPDGNRFYLPKEHMTFSLITDAWICPVTNKILDTAFKGLTPYLPTHISFEHLTLAQYDTFVAQKVTMPEIWKLDRSQEDYAEGLAKARDWVSHDPLIAQLRSENVWTDINDRVVEGGFYYRTAEHSAQQSSERLQSYEKMFKNGQLNVLNCSTTMEMGVDIGGITAVVMNNVPPHPANYLQRAGRAGRSKESRAISYTLCKGNPHDQQVFANPLWPFETMIPAPMVAMNSARLVQRHVNALLLSDFLCNVIGETDKEKTSLDSLWFFGEDDGQSKCERFKIWLERPVLDIDTALERLVKGTALHGARAEYLRDKTINAITFLQQRWLSVYRDLVTQERESQPQTPYRKRIELEKKRHCGEYLLRDLAARTFLPGYGFPTDVVTFDNFTMEDYIREKSQKSRDKKDREDNVSRYKGLPSRNLGVAIREYAPGAEIILDGRVFRSAGVSLHWHNINADTNEAQRLDCAWRCHKCGTIGYEEGMSSSGMLFCSNSACGEKIIMDNRRQVLQPAGFVTDAHAPVTNNIETMRFVPVVPAWVFVKAEPVPLPNPLMGYMASGADGHVFQQSLGEGGHGYALCLSCGRAESMLNENDAPKSMEAHYPPRPGKADRDSQNHRLICPGSTALMKNVTLGALARTDVFEMVLRKPQNGEYLPDNTEEGRIVAMTLAVALRQALAGVLGISAAELGYSVRPVRLEDGQSVLAVQLYDVISGGAGFASSAPVHIEAILQGMVKQLGCRHCETACSECLLDSQTRHDHDLLDRKAALAWLGDDFTYYIGLPDEETFSLPDARYCPGAIGDTIRRAINEGAEKLTLWMTGAPNEWDLYARQFRAAVQNYRLKDNVEVDLVIPTGVDDPDLLHELSQFTALGVRLCHVEQDLQLPIVAQVTFTDRVMTLASRSQQATIPGPEWHLNDELVVRSLGYKTVELNEFILPAKATNAVERVKDIQIHKQLNGPLSQFGQRFWDVLFNDHEEAQSLMNNTRITGVHYTDRYLQNPVALALLGSILRPLKTKLTDGAEVTLDTLFKDKDRPGNRPFHDWMSIADFQDFADQWFAAALGRPVELTVFDSPRDIPHHRKLTVTFEDGQVLKIRFDQGMGYWRINFSSQWHYFDFRDDVSFQLVKMAQACKEGNVANSEESWATDVLVEVIAS

SEQ ID NO: 25398 - protein, 1096 aa, Escherichia coli; identical to SEQ ID NO: 25332

SEQ ID NO: 25399 - protein, 2104 aa, Escherichia coli 0.1304; identical to SEQ ID NO: 25235

SEQ ID NO: 25400 - protein, 978 aa, Escherichia coli 0.1304; identical to SEQ ID NO: 25216

SEQ ID NO: 25401 - protein, 2104 aa, Escherichia coli 08BKT055439; identical to SEQ ID NO: 25235

SEQ ID NO: 25402 - protein, 978 aa, Escherichia coli 08BKT055439; identical to SEQ ID NO: 25216

SEQ ID NO: 25403 - protein, 2104 aa, Escherichia coli 08BKT77219; identical to SEQ ID NO: 25235

SEQ ID NO: 25404 - protein, 978 aa, Escherichia coli 08BKT77219; identical to SEQ ID NO: 25216

SEQ ID NO: 25405 - protein, 2104 aa, Escherichia coli 09BKT024447; identical to SEQ ID NO: 25235

SEQ ID NO: 25406 - protein, 978 aa, Escherichia coli 09BKT024447; identical to SEQ ID NO: 25216

SEQ ID NO: 25407 - protein, 2104 aa, Escherichia coli 09BKT076207
MDVQQLHYAPLLNQLHQRAVRSVVSQLALRSKSLTHYLESQYFQPPGQEGSLLADPVFESTFGWMPADETMEDLRDKLISSPLVDALSKAPVPFRHQLTAWRTILEDKKSLLVSSGTGSGKTECFMVPVLEDLIRQQKSTRQSLTGTQAIFLYPLNALINSQQERLREWTRGFKGKIRFALYNGETRHTKYEIQEDQLKVPEQALSREAIYEEPPSIMVTNTTMLEYMLIRRKDAPIIEKSQGMLKYIVLDEAHSYIGSQAAELALLLRRVMQAFNVGPGTDKPVQIIATSATIGEDSPEGNKELAKFVADLAGVTERDVKVVRGYRQIPRVSESLIRHEYPTSLTSLKSLSPQDLYQQLCHYRVAQQLRQALTHPGRQAVRLSELLNVARRTWPDINHRELLQLLDLMARSREGELAFTPLRMHGFIRTLAGLWACSNKQCSHKAHELNQSDWPFGQVWFEQRQYCDCGAPVFEVLRCSGCGSAYLSAKEEMRGDGTNWLVAQPATAEVDEFALDVDVYSEDEDNDELDNNSQFDRLIASDGEKYIISLEETTAGKIDSEAQKHYEINLLRPESRGEGRNNSFACVCCGDTQRKNNPLFRPLRLGAPFFLNEIIPTLLEFSPLPQTREEQLGPFNGRRLLTFTDSRQGTARISARLQQDADKATLRALCYQELANITEPSAKLSPAHCALLEKVISQFSVLPLKNSIDALKKAMAANEELSPTDIQALKIIEPMVSSLSTEHAEAMQILQANSGNQQKKTMSWQTLSEQLVGSVDLADRMRGSFKELSGLDLTKQQFADFCLYSEFGRRPKNAWTLESLGLVAIHYPFIDKVTTCPQDWKTLLPDPDKQLAEWRNLLKITLDFFIRENSAVFYENEQYPRWMGARFPVKMLQGPDKKNKGQKRDQLWPQIRDRHYNRVIKLLIAVFPAIQPEQAHWKSLVNHLMIEVWDAIRPCLRQFESGYQLDIKQQAEFYSPKQVWRCPYTRRALDVTLLGYSPYLPGSKEIAPEKAVLIEMPELPVRHWRLSGGGEIAREERLEWLESNALIQHAREEGLWSTRSDRLALKDSWYRLEEHSAQRTPEQNQFNEKQFKSGKVNVLNCSTTMEMGVDIGGMSLVAMNNVPPAPANYLQRAGRAGRRGESASAAITLCKNTAHGMEVFKDPLWAFNTTASAPRVRFGSSSIVQRHVNALVLGLFLRAEVPDATKLSCKWFFEGDESQCLRFLHWLNHQADQLADKLKRLTQGTVLMSLTATQLLTRTQAMMQQVDIRWRSQLAILLENIEALKADNSAWEETPAGKAIAYQLRDYRGAYLFSKLISEAFLPGHGFPVGVVNFNYLTADELEKRRAIKATQADPNEGGESFSRRIEKLPSRDLPTALREYAPGADVVLGGKVYRSSGIMLGKVLASGQELSGDHHIPWFWHCRKCGAGATSTTHPVECSHCKADIQQLDVKRYLQPVGFATDIRYQAHNDVSMPAQLPWKDPRVLVPSSVWVSLPDAGLGRYRFSHSGELFHFSEGEFGHGYAICLSCGRAESQTQPQRTPENLKNPERENTHYLLRGGSNDRQGSNKLCHGHVHKDLWLGYSSRTDMVELQLNDDNGLLIRDEVAARSLAVALREGLAHKLGIENTELGVTTQQARDINGYTGYSIFIYDNNAGGAGYAVQLIDHWADVFNYARKLLDCSCDKFCHHCLLSYDSQHYVNRLDRHHALTLLTNVRLQRLNLAPEYQYFGDGSRVETNPLSLRIAQCLNSEIYDSCSLVLAGPQEQWDFAQWPLFKELLQFASSGGNVELLVATPLANLTDSSRHQLSALAAMPGGRLQVKSIATAQLMQGKGRWLAQVTREGQSQQWAADDSATVAPGELWGQSASSPVVTLKGTSGKTFSGQTLSAEDLLPALPTGAVRINLCEQLDGPLEGFGSRFWSLVTQQHAGWKQAFTRHKEITHVEYSDRYLNSPFTARLLGEILTELVEQGMAERASLTVCVKKLDYNSRQHDALYNAWLNEEDRQQVVTTLLEEGYLGPAWPGAISWLTGDNQSTEHGRELTVTFSDGSQHYVLLDMGLSYWRCIEDTFFDFALRVPQQVERLANTRARAVAPGNDLRSYIIAG

SEQ ID NO: 25408 - protein, 978 aa, Escherichia coli 09BKT076207; identical to SEQ ID NO: 25216

SEQ ID NO: 25409 - protein, 2104 aa, Escherichia coli 09BKT078844; identical to SEQ ID NO: 25235

SEQ ID NO: 25410 - protein, 978 aa, Escherichia coli 09BKT078844; identical to SEQ ID NO: 25216

SEQ ID NO: 25411 - protein, 2104 aa, Escherichia coli 10.0821; identical to SEQ ID NO: 25235

SEQ ID NO: 25412 - protein, 978 aa, Escherichia coli 10.0821; identical to SEQ ID NO: 25216

SEQ ID NO: 25413 - protein, 2104 aa, Escherichia coli 10.0833; identical to SEQ ID NO: 25407

SEQ ID NO: 25414 - protein, 978 aa, Escherichia coli 10.0833; identical to SEQ ID NO: 25216

SEQ ID NO: 25415 - protein, 2104 aa, Escherichia coli 10.0869; identical to SEQ ID NO: 25235

SEQ ID NO: 25416 - protein, 982 aa, Escherichia coli 10.0869
MPIRMIENESGYLITYFRRIYQALRGQSSQYPAAKIAQELGDTIPVTMQNELVYEIAGEFCETLCRLLSEHPPHSSDPVSALRKLSPDWHLQLPLVLPEANAAEIVRRLLSQSSEIRSASSLQVERIWVDVDDSWYCDARFRFPATMRTEQLTSLFECHIQPEQTRLIISGKWKNGGARLAMLSRYEQQDWRVELLPIAMQKLSGADAMAEISLSLHEGPILLGHTIPKGGYELTEELPWVFEAMNESESQLKLVGMGSVSSRLNALFISLPKNSHLDISGEGEFDIPRLLKNSERSLTKISGVFSVVLHDGAVCTIRTQQLYDSAIEYYIKSTEVELVKSDYPVHRAWPKIGWKKDLQYGIVPEKELFWRSIRSGNNAWYSVASEMPKGQIEVRRIVNDEVLFSGKVVVLPADFDINIIPESAQQGIIMLSGITDTRIDKYSNNEKVTLKSDYSQNECAIYYNSSLMLENTVDLRVSWKDGSNLKLLLPKPVSGGRFVTNDGSVHFDGVASIAHLHGIDAELLTISCAGRGYLNIELLDENPVAEKFRYLHADLPLLSGRNDKLQQISLYENYNLLNAMLACAWNSNSTLCVDFYSDRFGKDKATLNIKRYDGSFIEHDQGLLVDIKNSVVFPANRIDELVVDAISLKNPGLHISLLKKDEFAYDLSALNVQDSPWLIVGKLDGTARIAPVIKWMLPVLQTNDLLLNALCEADPEQRKKNFNELIFEIDNNPLQNYCCLLTEYIKKYKMNNGLSLLDLDLFRGISSNYRVVVQLLISSCLSGDSDTIYDIQEELPFSWGWIPVSIWKDVFQKCWTYLEKQINDKTLALHILQPFIAFMNHRAHIDRRLAPIANMLLTYSESLPTGCDVLPTVSREQFNEAKQMLLRNPDSFGRISIFPKELWSSAITPELKSVFNKLWIEDKYHSRLEKRFNLMLVAALLTQKDNNLIHQLSALFEFHYQQAPQQLGVIYQYYFEQAGVCH

SEQ ID NO: 25417 - protein, 2104 aa, Escherichia coli 1-110-08_S3_C1
MDVQQLHYAPLLNQLHQRAVRSVVSQLALRSKSLTHYLESQYFQPPGQEGSLLADPVFESTFGWMPADETMEDLRDKLISSPLVDALSKAPVPFRHQLTAWRTILEDKKSLLVSSGTGSGKTECFMVPVLEDLIRQQKSTRQSLTGTQAIFLYPLNALINSQQERLREWTRGFKGKIRFALYNGETRHTKYEVQEDQLKVPEQALSREAIYEAPPSIMVTNTTMLEYMLIRRKDAPIIEKSQGILKYIVLDEAHSYIGSQAAELALLLRRVMQAFNVGPGTDKPVQIIATSATIGEDSPEGNKELAKFVADLAGVTERDVKVVRGYRQIPRVSESLIRHEYPTSLTSLKSLSPQDLYQQLCHYRVAQQLRQALTHPGRQAVRLSELLNVARRTWPDINHRELLQLLDLMARSREGELAFTPLRMHGFIRTLAGLWACSNKQCLHKAHELNQSDWPFGQVWFEQRQYCDCGAPVFEVLRCSGCGSAYLSAKEEVRGDGTNWLVAQPAAAELDEFALDVDVYSEDEDNDELDNNSQFDRLIAIDGEKYIISLEETTAGKIDSEAQKHYEINLLRPESRGEGRNNSFACVCCGDTQRKNNPLFRPLRLGAPFFLNEIIPTLLEFSPLPQTREEQLGPFNGRRLLTFTDSRQGTARISARLQQDADKATLRALCYQELANINEPSAKLSPAHCALLESFITQFSILPLKNSIDALKKAMVANEELSPADIQALKIIEPMVSSLSPDHAEAMQILQANSGNQQKKTMSWQTLSEQLVGSVDLADRMRGSFKELSGLDLTKQQFADFCLYSEFGRRPKNAWTLESMGLVAIHYPFIDKVTTCPQDWKTLLPDPDKQLAEWRNLLKITLDFFIRENSAVFYENEQYPRWMGARFPVKMLQGPDKKNKGQKRDQLWPQIRDRHYNRVIKLLIAVFPAIQPEQAHWKSLVNHLMIEVWDAIRPCLRQFESGYQLDIKQQAEFYSPKQVWRCPYTRRALDVTLLGYSPYLPGSKEIAPEKAVLIEMPELPVRHWRLSGGGEIAREERLEWLESNALIQHAREEGLWSTRSDRLALKDSWYRLEEHSAQRTPEQNQFNEKQFKSGKVNVLNCSTTMEMGVDIGGMSLVAMNNVPPAPANYLQRAGRAGRRGESASAAITLCKNTAHGMEVFKDPLWAFNTTASAPRVRFGSSSIVQRHVNALVLGLFLRAEVPDATKLSCKWFFEGDESQCLRFLHWLNNQADQLADKLKRLTQGTVLMSLTATQLLTRTQAMMQQVDIRWRSQLAILLENIEALKADNSAWEETPAGKAIAYQLRDYRGAYLFSKLISEAFLPGHGFPVGVVNFNYLTADELEKRRAIKATQADPNEGGESFSRRIEKLPSRDLPTALREYAPGADVVLGGKVYRSSGIMLGKVLASGQELSGDHHIPWFWHCRKCGAGATSTTRPVECSHCKADIQQLDVKRYLQPVGFATDIRYQAHNDVSMPAQLPWKDPRVLVPSSVWVSLPDAGLGRYRFSHSGELFHFSEGEFGHGYAICLSCGRAESQNQPQRTPENLKNPERENTHYLLRGGSNDRLGSNKLCHGHVHKDLWLGYSSRTDMVELQLNDDNGLLIRDEVAARSLAVALREGLAHKLGIENTELGVTTQQARDINGYTGYSIFIYDNNAGGAGYAVQLIDHWADVFNYARKLLDCSCDKFCHHCLLSYDSQHYVNRLDRHHALTLLTNVRLQRLNLAPEYQYFGDGSRVETNPLSLRIAQCLNSEIYDSCSLVLAGPQEQWDFAQWPLFKELLQFASSGGNVELLVATPLANLTDSSRHQLSALAAMPGGRLQVKSIATAQLMQGKGRWLAQVTREGQSQQWAADDSATVAPGELWGQSASSPVVTLKGTSGKTFSGQTLSAEDLLPALPTGAVRINLCEQLDGPLEGFGSRFWSLVTQHPAGGKQAFPRHKEITHVEYSDRYLNSPFTARLLGEILTELVEQGMAERASLTVCVKKLDYNSRQHDALYNAWLNEEDRQQVVTTLLEEGYLGPAWPGAISWLTGDNQSTEHGRELTVTFSDGSQHYVLLDMGLSYWRCIEDTFFDFALRVPQQVERLANTRARAVASGNDLRSYVIAG

SEQ ID NO: 25418 - protein, 1119 aa, Escherichia coli 1-110-08_S3_C1
MLVKTPVNPLLQWLNMFFSRRSLSGADGRALYAYRCTDTEYESLAELLRTYAPRSYPRTIFISYSDVLFSIYAAEFIRRTHTVGHPKWDTILDSIDWKVPYVHRQKLVNDGIRYWKRKIRNLGQASGYLHTLACEGGLPIRMIENESGYLITYFRRIYQALRGQASQYPAAKIAQELGDTIPVTMQNELVYEIAGEFCETLCRLLSEHPPQSSDPVSALRKLSPDWHLQLPLVLPEANAAEIVRRLLSQSSEIRSASSLQVERIWVDVDDSWYCDARFRFPATMRTEQLTSLFECNIQPEQTRLIISGKWRNGGARLAMLSRYEQQDWRVELLPIAMQKLSGADAMAEISLSLHEGPILLGHTIPKGGYELTEELPWVFEAMNESESQLKLVGMGSVSSRLNALFISLPKNSHLDISGEGEFDIPRLLKNSERSLTKISGVFSVVLHDGAVCTIRTQQLYDSAIEYYIKSTEVELVKSDYPVHRAWPKIGWKKDLQYGIVPEKELFWRSIRSGNNAWHSVASEMPKGQIEVRRIVNDEVLFSGKVVVLPADFDINIIPESVQQGIIMLSGITDTRIDKYSNNEKVTLKSDYSQNECAIYYNSSEMLENTVDLRVSWKDGSNLKLLLPKPVSGGRFVTHDGSVHFDGVASIAHLHGIDAELLTISCAGRGYLNIELLDENPVAEKFRYLHADLPLLSGCNDKLKQISLYENYNLLNAMLACAWNSNSTLCVDFYSDRFGKDKATLSIKRYDGSFIEHDQGLLVDIKNSVVFPANRIDELVVDAISLKDPGLHISLLKKDEFAYDLSALNVQDSPWLIVGKLDGTARIAPVIKWGLPVLQTNDLLLNALCEADSEQRKKYFNELIFEIDNNPLQNYCCLLTEYIKKYKMNNGLSLLDLDLFRGISSNYRVVVQLLISSCLSGDSDTIYDIQDELPFSWGWIPVSIWKDVFQKCWAYLEKQINDKTLALHILQPFIAFMNHRAHIDRRLAPIANMLLTYSELLPAGCNVLPTVSREQFNEAKQMLLRNPDSFGRISIFPKELWSSAITPELKSVFNKLWIEDKYHSRLEKRFNLMLVAALLTQKDNNLIYQLSALFEFHYQQAPQQLGVIYQYYFEQAGVCH

SEQ ID NO: 25419 - protein, 2104 aa, Escherichia coli 1-110-08_S3_C2
MDVQQLHYAPLLNQLHQRAVRSVVSQLALRSKSLTHYLESQYFQPPGQEGSLLADPVFESTFGWMPADETMEDLRDKLISSPLVDALSKAPVPFRHQLTAWRTILEDKKSLLVSSGTGSGKTECFMVPVLEDLIRQQKSTRQSLTGTQAIFLYPLNALINSQQERLREWTRGFKGKIRFALYNGETRHTKYEVQEDQLKVPEQALSREAIYEAPPSIMVTNTTMLEYMLIRRKDAPIIEKSQGILKYIVLDEAHSYIGSQAAELALLLRRVMQAFNVGPGTDKPVQIIATSATIGEDSPEGNKELAKFVADLAGVTERDVKVVRGYRQIPRVSESLIRHEYPTSLTSLKSLSPQDLYQQLCHYRVAQQLRQALTHPGRQAVRLSELLNVARRTWPDINHRELLQLLDLMARSREGELAFTPLRMHGFIRTLAGLWACSNKQCLHKAHELNQSDWPFGQVWFEQRQYCDCGAPVFEVLRCSGCGSAYLSAKEEVRGDGTNWLVAQPAAAELDEFALDVDVYSEDEDNDELDNNSQFDRLIAIDGEKYIISLEETTAGKIDSEAQKHYEINLLRPESRGEGRNNSFACVCCGDTQRKNNPLFRPLRLGAPFFLNEIIPTLLEFSPLPQTREEQLGPFNGRRLLTFTDSRQGTARISARLQQDADKATLRALCYQELANINEPSAKLSPAHCALLESFITQFSILPLKNSIDALKKAMVANEELSPADIQALKIIEPMVSSLSPDHAEAMQILQANSGNQQKKTMSWQTLSEQLVGSVDLADRMRGSFKELSGLDLTKQQFADFCLYSEFGRRPKNAWTLESMGLVAIHYPFIDKVTTCPQDWKTLLPDPDKQLAEWRNLLKITLDFFIRENSAVFYENEQYPRWMGARFPVKMLQGPDKKNKGQKRDQLWPQIRDRHYNRVIKLLIAVFPAIQPEQAHWKSLVNHLMIEVWDAIRPCLRQFESGYQLDIKQQAEFYSPKQVWRCPYTRRALDVTLLGYSPYLPGSKEIAPEKAVLIEMPELPVRHWRLSGGGEIAREERLEWLESNALIQHAREEGLWSTRSDRLALKDSWYRLEEHSAQRTPEQNQFNEKQFKSGKVNVLNCSTTMEMGVDIGGMSLVAMNNVPPAPANYLQRAGRAGRRGESASAAITLCKNTAHGMEVFKDPLWAFNTTASAPRVRFGSSSIVQRHVNALVLGLFLRAEVPDATKLSCKWFFEGDESQCLRFLHWLNNQADQLADKLKRLTQGTVLMSLTATQLLTRTQAMMQQVDIRWRSQLAILLENIEALKADNSAWEETPAGKAIAYQLRDYRGAYLFSKLISEAFLPGHGFPVGVVNFNYLTADELEKRRAIKATQADPNEGGESFSRRIEKLPSRDLPTALREYAPGADVVLGGKVYRSSGIMLGKVLASGQELSGDHHIPWFWHCRKCGAGATSTTRPVECSHCKADIQQLDVKRYLQPVGFATDIRYQAHNDVSMPAQLPWKDPRVLVPSSVWVSLPDAGLGRYRFSHSGELFHFSEGEFGHGYAICLSCGRAESQNQPQRTPENLKNPERENTHYLLRGGSNDRLGSNKLCHGHVHKDLWLGYSSRTDMVELQLNDDNGLLIRDEVAARSLAVALREGLAHKLGIENTELGVTTQQARDINGYTGYSIFIYDNNAGGAGYAVQLIDHWADVFNYARKLLDCSCDKFCHHCLLSYDSQHYVNRLDRHHALTLLTNVRLQRLNLAPEYQYFGDGSRVETNPLSLRIAQCLNSEIYDSCSLVLAGPQEQWDFAQWPLFKELLQFASSGGNVELLVATPLANLTDSSRHQLSALAAMPGGRLQVKSIATAQLMQGKGRWLAQVTREGQSQQWAADDSATVAPGELWGQSASSPVVTLKGTSGKTFSGQTLSAEDLLPALPTGAVRINLCEQLDGPLEGFGSRFWSLVTQQHAGWKQAFTRHKEITHVEYSDRYLNSPFTARLLGEILTELVEQGMAERASLTVCVKKLDYNSRQHDALYNAWLNEEDRQQVVTTLLEEGYLGPAWPGAISWLTGDNQSTEHGRELTVTFSDGSQHYVLLDMGLSYWRCIEDTFFDFALRVPQQVERLANTRARAVASGNDLRSYVIAG

SEQ ID NO: 25420 - protein, 1119 aa, Escherichia coli 1-110-08_S3_C2; identical to SEQ ID NO: 25418

SEQ ID NO: 25421 - protein, 2104 aa, Escherichia coli 1-110-08_S3_C3; identical to SEQ ID NO: 25419

SEQ ID NO: 25422 - protein, 1119 aa, Escherichia coli 1-110-08_S3_C3; identical to SEQ ID NO: 25418

SEQ ID NO: 25423 - protein, 2090 aa, Escherichia coli 113290; identical to SEQ ID NO: 25375

SEQ ID NO: 25424 - protein, 1112 aa, Escherichia coli 113290
MLWGFVFVSFISKELALGQSEYISWVKCTSWLSNFVNLRGLRQPDGRPLYEYHATNDEYTQLTQLLRAVGQSQSNICNRDFAACFVLFCSEWYRRDYERQCGWTWDPIYKKIGISFTATELGTIVPKGMEDYWLRPIRFYESERRNFLGTLFSEGGLPFRLLKESDSRFLAVFSRILGQYEQAKQSGFSALSLARAVIEKSALPTVFSEDTSVELISHMADNLNSLVLTHNLINHKEPVQQLEKVHPTWRSEFPIPLDDETGTHFLNGLLCAASVEAKPRLQKNKSTRCQFYWSEKHPDELRVIVSLPDEVSFPVTSEPSTTRFELAICEDGEEVSGLGPAYASLENRQATVRLRKSEVRFGRQNPSAGLSLVARAGGMIVGSIKLDDSEIAIGEVPLTFIVDADQWLLQGQASCSVRSSDVLIVLPRDNSNVAGFDGQSRAVNVLGLKALPVKGCQDVTVTANETYRIRTGREQISIGRFALNGKRASWVCHPDETFIGVPKVISTLPDIQSIDVTRYLSGISIEQCHIQEMLGAQYLSIRNSKNETLLRRKIGILPADFSIEIKGGIHANEGTIVITTQHPCVAKLKDKTLEATRKRTEGRTEIQLKAEGVPPAFITLQVLPNLAADPIDIELPFPAKGCLALDVNGRPLDKNITLHDLLGSRAFLFSRNGEPTRYTLQLHLRSVSGLQAWHEWCYTALSDRPVELNLYSLREHIENLISLEAGIDQVVEMRITGAGVVMAWQIRRYKYSLRYDYEKELLLSQSVNHRAGQIPSPVIMLLSEPERKSIPLASRMSEGVPVGEYELSSIVNKNGPWLVVPKPGEEMAFRPCFIRGESSLPVEESNIRSLQKATQLFNPQAEVNTITLVLGQMANDPAHSGWQFMRSLYDQFGYLPLATFEVWRALVQHPQALAMSLFKFEMSAEYLSRIENEFPILWEFFPIFEIKAASERFKLFLSQKGAPEETQKLLVTNMFQRLGLVFPTYADEIEKWLSNGHLPPSIPESFVHVWYQELLREHSEAQWPEYGSKRLHSWMASQKNPVIGINPDANHRYSVALLPVFAAAVASGNASFESVFDRKTGAVFFLRQVRDFDSRWFKAIFQCSLLRYVAKK

SEQ ID NO: 25425 - protein, 2104 aa, Escherichia coli 1-250-04_S3_C1
MDVQQLHYAPLLNQLHQRAVRSVVSQLALRSKSLTHYLESQYFQPPGQEGSLLADPVFESTFGWMPADETMEDLRDKLISSPLVDALSKAPVPFRHQLTAWRTILEDKKSLLVSSGTGSGKTECFMVPVLEDLIRQQKSPRQSLTGTQAIFLYPLNALINSQQERLREWTRGFKGKIRFALYNGETRHTKYEIQEDQLKVPEQALSREAIYEAPPSIMVTNTTMLEYMLIRRKDAPIIEKSQGMLKYIVLDEAHSYIGSQAAELALLLRRVMQAFNVGPGTDKPVQIIATSATIGEDSPEGNKELAKFVADLAGVTERDVKVVRGYRQIPRVSESLIRHEYPTSLTSLKSLSPQDLYQQLCHYRVAQQLRQALTHPGRQAVRLSELLNVARRTWPDINHRELLQLLDLMARSREGELAFTPLRMHGFIRTLAGLWACSNKQCSHKAHELNQSDWPFGQVWFEQRQYCDCGAPVFEVLRCSGCGSAYLSAKEEMRGDGTNWLVAQPAAAEVDEFALDVDVYSEDEDNDELDNNSQFDRLIASDGEKYIISLEETTAGKIDSEAQKHYEINLLRPESRGEGRNNSFACVCCGDTQRKNNPLFRPLRLGAPFFLNEIIPTLLEFSPLPQTREEQLGPFNGRRLLTFTDSRQGTARISARLQQDADKATLRALCYQELANITEPSAKLSPAHCALLEKVISQFSVLPLKNSIDALKKAMAANEELSPTDIQALKIIEPMVSSLSPDHAEAMQILQANSGNQQKKTMSWQTLSEQLVGSVDLADRMRGSFKELSGLDLTKQQFADFCLYSEFGRRPKNAWTLESLGLVAIHYPFIDKVTTCPQDWKTLLPDPDKQLAEWRNLLKITLDFFIRENSAVFYENEQYPRWMGARFPVKMLQGPDKKNKGQKRDQLWPQIRDRHYNRVIKLLIAVFPAIQPEQAHWKSLVNHLMIEVWDAIRPCLRQFESGYQLDIKQQAEFYSPKQVWRCPYTRRALDVTLLGYSPYLPGSKEIAPEKAVLIEMPELPVRHWRLSGGGEIAREERLEWLESNALIQHAREEGLWSTRSDRLALKDSWYRLEEHSAQRTPEQNQFNEKQFKSGKVNVLNCSTTMEMGVDIGGMSLVAMNNVPPAPANYLQRAGRAGRRGESASAAITLCKNTAHGMEVFKDPLWAFNTTASAPRVRFGSSSIVQRHVNALVLGLFLRAEVPDATKLSCKWFFEGDESQCFRFLHWLNHQADQLADKLKRLTQGTVLMSLTATQLLTRTQAMMQQVDIRWRSQLAILLENIEALKADNSAWEETPAGKAIAYQLRDYRGAYLFSKLISEAFLPGHGFPVGVVNFNYLTADELEKRRAIKATQADPNEGGESFSRRIEKLPSRDLPTALREYAPGADVVLGGKVYRSSGIMLGKVLASGQELSGDHHIPWFWHCRKCGAGATSTTRPVECSHCKADIQQLDVKRYLQPVGFATDIRYQAHNDVSMPAQLPWKDPRVLVPSSVWVSLPDAGLGRYRFSHSGELFHFSEGEFGHGYAICLSCGRAESQTQPQRTPENLKNQERENTHYLLRGGSNDRQGSSKLCHGHVHKDLWLGYSSRTDMVELQLNDDNGLLIRDEVAARSLAVALREGLAHKLGIENTELGVTTQQARDINGYTGFSIFIYDNNAGGAGYAVQLIDHWADVFNYARKLLDCSCDKFCHHCLLSYDSQHYVNRLDRHHALTLLTNVRLQRLNLAPEYQYFGEGSRVETNPLSLRIAQCLNSEIYDSCSLVLAGPQEQWDFAQWLLFKELIQFASSGGNVELLVATPLENLTDSSRHQLSALAAMPGGRLQVKSLATAQLMQGKGRWLAQVTREGQSRQWAADDSATVAPGELWGQSASSPVVTLKGTSRKIFSGQILSAEDLLPALPAGTVRINLCEQLDGPLEGFGSRFWSLVTQQHAGWKQAFTLHKEITHVEYSDRYLNSPFTARLLGEILTELVEQGMAERASLTVCVKKLDYNSRQHDSLYNAWLNEEDRQQVVTTLLEEGYLGPAWPGAISWLTGDNQSTEHGRELTVTFSDGSQHYVLLDMGLSYWRCIEDTFFDFALRVPQQVERLANTRARAVAPGNDLRSYIIAG

SEQ ID NO: 25426 - protein, 1119 aa, Escherichia coli 1-250-04_S3_C1
MLVKTPVNPLLQWLNMFFSRRSLSGADGRALYAYRCTDTEYESLAELLRTYAPRSYPRTIFISYSDVLFSIYAAEFIRRTHTVGHPKWDTILDSINWKVPYVHRQKLVNDGIRYWKRKIRNLGQASGYLHTLACEGGLPIRMIENESGYLITYFRRIYQALRGQSSQYPAAKIAQELGDTIPVTMQNELVYEIAGEFCETLCRLLSEHPPHSSDPVSALRKLSPDWHLQLPLVLPEANAAEIVRRLLSQSSEIRSASSLQVERIWVDVDDSWYCDARFRFPATMRTEQLTSLFECHIQPEQTRLIISGKWKNGGARVAMLSRYEQQDWRGELLPIAMQKLSGADAMAEISLSLHEGPILLGHTIPKGGYELTEELPWVFEAMNESESQLKLVGMGSVSSRLNALFISLPKNSHLDISGEGEFDIPRLLKNSERSLTKISGVFSVVLHDGAVCTIRTQQLYDSAIEYYIKSTEVELVKSDYPVHRAWPKIGWKKDLQYGIVPEKELFWRSIRSGNNAWYSVASEMPKGQIEVRRIVNDEVLFSGKVVVLPADFDINIIPESAQQGIIMLSGITDTRIDKYSNNEKVTLKSDYSQNECAIYYNSSLMLENTVDLRVSWKDGSNLKLLLPKPVSGGRFVTNDGSVHFDGVASIAHLHGIDAELLTISCAGRGYLNIELLDENPVAEKFRYLHADLPLLSGRNDKLQQISLYENYNLLNAMLACAWNSNSTLCVDFYSDRFGKDKATLNIKRYDGSFIEHDQGLLVDIKNSVVFPANRIDELVVDAISLKNPGLHISLLKKDEFAYDLSALNVQDSPWLIVGKLDGTARIAPVIKWMLPVLQTNDLLLNALCEADPEQRKKNFNELIFEIDNNPLQNYCCLLTEYIKKYKMNNGLSLLDLDLFRCISSNYRVVVQLLISSCLSGDSDTIYDIQEELPFSWGWIPVSIWKDVFQKCWTYLEKQINDKTLALHILQPFIAFMNHRAHIDRRLAPIANMLLTYSESLPTGCDVLPTVSREQFNEAKQMLLRNPDSFGRISIFPKELWSSAITPELKSVFNKLWIEDKYHSRLEKRFNLMLVAALLTQKDNNLIHQLSALFEFHYQQAPQQLGVIYQYYFEQAGVCH

SEQ ID NO: 25427 - protein, 2104 aa, Escherichia coli 1-250-04_S3_C2
MDVQQLHYAPLLNQLHQRAVRSVVSQLALRSKSLTHYLESQYFQPPGQEGSLLADPVFESTFGWMPADETMEDLRDKLISSPLVDALSKAPVPFRHQLTAWRTILEDKKSLLVSSGTGSGKTECFMVPVLEDLIRQQKSTRQSLTGTQAIFLYPLNALINSQQERLREWTRGFKGKIRFALYNGETRHTKYEIQEDQLKVPEQALSREAIYEAPPSIMVTNTTMLEYMLIRRKDAPIIEKSQGMLKYIVLDEAHSYIGSQAAELALLLRRVMQAFNVGPGTDKPVQIIATSATIGEDSPEGNKELAKFVADLAGVTERDVKVVRGYRQIPRVSESLIRHEYPTSLTSLKSLSPQDLYQQLCHYRVAQQLRQALTHPGRQAVRLSELLNVARRTWPDINHRELLQLLDLMARSREGELAFTPLRMHGFIRTLAGLWACSNKQCSHKAHELNQSDWPFGQVWFEQRQYCDCGAPVFEVLRCSGCGSAYLSAKEEMRGDGTNWLVAQPAAAEVDEFALDVDVYSEDEDNDELDNNSQFDRLIASDGEKYIISLEETTAGKIDSEAQKHYEINLLRPESRGEGRNNSFACVCCGDTQRKNNPLFRPLRLGAPFFLNEIIPTLLEFSPLPQTREEQLGPFNGRRLLTFTDSRQGTARISARLQQDADKATLRALCYQELANITEPSAKLSPAHCALLEKVISQFSVLPLKNSIDALKKAMAANEELSPTDIQALKIIEPMVSSLSPDHAEAMQILQANSGNQQKKTMSWQTLSEQLVGSVDLADRMRGSFKELSGLDLTKQQFADFCLYSEFGRRPKNAWTLESLGLVAIHYPFIDKVTTCPQDWKTLLPDPDKQLAEWRNLLKITLDFFIRENSAVFYENEQYPRWMGARFPVKMLQGPDKKNKGQKRDQLWPQIRDRHYNRVIKLLIAVFPAIQPEQAHWKSLVNHLMIEVWDAIRPCLRQFESGYQLDIKQQAEFYSPKQVWRCPYTRRALDVTLLGYSPYLPGSKEIAPEKAVLIEMPELPVRHWRLSGGGEIAREERLEWLESNALIQHAREEGLWSTRSDRLALKDSWYRLEEHSAQRTPEQNQFNEKQFKSGKVNVLNCSTTMEMGVDIGGMSLVAMNNVPPAPANYLQRAGRAGRRGESASAAITLCKNTAHGMEVFKDPLWAFNTTASAPRVRFGSSSIVQRHVNALVLGLFLRAEVPDATKLSCKWFFEGDESQCFRFLHWLNHQADQLADKLKRLTQGTVLMSLTATQLLTRTQAMMQQVDIRWRSQLAILLENIEALKADNSAWEETPAGKAIAYQLRDYRGAYLFSKLISEAFLPGHGFPVGVVNFNYLTADELEKRRAIKATQADPNEGGESFSRRIEKLPSRDLPTALREYAPGADVVLGGKVYRSSGIMLGKVLASGQELSGDHHIPWFWHCRKCGAGATSTTRPVECSHCKADIQQLDVKRYLQPVGFATDIRYQAHNDVSMPAQLPWKDPRVLVPSSVWVSLPDAGLGRYRFSHSGELFHFSEGEFGHGYAICLSCGRAESQTQPQRTPENLKNQERENTHYLLRGGSNDRQGSSKLCHGHVHKDLWLGYSSRTDMVELQLNDDNGLLIRDEVAARSLAVALREGLAHKLGIENTELGVTTQQARDINGYTGFSIFIYDNNAGGAGYAVQLIDHWADVFNYARKLLDCSCDKFCHHCLLSYDSQHYVNRLDRHHALTLLTNVRLQRLNLAPEYQYFGEGSRVETNPLSLRIAQCLNSEIYDSCSLVLAGPQEQWDFAQWLLFKELIQFASSGGNVELLVATPLENLTDSSRHQLSALAAMPGGRLQVKSLATAQLMQGKGRWLAQVTREGQSRQWAADDSATVAPGELWGQSASSPVVTLKGTSRKIFSGQILSAEDLLPALPAGTVRINLCEQLDGPLEGFGSRFWSLVTQQHAGWKQAFTLHKEITHVEYSDRYLNSPFTARLLGEILTELVEQGMAERASLTVCVKKLDYNSRQHDSLYNAWLNEEDRQQVVTTLLEEGYLGPAWPGAISWLTGDNQSTEHGRELTVTFSDGSQHYVLLDMGLSYWRCIEDTFFDFALRVPQQVERLANTRARAVAPGNDLRSYIIAG

SEQ ID NO: 25428 - protein, 1119 aa, Escherichia coli 1-250-04_S3_C2
MLVKTPVNPLLQWLNMFFSRRSLSGADGRALYAYRCTDTEYESLAELLRTYAPRSYPRTIFISYSDVLFSIYAAEFIRRTHTVGHPKWDTILDSINWKVPYVHRQKLVNDGIRYWKRKIRNLGQASGYLHTLACEGGLPIRMIENESGYLITYFRRIYQALRGQSSQYPAAKIAQELGDTIPVTMQNELVYEIAGEFCETLCRLLSEHPPHSSDPVSALRKLSPDWHLQLPLVLPEANAAEIVRRLLSQSSEIRSASSLQVERIWVDVDDSWYCDARFRFPATMRTEQLTSLFECHIQPEQTRLIISGKWKNGGARLAMLSRYEQQDWRGELLPIAMQKLSGADAMAEISLSLHEGPILLGHTIPKGGYELTEELPWVFEAMNESESQLKLVGMGSVSSRLNALFISLPKNSHLDISGEGEFDIPRLLKNSERSLTKISGVFSVVLHDGAVCTIRTQQLYDSAIEYYIKSTEVELVKSDYPVHRAWPKIGWKKDLQYGIVPEKELFWRSIRSGNNAWYSVASEMPKGQIEVRRIVNDEVLFSGKVVVLPADFDINIIPESAQQGIIMLSGITDTRIDKYSNNEKVTLKSDYSQNECAIYYNSSLMLENTVDLRVSWKDGSNLKLLLPKPVSGGRFVTNDGSVHFDGVASIAHLHGIDAELLTISCAGRGYLNIELLDENPVAEKFRYLHADLPLLSGRNDKLQQISLYENYNLLNAMLACAWNSNSTLCVDFYSDRFGKDKATLNIKRYDGSFIEHDQGLLVDIKNSVVFPANRIDELVVDAISLKNPGLHISLLKKDEFAYDLSALNVQDSPWLIVGKLDGTARIAPVIKWMLPVLQTNDLLLNALCEADPEQRKKNFNELIFEIDNNPLQNYCCLLTEYIKKYKMNNGLSLLDLDLFRCISSNYRVVVQLLISSCLSGDSDTIYDIQEELPFSWGWIPVSIWKDVFQKCWTYLEKQINDKTLALHILQPFIAFMNHRAHIDRRLAPIANMLLTYSESLPTGCDVLPTVSREQFNEAKQMLLRNPDSFGRISIFPKELWSSAITPELKSVFNKLWIEDKYHSRLEKRFNLMLVAALLTQKDNNLIHQLSALFEFHYQQAPQQLGVIYQYYFEQAGVCH

SEQ ID NO: 25429 - protein, 2104 aa, Escherichia coli 2-005-03_S3_C2
MDVQQLHYAPLLNQLHQRAVRSVVSQLALRSKSLTHYLESQYFQPPGQEGSLLADPVFESTFGWMPADETMEDLRDKLISSPLVDALSKAPVPFRHQLTAWRTILEDKKSLLVSSGTGSGKTECFMVPVLEDLIRQQKSTRQSLTGTQAIFLYPLNALINSQQERLREWTRGFKGKIRFALYNGETRHTKYEVQEDQLKVPEQALSREAIYEAPPSIMVTNTTMLEYMLIRRKDAPIIEKSQGILKYIVLDEAHSYIGSQAAELALLLRRVMQAFNVGPGTDKPVQIIATSATIGEDSPEGNKELAKFVADLAGVTERDVKVVRGYRQIPRVSESLIRHEYPTSLTSLKSLSPQDLYQQLCHYRVAQQLRQALTHPGRQAVRLSELLNVARRTWPDINHRELLQLLDLMARSREGELAFTPLRMHGFIRTLAGLWACSNKQCLHKAHELNQSDWPFGQVWFEQRQYCDCGAPVFEVLRCSGCGSAYLSAKEEVRGDGTNWLVAHPAAAEVDEFALDVDVYSEDEDNDELDNNSQFDRLIAIDGEKYIISLEETTAGKIDSEAQKHYEINLLRPESRGEGRNNSFACVCCGDTQRKNNPLFRPLRLGAPFFLNEIIPTLLEFSPLPQTREEQLGPFNGRRLLTFTDSRQGTARISARLQQDADKATLRALCYQELANINEPSAKLSPAHCALLESFITQFSILPLKNSIDALKKAMVANEELSPADIQALKIIEPMVSSLSPDHAEAMQILQANSGNQQKKTMSWQTLSEQLVGSVDLADRMRGSFKELSGLDLTKQQFADFCLYSEFGRRPKNAWTLESMGLVAIHYPFIDKVTTCPQDWKTLLPDPDKQLAEWRNLLKITLDFFIRENSAVFYENEQYPRWMGARFPVKMLQGPDKKNKGQKRDQLWPQIRDRHYNRVIKLLIAVFPAIQPEQAHWKSLVNHLMIEVWDAIRPCLRQFESGYQLDIKQQAEFYSPKQVWRCPYTRRALDVTLLGYSPYLPGSKEIAPEKAVLIEMPELPVRHWRLSGGGEIAREERLEWLESNALIQHAREEGLWSTRSDRLALKDSWYRLEEHSAQRTPEQNQFNEKQFKSGKVNVLNCSTTMEMGVDIGGMSLVAMNNVPPAPANYLQRAGRAGRRGESASAAITLCKNTAHGMEVFKDPLWAFNTTASAPRVRFGSSSIVQRHVNALVLGLFLRAEVPDATKLSCKWFFEGDESQCLRFLHWLNNQADQLADKLKRLTQGTVLMSLTATQLLTRTQAMMQQVDIRWRSQLAILLENIEALKADNSAWEETPAGKAIAYQLRDYRGAYLFSKLISEAFLPGHGFPVGVVNFNYLTADELEKRRAIKATQADPNEGGESFSRRIEKLPSRDLPTALREYAPGADVVLGGKVYRSSGIMLGKVLASGQELSGDHHIPWFWHCRKCGAGATSTTRPVECSHCKADIQQLDVKRYLQPVGFATDIRYQAHNDVSMPAQLPWKDPRVLVPSSVWVSLPDAGLGRYRFSHSGELFHFSEGEFGHGYAICLSCGRAESQNQPQRTPENLKNPERENTHYLLRGGSNDRLGSNKLCHGHVHKDLWLGYSSRTDMVELQLNDDNGLLIRDEVAARSLAVALREGLAHKLGIENTELGVTTQQARDINGYTGYSIFIYDNNAGGAGYAVQLIDHWADVFNYARKLLDCSCDKFCHHCLLSYDSQHYVNRLDRHHALTLLTNVRLQRLNLAPEYQYFGDGSRVETNPLSLRIAQCLNSEIYDSCSLVLAGPQEQWDFAQWPLFKELLQFASSGGNVELLVATPLANLTDSSRHQLSALAAMPGGRLQVKSIATAQLMQGKGRWLAQVTREGQSQQWAADDSATVAPGELWGQSASSPVVTLKGTSGKTFSGQTLSAEDLLPALPTGAVRINLCEQLDGPLEGFGSRFWSLVTQQHAGWKQAFPRHKEITHVEYSDRYLNSPFTARLLGEILTELVEQGMAERASLTVCVKKLDYNSRQHDALYNAWLNEEDRQQVVTTLLEEGYLGPAWPGAISWLTGDNQSTEHGRELTVTFSDGSQHYVLLDMGLSYWRCIEDTFFDFALRVPQQVERLANTRARAVASGNDLRSYVIAG

SEQ ID NO: 25430 - protein, 1119 aa, Escherichia coli 2-005-03_S3_C2
MLVKTPVNPLLQWLNMFFSRRSLSGADGRALYAYRCTDTEYESLAELLRTYAPRSYPRTIFISYSDVLFSIYAAEFIRRTHTVGHPKWDTILDSIDWKVPYVHRQKLVNDGIRYWKRKIRNLGQASGYLHTLACEGGLPIRMIENESGYLITYFRRIYQALRGQASQYPAAKIAQELGDTIPVTMQNELVYEIAGEFCETLCRLLSEHPPQSSDPVSALRKLSPDWHLQLPLVLPEANAAEIVRRLLSQSSEIRSASSLQVERIWVDVDDSWYCDARFRFPATMRTEQLTSLFECNIQPEQTRLIISGKWRNGGGRVAMLSRYEQQDWRVELLPIAMQKLSGADAMAEISLSLHEGPILLGHTIPKGGYELTEELPWVFEAMNESESQLKLVGMGSVSSRLNALFISLPKNSHLDISGEGEFDIPRLLKNSERSLTKISGVFSVVLHDGAVCTIRTQQLYDSAIEYYIKSTEVELVKSDYPVHRAWPKIGWKKDLQYGIVPEKELFWRSIRSGNNAWHSVASEMPKGQIEVRRIVNDEVLFSGKVVVLPADFDINIIPESVQQGIIMLSGITDTRIDKYSNNEKVTLKSDYSQNECAIYYNSSEMLENTVDLRVSWKDGSNLKLLLPKPVSGGRFVTHDGSVHFDGVASIAHLHGIDAELLTISCAGRGYLNIELLDENPVAEKFRYLHADLPLLSGCNDKLKQISLYENYNLLNAMLACAWNSNSTLCVDFYSDRFGKDKATLSIKRYDGSFIEHDQGLLVDIKNSVVFPANRIDELVVDAISLKDPGLHISLLKKDEFAYDLSALNVQDSPWLIVGKLDGTARIAPVIKWGLPVLQTNDLLLNALCEADSEQRKKYFNELIFEIDNNPLQNYCCLLTEYIKKYKMNNGLSLLDLDLFRGISSNYRVVVQLLISSCLSGDSDTIYDIQDELPFSWGWIPVSIWKDVFQKCWAYLEKQINDKTLALHILQPFIAFMNHRAHIDRRLAPIANMLLTYSELLPAGCNVLPTVSREQFNEAKQMLLRNPDSFGRISIFPKELWSSAITPELKSVFNKLWIEDKYHSRLEKRFNLMLVAALLTQKDNNLIYQLSALFEFHYQQAPQQLGVIYQYYFEQAGVCH

SEQ ID NO: 25431 - protein, 2114 aa, Escherichia coli 2-011-08_S1_C3
MTTRYFSSLIEQSLSRSTEATLSIMGVTNPQLREHLAQQMGADCGKPGSFLASPVFQQMFGWKESNHTMRSLTEGNALLSKAVVDSLDNQSNGRYRFGADWKPFTHQLASWKALLEKKHSVVVTSGTGSGKTECFMVPVLEDLYRELHENGNNPLVGVRALFLYPLNALINSQRERLDAWTRGFGTGIRYCLYNGNTENLHASVKSEQAKRPNEVLSREKMREEPAPILVTNGTMLEYMMVRQVDAPIIQQSKAQKSLRWIVLDEAHTYVGSQAAELALQLRRVMTAFGVTPDDVRFVATSATIAGSDAEKQLKKFLSELSGIPQERIDVLDGSRVIPELEPSKNVSAPLDEIEQIPDLDLKDKNDNKIKGISPERFYALTHSPEARYIREMLVKHPNPMKLDEMTDRLNVLTKQHYSQQEVLRWIDVCSGTQPNAKDPAFLKVRAHIFQRNTQGIWACVDKDCRLKHGTPLEKGWPFGYVYVNQRQNCDCGSPVYEVAFCNDCNEPHLLARDKKGKLVQWENKGGDEFSLQDEVPVEHDATEEKVEKENSFQPPLIIAAGETSEAGYTLQRLDRQTRRIGVINNDSIPLIINDVEQVCSASGCGYRGMSGKQPFRRALLGGPFYVTNIVPTVLEYCQDFTSDEGKEGVGPDSLPGRGRRLITFTDSRQGTARMAVRMQQEAERSRLRGSVVEILSWHQRTQTSTAPNANADLEKLAARAKQAREQAEEYRSWGMPDQAKLSQAQAEQLEQAYQFAIGGKAATTLVSRTWTEMVNELKDKADIRGPVLKYNYYLKPEVFNENGGPLKLSEMLLFREFMRRPKRTNSLETQGLVQVGYLGLEKIHKLPMHWQERELTLDDWRDFLKVTLDHYVRESNFTQLDDELKNWIGSRFSSKFVRNPESKDPEDNQNRRWPQIRNGNVSHRLAKLLMLGAGFKTVNTATIDIINTWLKEAWAQLTGPLAVLKPDGNRFYLPKEHMTFSLITDAWICPVTNKILDTAFKGLTPYLPTHISFEHLTQAQYDTFVAQKVTMPEIWKLDRSQEDYAEGLAKARDWVSNDPLIAQLRSENVWTDINDRVVEGGFYYRTAEHSAQQSSERLQSYEKMFKNGQLNVLNCSTTMEMGVDIGGITAVVMNNVPPHPANYLQRAGRAGRSKESRAISYTLCKGNPHDQQVFANPLWPFETMIPAPMVAMNSARLVQRHVNALLLSDFLCNVIGETDKEKTSLDSLWFFGEDDGQSKCERFKVWLERPVLDIDTALERLVKGTALHGARAEHLRDKTINAITFLQQRWLSVYRDLVTQERESQPQTPYRKRIELEKKRHCGEYLLRDLAARTFLPGYGFPTDVVTFDNFTMEDYIREKSQKSRDKKDREDNVSRYKGLPSRNLGVAIREYAPGAEIILDGRVFRSAGVSLHWHNINADTNEAQRLDCAWRCHKCGTIGYEEGMSSSGMLFCSNSACGEKITMDNRRQVLQPAGFVTDAHAPVTNNIETMKFVPVVPAWVFVKAEPVPLPNPLMGYMASGADGHVFQQSLGEGGHGYALCLSCGRAESMLNENDAPKSMEAHYPPRPGKADRDSQNHRLICPGSTALVKKVTLGALARTDVFEMVLRKPQNGEYLPDNTEEGRIVAMTLAVALRQALAGVLGISTAELGYSVRPVRLEDGQSVLAVQLYDVISGGAGFASSAPVHIEAILQGMVKQLGCRHCDTACSECLLDSQTRHDHDLLDRKAALAWLGDDFTYYIGLPDEETFSLPDARYCPGAIGDTIRRAINEGAEKLTLWMTGAPNEWDLYARQFRAAIQSYRLKDNVEVDLVIPAGVDDPDLLHELSQFTALGVRLCHVEQDLQLPIVAQVTFADRVMTLASRSQQATIPGPEWHLNDELVVRSLGYKTVELNEFILPAKAANAVERVKDIQIHKQLNGPLSQFGQRFWDVLFNDHEEAQSLMNNTRITGVHYTDRYLQNPVALALLGSILKPLKTKLTDGVEVALDTLFKDKDRPGNRPFHDWMSIADFQDFADQWFAAALGRPVELTVFDSPRDIPHHRKLTVTFEDGQVLKIRFDQGMGYWRINFASKWHYFDFSDDVSFQLVKMAQACQEGNVANSEDSWATDVLVEVIAS

SEQ ID NO: 25432 - protein, 810 aa, Escherichia coli 2-011-08_S1_C3
MIVSLPDEVSFPVTSEPSTTRFELAICEDGEEVSGLGPAYASLENRQATVRLRKSEVRFVRQNPSAGLSLVARAGGMIVGSIKLDDSEIAIGEVPLTFIVDADQWLLQGQASCSVRSSDVLIVLPRDNSNVAGFDGQSSAVNVLGLKALPVKGYQDVTVTANETYRIRTGREQISIGRFALNGKRASWVCHPDETFIGVPKVISTLPDIQSIDVTRYLSGISIEQCHIQEMLGAQYLSIRNSNNETLLRRKIGILPADFSIEIKGGMHANEGTIVITTQHPCVATLKDKTLEATRKRTEGRTEIQLKAEGVPPAFITLQVLPNLAADPIDIELPFPAKGCLALDVNGRPLDKNITLHDLLGSRAFLYSRNGEPTKYTLQLYLRSVSGLQAWHEWCYTALSDRPVELNLYSLREHIENLISLEAGIDQVVEMRITGAGVVMAWQIRRYKYSLRYDYEKELLLSQSVNHRAGQIPSPVIMLLSEPERKSIPLASRMSEGVPVGEYELSSIVNKNGPWLVVPKPGEEMAFRPCFIRGESSLPVEESNIRSLQKATQLFNPQAEVNTITRVLGQMANDPAHSGWQFMRSLYDQFGYLPLATFEVWRALVQHPQALAMSLFKFEMSAEYLSRIENEFPILWEFFPIFEIKAASERFKLFLSQKGAPEETQKLLVTNMFQRLGLVFPTYADEIEKWLSNGYLPPSIPESFVHVWYQELLREHSEARWPEYGCKRLYKWMMSQKNPVIGINPDANHRYSVAWLPVFAAAVASGNASFESVFDRKPGAVFFLRQVRDFDSRWFKAIFQCSLLRYVAKK

SEQ ID NO: 25433 - protein, 2114 aa, Escherichia coli 2-052-05_S3_C1; identical to SEQ ID NO: 25223

SEQ ID NO: 25434 - protein, 1096 aa, Escherichia coli 2-052-05_S3_C1
MGQSEYISWVKCTSWLSNFVNLRGLRQPDGRPLYEYHATNDEYTQLTQLLRAVGQSQSNICNRDFAACFVLFCSEWYRRDYERQCGWTWDPIYKKIGISFTATELGTIVPKGMEDYWLRPIRFYESERRNFLGTLFSEGGLPFRLLKESDSRFLAVFSRILGQYEQAKQSGFSALSLARAVIEKSALPTVFSEDTSVELISHMADNLNSLVLTHNLINHKEPVQQLDKVHPTWRSEFPIPLDDETGTHFLNGLLCAASVEAKPRLQKNKSTRCQFYWSEKHPDELRAIVSLPDEVSFPVTSEPSTTRFELAICEDGEEVSGLGPAYASLENRQATVRLRKSEVRFGRQNPSAGLSLVARAGGVIVGGIKLDDSEIAIGEVPLTFVVDADQWLLQGQASCSVRSSDVLIVLPRDNSNVAGFDGQSSAVNVLGLKALPVKGCQDVTVTANETYRIRTGREQISIGRFALNGKRASWVCHPDETFIGVPKVISTLTDIQSIDVTRYLSGISIEQCHIQEMLGAQYLSIRNSNNETLLRRKIGILPVDFSVEIKGGERANEGSIVITTQHPCVAKLKDKTLEATRKRTEGRTEIQLKAEGVPPAFITLQVLPNLAADPIDIELPFPAKGCLALDVNGRPLDKNITLHDLLGSRAFLFSRNGEPTRYTLQLHLRSVSGLQAWHEWCYTALSDRPVELNLYSLREHIENLISLEAGIDQVVEMRITGAGVVMAWQIRRYKYSLRYDYEKELLLSQSVNHRAGQIPSPVIMLLSEPERKSIPLASRMSEGVPVGEYELSSIVNKNGPWLVVPKPGEEMAFRPCFIRGESSLPVEESNIRSLQKATQLFNPQAEVNTITLVLGQMANDPAHSGWQFMRSLYDQFGYLPLATFEVWRALVQHPQALAMSLFKFEMSAEYLSRIENEFPILWEFFPIFEIKAASERFKLFLSQKGAPEETQKLLVTNMFQRLGLVFPTYADEIEKWLSNGYLPPSIPESCVHGWYQELLREHSEARWPEYGCKRLYKWMMSQKNPVIGINPDADYRYSVAWLPVFAAAVASGNTSFEAVFDRKPGAVFFLRQVRDFDSRWFKTIFQCSLLRYVAKK

SEQ ID NO: 25435 - protein, 2114 aa, Escherichia coli 2-052-05_S3_C2; identical to SEQ ID NO: 25223

SEQ ID NO: 25436 - protein, 1096 aa, Escherichia coli 2-052-05_S3_C2
MGQSEYISWVKCTSWLSNFVNLRGLRQPDGRPLYEYHATNDEYTQLTQLLRAVGQSQSNICNRDFAACFVLFCSEWYRRDYERQCGWTWDPIYKKIGISFTATELGTIVPKGMEDYWLRPIRFYESERRNFLGTLFSEGGLPFRLLKESDSRFLAVFSRILGQYEQAKQSGFSALSLARAVIEKSALPTVFSEDTSVELISHMADNLNSLVLTHNLINHKEPVQQLDKVHPTWRSEFPIPLDDETGTHFLNGLLCAASVEAKPRLQKNKSTRCQFYWSEKHPDELRAIVSLPDEVSFPVTSEPSTTRFELAICEDGEEVSGLGPAYASLENRQATVRLRKSEVRFGRQNPSAGLSLVARAGGVIVGSIKLDDSEIAIGEVPLTFVVDADQWLLQGQASCSVRSSDVLIVLPRDNSNVAGFDGQSSAVNVLGLKALPVKGCQDVTVTANETYRIRTGREQISIGRFALNGKRASWVCHPDETFIGVPKVISTLTDIQSIDVTRYLSGISIEQCHIQEMLGAQYLSIRNSNNETLLRRKIGILPVDFSVEIKGGERANEGSIVITTQHPCVAKLKDKTLEATRKRTEGRTEIQLKAEGVPPAFITLQVLPNLAADPIDIELPFPAKGCLALDVNGRPLDKNITLHDLLGSRAFLFSRNGEPTRYTLQLHLRSVSGLQAWHEWCYTALSDRPVELNLYSLREHIENLISLEAGIDQVVEMRITGAGVVMAWQIRRYKYSLRYDYEKELLLSQSVNHRAGQIPSPVIMLLSEPERKSIPLASRMSEGVPVGEYELSSIVNKNGPWLVVPKPGEEMAFRPCFIRGESSLPVEESNIRSLQKATQLFNPQAEVNTITLVLGQMANDPAHSGWQFMRSLYDQFGYLPLATFEVWRALVQHPQALAMSLFKFEMSAEYLSRIENEFPILWEFFPIFEIKAASERFKLFLSQKGAPEETQKLLVTNMFQRLGLVFPTYADEIEKWLSNGYLPPSIPESCVHGWYQELLREHSEARWPEYGCKRLYKWMMSQKNPVIGINPDADYRYSVAWLPVFAAAVASGNTSFEAVFDRKPGAVFFLRQVRDFDSRWFKTIFQCSLLRYVAKK

SEQ ID NO: 25437 - protein, 2114 aa, Escherichia coli 2-052-05_S3_C3; identical to SEQ ID NO: 25223

SEQ ID NO: 25438 - protein, 1096 aa, Escherichia coli 2-052-05_S3_C3
MGQSEYISWVKCTSWLSNFVNLRGLRQPDGRPLYEYHATNDEYTQLTQLLRAVGQSQSNICNRDFAACFVLFCSEWYRRDYERQCGWTWDPIYKKIGISFTATELGTIVPKGMEDYWLRPIRFYESERRNFLGTLFSEGGLPFRLLKESDSRFLAVFSRILGQYEQAKQSGFSALSLARAVIEKSALPTVFSEDTSVELISHMADNLNSLVLTHNLINHKEPVQQLDKVHPTWRSEFPIPLDDETGTHFLNGLLCAASVEAKPRLQKNKSTRCQFYWSEKHPDELRAIVSLPDEVSFPVTSEPSTTRFELAICEDGEEVSGLGPAYASLENRQATVRLRKSEVRFGRQNPSAGLSLVARAGGMIVGSIKLDDSEIAIGEVPLTFVVDADQWLLQGQASCSVRSSDVLIVLPRDNSNVAGFDGQSSAVNVLGLKALPVKGCQDVTVTANETYRIRTGREQISIGRFALNGKRASWVCHPDETFIGVPKVISTLTDIQSIDVTRYLSGISIEQCHIQEMLGAQYLSIRNSNNETLLRRKIGILPVDFSVEIKGGERANEGSIVITTQHPCVAKLKDKTLEATRKRTEGRTEIQLKAEGVPPAFITLQVLPNLAADPIDIELPFPAKGCLALDVNGRPLDKNITLHDLLGSRAFLFSRNGEPTRYTLQLHLRSVSGLQAWHEWCYTALSDRPVELNLYSLREHIENLISLEAGIDQVVEMRITGAGVVMAWQIRRYKYSLRYDYEKELLLSQSVNHRAGQIPSPVIMLLSEPERKSIPLASRMSEGVPVGEYELSSIVNKNGPWLVVPKPGEEMAFRPCFIRGESSLPVEESNIRSLQKATQLFNPQAEVNTITLVLGQMANDPAHSGWQFMRSLYDQFGYLPLATFEVWRALVQHPQALAMSLFKFEMSAEYLSRIENEFPILWEFFPIFEIKAASERFKLFLSQKGAPEETQKLLVTNMFQRLGLVFPTYADEIEKWLSNGYLPPSIPESCVHGWYQELLREHSEARWPEYGCKRLYKWMMSQKNPVIGINPDADYRYSVAWLPVFAAAVASGNTSFEAVFDRKPGAVFFLRQVRDFDSRWFKTIFQCSLLRYVAKK

SEQ ID NO: 25439 - protein, 2114 aa, Escherichia coli 2-156-04_S3_C2
MTTRYFSSLIEQSLSRSTEATLSIMGVTNPQLREHLAQQMGADCGKPGSFLASPVFQQMFGWKESNHTMRSLTEGNALLSKAVVDSLDDQNNGRYRFGADWRPFTHQLASWKALLEKKHSVVVTSGTGSGKTECFMVPVLEDLYRELHENGNNPLVGVRALFLYPLNALINSQRERLDAWTRGFGTGIRYCLYNGNTENLHASVKSEQAKRPNEVLSREKMREEPAPILVTNGTMLEYMMVRQVDAPIIQQSKAQKSLRWIVLDEAHTYVGSQAAELALQLRRVMTAFGVTPDDVRFVATSATIAGSDAEKQLKKFLSELSGIPQERIDVLDGIRVIPELEPSKNVSVPLDEIEQIPDLDLRDKNDNKFKGISPERFYALTHSPEARYIREMLVKQPNPMKLDEITERLNVLTKQHYSQQEVLRWIDVCSGTQPNAKDPAFLKVRAHIFQRNTQGIWACVDKDCRLKHGTPLDKGWPFGYVYVNQRQNCDCGSPVYEVAFCNDCNEPHLLARDKKGKLVQWENKGGDEFSLQDEVPVEHDATEEKVEKENSFQPPLIIAAGETSEAGYTLQRLDRQTRRIGVINNDSIPLIINDIEQVCSASGCGYRGMSGKQPFRRALLGGPFYVTNIVPTVLEYCQDFTSDEGKEGVGPDSLPGRGRRLITFTDSRQGTARMAVRMQQEAERSRLRGSVVEILSWHQRTQTSTAPNANADLEKLAARAKQAREQAEEYRSWGMPDQAKLSQAQAEQLEQAYQAATGGKAATILVSRTWTEMVNELKERADIRGPVLQYNHYLKPEVFNENGGPLKLSEMLLFREFMRRPKRTNSLETQGLVQVGYQGLEKIHKSPLHWQEKGLTLDDWRDFLKVTLDHYVRESNFTQLDDELKNWIGSRFSSKFVRNPESKDPEDNQNRRWPQIRNGNVSHRLAKLLMLGAGFKTVNAATIDIINTWLKEAWAQLTGPLAVLKPDGNRFYLPKEHMTFSLITDAWICPVTNKILDTAFKGLTPYLPTHISFEHLTLAQYDTFVAQKVTMPEIWKLDRSQEDYAEGLAKARDWVSHDPLIAQLRSENVWTDINDRVVEGGFYYRTAEHSAQQSSERLQSYEKMFKNGQLNVLNCSTTMEMGVDIGGITAVVMNNVPPHPANYLQRAGRAGRSKESRAISYTLCKGNPHDQQVFANPLWPFETMIPAPMVAMNSARLVQRHVNALLLSDFLCNVIGETDKEKTSLDSLWFFGEDDGQSKCERFKIWLERPVLDIDTALERLVKGTALHGARAEYLRDKTINAITFLQQRWLSVYRDLVTQERESQPQTPYRKRIELEKKRHCGEYLLRDLAARTFLPGYGFPTDVVTFDNFTMEDYIREKSQKSRDKKDREDNVSRYKGLPSRNLGVAIREYAPGAEIILDGRVFRSAGVSLHWHNINADTNEAQRLDCAWRCHKCGTIGYEEGMSSSGMLFCSNSACGEKIIMDNRRQVLQPAGFVTDAHAPVTNNIETMKFVPVVPAWVFVKAEPVPLPNPLMGYMASGADGHVFQQSLGEGGHGYALCLSCGRAESMLNENDAPKSMEAHYPPRPGKADRDSQNHRLICPGSTALMKKVTLGALARTDVFEMVLRKPQSGEYLPDNTEEGRIVAMTLAVALRQALAGVLGISAAELGYSVRPVRLEDGQSVLAVQLYDVISGGAGFASSAPVHIEAILQGMVKQLGCRHCETACSECLLDSQTRHDHDLLDRKAALAWLGDDFTYYIGLPDEETFSLPDARYCPGAIGDTIRRVINEGAEKLTLWMTGAPNEWDLYARQFRAAVQNYRLKDNVEVDLVIPVGVDDPNLLHELSQFTALGVRLCHVEQDLQLPIVAQVTFADRVMTLASRSQQATIPGPEWHLNDELVVRSLGYKTVELNEFILPAKAANAVERVKDIQIHKQLNGPLSQFGQRFWDVLFNDHEEAQSLMNNTRITGVHYTDRYLQNPVALALLGSILRPLKTKLTDGAEVTLDTLFKDKDRPGNRPFHDWMSIADFQDFADQWFAAALGRPVELTVFDSPRDIPHHRKLTVTFEDGQVLKIRFDQGMGYWRINFSSQWHYFDFRDDVSFQLVKMDQACQEGNVVNSEESWATDVLVEVIAS

SEQ ID NO: 25440 - protein, 1096 aa, Escherichia coli 2-156-04_S3_C2
MGQSEYISWVKCTSWLSNFVNLRGLRQPDGRPLYEYHATNDEYTQLTQLLRAVGQSQSNICNRDFAACFVLFCSEWYRRDYERQCGWTWDPIYKKIGISFTATELGTIVPKGMEDYWLRPIRFYESERRNFLGTLFSEGGLPFRLLKESDSRFLAVFSRILGQYEQAKQSGFSALSLARAVIEKSALPTVFSEDTSVELISHMADNLNSLVLTHNLINHKEPVQQLDKVHPTWRSEFPIPLDDETGTHFLNGLLCAASVEAKPRLQKNKSMRCQFYWSEKHPDELRAIVSLPDEVSFPVTSEPSTTRFELAICEDGEEVSGLGPAYASLENRQATVRLRKSEVRFVRQNPSAGLSLVARAGGMIVGSIKLDDSEIAIGEVPLTFIVDADQWLLQGQASCSVRSSDVLIVLPRDNSNVAGFDGQSRAVNVLGLKALPVKGCQDVTVTANETYRIRTGREQISIGRFALNGKRASWVCHPDETFIGVPKVISTLPDIQSIDVTRYLSGISIEQCHIQEMLGAQYLSIRNSKNETLLRRKIGILPADFSIEIKGGIHANEGTIVITTQHPCVAKLKDKTLEATRKRTEGRTEIQLKAEGVPPAFITLQVLPNLAADPIDIELPFPAKGCLALDVNGRPLDKNITLHDLLGSRAFLFSRNGEPTKYTLQLYLRSVSGLQAWHEWCYTALSDRPVELNLYSLREHIENLISLEAGIDQVVEMRITGAGVVMAWQIRRYKYSLRYDYEKELLLSQSVNHRAGQIPSPVIMLLSEPERKSIPLASRMSEGVPVGEYELSSIVNKNGPWLVVPKPGEEMAFRPCFIRGESSLPVEESNIRSLQKATQLFNPQAEVNTITLVLGQMANDPAHSGWQFMRSLYDQFGYLPLATFEVWRALVQHPQALAMSLFKFEMSAEYLSRIENEFPILWEFFPIFEIKAASERFKLFLSQKGAPEETQKLLVTNMFQRLGLVFPTYADEIEKWLSNGHLPPSIPESFVHVWYQELLREHSEAQWPEYGSKRLHSWMASQKNPVIGINPDANHRYSVALLPVFAAAVASGNASFESVFDRKPGAVFFLRQVRDFDSRWFKAIFQCSLLRYVAKK

SEQ ID NO: 25441 - protein, 2114 aa, Escherichia coli 2-222-05_S3_C1
MTTRYFSSLIEQSLPRSTEATLSIMGVTNPQLREHLAQQMGADCGKPGSFLASPVFQQMFGWKESNHTMRSLTEGNALLSKAVVDSLDDQSNGRYRFGADWKPFTHQLASWKALLEKKHSVVVTSGTGSGKTECFMVPVLEDLYRELHENGNNPLVGVRALFLYPLNALINSQRERLDAWTRGFGTGIRYCLYNGNTEELHAKMKTVQDNRPNEVLSREKMRLEPAPILVTNGTMLEYMMVRQVDAPIIQQSKAQKSLRWIVLDEAHTYVGSQAAELALQLRRVMTAFGVTPDDVRFVATSATIACSDAEKQLKKFLSELSGIPQERIDVLDGSRVIPELEPSKNVSVPLDEIEQIPDLDLKDKNDNKIKGISPERFYALTHSPEARYIREMLVSQPNPMKLDEMTQRLNALTKQHYSQQEVLRWIDVCSGTQPNAKDPAFLKVRAHIFQRNTQGIWACVDKDCRLKHGTPLEKGWPFGYVYVNQRQNCDCGSPVYEVAFCNDCNEPHLLAQDKKGKLVQWENKGGDEFSLQDEVPVEHDTTEEKVEKENGFLPPLIIAAGETSETGYTLQRLDHQTRRIGVINNDSIPLIINDVEQVCSASGCGYRGMSGKQPFRRALLGGPFYVTNIVPTVLEYCQDFTSDEGKEGVGPDSLPGRGRRLITFTDSRQGTARMAVRMQQEAERSLLRGSVVEILSWHQRTQTSTAPNANADLEKLAARAKQAREQAEEYRSWGMPDQAKLSQAQAEQLEQAYQAATGGKAATTLVSRTWTEMVNELKDKADIRGPVLKYNHYLQPEVFNKNGGPLKLSEMLLFREFMRRPKRTNSLETQGLVQVGYQGLEKIHKSPLHWQEKGLTLDDWRDFLKVTLDLYVRESNFTQLDDELKNWIGSRFSSKFVRNPESKDPEDNQNRRWPQIRNGNVSHRLAKLLMLGAGFKTVNTATIDIINTWLKEAWAQLTGPLAVLKPDGNRFYLPKEHMTFSLITDAWICPVTNKILDTAFKGLTPYLPTHISFEHLTQAQYDTFVAQKVTMPEIWKLDRSQEDYAEGLAKARDWVNNDPLIAQLRSENVWTDINDRVVEGGFYYRTAEHSAQQSSERLQSYEKMFKNGQLNVLNCSTTMEMGVDIGGITAVVMNNVPPHPANYLQRAGRAGRSKESRAISYTLCKGNPHDQQVFANPLWPFETMIPAPMVAMNSARLVQRHVNALLLSDFLCNVIGETDKEKTSLDSLWFFGEDDGQSKCERFKVWLERPVLDIDTALERLVKGTALHGARAEHLRDKTINAITFLQQRWLSVYRDLVTQERESQPQTPYRKRIELEKKRHCGEYLLRDLAARTFLPGYGFPTDVVTFDNFTMEDYIREKSQKSRDKKDREDNVSRYKGLPSRNLGVAIREYAPGAEIILDGRVFRSAGVSLHWHNINADTNEAQRLDCAWRCHKCGTIGYEEGMSSSGMLFCSNSACGEKITMDNRRQVLQPAGFVTDAHAPVTNNIETMKFVPVVPAWVFVKAEPVPLPNPLMGYMASGADGHVFQQSLGEGGHGYALCLSCGRAESMLNENDAPKSMEAHYPPRPGKADRDSQNHRLICPGSTALMKNVTLGALARTDVFEMVLRKPQNGEYLPDNTEEGRIVAMTLAVALRQALAGVLGISAAELGYSVRPVRLEDGQSVLAVQLYDVISGGAGFASSAPVHIEAILQGMVKQLGCRHCDTACSECLLDSQTRHDHDLLDRKVALAWLGDDFTYYIGLPDEETFSLPDARYCPGAIGDTIRRAINEGAEKLTLWMTGAPNEWDLYARQFRAAIQSYRLKDNVEVDLVIPAGVDDPDLLHELSQFTALGVRLCHVEQELQLPIVAQVTFADRVMTLASRSQQATIPGPEWHLNDELVVRSLGYQTVELNEFILPAKAANAVERVKDIQIHKQLNGPLSQFGQRFWDVLFNDHEEAQSLMKNTRITGVHYTDRYLQNPVALALLGSILKPLKTKLTDGAEVALDTLFKDKDRPGNRPFHDWMSIADFQDFADQWFAAALGRPIELTVFDSPRDIPHHRKLTVTFEDGQVLKIRFDQGMGYWRINFASQWHYFDFRDDVSFQLVKMAQACKEGNVANSEESWATDVLVEVIAS

SEQ ID NO: 25442 - protein, 77 aa, Escherichia coli 2-222-05_S3_C1
MSQKNPVIGINPDANHRYSVAWLPVFAAAVASGNASFESVFDRKPGAVFFLRQVRDFDSRWFKAIFQFSLLRYVAKK

SEQ ID NO: 25443 - protein, 2114 aa, Escherichia coli 2-222-05_S3_C2; identical to SEQ ID NO: 25441

SEQ ID NO: 25444 - protein, 77 aa, Escherichia coli 2-222-05_S3_C2; identical to SEQ ID NO: 25442

SEQ ID NO: 25445 - protein, 2114 aa, Escherichia coli 2-222-05_S3_C3; identical to SEQ ID NO: 25441

SEQ ID NO: 25446 - protein, 77 aa, Escherichia coli 2-222-05_S3_C3; identical to SEQ ID NO: 25442

SEQ ID NO: 25447 - protein, 2071 aa, Escherichia coli 2-316-03_S1_C1
MTHYLESQYFQPPGQEGSLLADPVFESTFGWMPADETMEDLRDKLISSPLVDALSKAPVPFRHQLTAWRTILEDKKSLLVSSGTGSGKTECFMVPVLEDLIRQQKSTRQSLTGTQAIFLYPLNALINSQQERLREWTRGFKGKIRFALYNGETRHTKYEVQEDQLKVPEQALSREAIYEAPPSIMVTNTTMLEYMLIRRKDAPIIEKSQGILKYIVLDEAHSYIGSQAAELALLLRRVMQAFNVGPGTDKPVQIIATSATIGEDSPEGNKELAKFVADLAGVTERDVKVVRGYRQIPRVSESLIRHEYPTSLTSLKSLSPQDLYQQLCHYRVAQQLRQALTHPGRQAVRLSELLNVARRTWPDINHRELLQLLDLMARSREGELAFTPLRMHGFIRTLAGLWACSNKQCLHKAHELNQSDWPFGQVWFEQRQYCDCGAPVFEVLRCSGCGSAYLSAKEEVRGDGTNWLVAQPAAAEVDEFALDVDVYSEDEDNDELDNNSQFDRLIAIDGEKYIISLEETTAGKIDSEAQKHYEINLLRPESRGEGRNNSFACVCCGDTQRKNNPLFRPLRLGAPFFLNEIIPTLLEFSPLPQTREEQLGPFNGRRLLTFTDSRQGTARISARLQQDADKATLRALCYQELANINEPSAKLSPAHCALLESFITQFSILPLKNSIDALKKAMVANEELSPADIQALKIIEPMVSSLSPDHAEAMQILQANSGNQQKKTMSWQTLSEQLVGSVDLADRMRGSFKELSGLDLTKQQFADFCLYSEFGRRPKNAWTLESMGLVAIHYPFIDKVTTCPQDWKTLLPDPDKQLAEWRNLLKITLDFFIRENSAVFYENEQYPRWMGARFPVKMLQGPDKKNKGQKRDQLWPQIRDRHYNRVIKLLIAVFPAIQPEQAHWKSLVNHLMIEVWDAIRPCLRQFESGYQLDIKQQAEFYSPKQVWRCPYTRRALDVTLLGYSPYLPGSKEIAPEKAVLIEMPELPVRHWRLSGGGEIAREERLEWLESNALIQHAREEGLWSTRSDRLALKDSWYRLEEHSAQRTPEQNQFNEKQFKSGKVNVLNCSTTMEMGVDIGGMSLVAMNNVPPAPANYLQRAGRAGRRGESASAAITLCKNTAHGMEVFKDPLWAFNTTASAPRVRFGSSSIVQRHVNALVLGLFLRAEVPDATKLSCKWFFEGDESQCLRFLHWLNNQADQLADKLKRLTQGTVLMSLTATQLLTRTQAMMQQVDIRWRSQLAILLENIEALKADNSAWEETPAGKAIAYQLRDYRGAYLFSKLISEAFLPGHGFPVGVVNFNYLTADELEKRRAIKATQADPNEGGESFSRRIEKLPSRDLPTALREYAPGADVVLGGKVYRSSGIMLGKVLASGQELSGDHHIPWFWHCRKCGAGATSTTRPVECSHCKADIQQLDVKRYLQPVGFATDIRYQAHNDVSMPAQLPWKDPRVLVPSSVWVSLPDAGLGRYRFSHSGELFHFSEGEFGHGYAICLSCGRAESQNQPQRTPENLKNPERENTHYLLRGGSNDRLGSNKLCHGHVHKDLWLGYSSRTDMVELQLNDDNGLLIRDEVAARSLAVALREGLAHKLGIENTELGVTTQQARDINGYTGYSIFIYDNNAGGAGYAVQLIDHWADVFNYARKLLDCSCDKFCHHCLLSYDSQHYVNRLDRHHALTLLTNVRLQRLNLAPEYQYFGDGSRVETNPLSLRIAQCLNSEIYDSCSLVLAGPQEQWDFAQWPLFKELLQFASSGGNVELLVATPLANLTDSSRHQLSALAAMPGGRLQVKSIATAQLMQGKGRWLAQVTREGQSQQWAADDSATVAPGELWGQSASSPVVTLKGTSGKTFSGQTLSAEDLLPALPTGAVRINLCEQLDGPLEGFGSRFWSLVTQQHAGWKQAFTRHKEITHVEYSDRYLNSPFTARLLGEILTELVEQGMAERASLTVCVKKLDYNSRQHDALYNAWLNEEDRQQVVTTLLEEGYLGPAWPGAISWLTGDNQSTEHGRELTVTFSDGSQHYVLLDMGLSYWRCIEDTFFDFALRVPQQVERLANTRARAVASGNDLRSYVIAG

SEQ ID NO: 25448 - protein, 1119 aa, Escherichia coli 2-316-03_S1_C1
MLVKTPVNPLLQWLNMFFSRRSLSGADGRALYAYRCTDTEYESLAELLRTYAPRSYPRTIFISYSDVLFSIYAAEFIRRTHTVGHPKWDTILDSIDWKVPYVHRQKLVNDGIRYWKRKIRNLGQASGYLHTLACEGGLPIRMIENESGYLITYFRRIYQALRGQASQYPAAKIAQELGDTIPVTMQNELVYEIAGEFCETLCRLLSEHPPQSSDPVSALRKLSPDWHLQLPLVLPEANAAEIVRRLLSQSSEIRSASSLQVERIWVDVDDSWYCDARFRFPATMRTEQLTSLFECNIQPEQTRLIISGKWRNGGARVAMLSRYEQQDWRGELLPIAMQKLSGADAMAEISLSLHEGPILLGHTIPKGGYELTEELPWVFEAMNESESQLKLVGMGSVSSRLNALFISLPKNSHLDISGEGEFDIPRLLKNSERSLTKISGVFSVVLHDGAVCTIRTQQLYDSAIEYYIKSTEVELVKSDYPVHRAWPKIGWKKDLQYGIVPEKELFWRSIRSGNNAWHSVASEMPKGQIEVRRIVNDEVLFSGKVVVLPADFDINIIPESVQQGIIMLSGITDTRIDKYSNNEKVTLKSDYSQNECAIYYNSSEMLENTVDLRVSWKDGSNLKLLLPKPVSGGRFVTHDGSVHFDGVASIAHLHGIDAELLTISCAGRGYLNIELLDENPVAEKFRYLHADLPLLSGCNDKLKQISLYENYNLLNAMLACAWNSNSTLCVDFYSDRFGKDKATLSIKRYDGSFIEHDQGLLVDIKNSVVFPANRIDELVVDAISLKDPGLHISLLKKDEFAYDLSALNVQDSPWLIVGKLDGTARIAPVIKWGLPVLQTNDLLLNALCEADSEQRKKYFNELIFEIDNNPLQNYCCLLTEYIKKYKMNNGLSLLDLDLFRGISSNYRVVVQLLISSCLSGDSDTIYDIQDELPFSWGWIPVSIWKDVFQKCWAYLEKQINDKTLALHILQPFIAFMNHRAHIDRRLAPIANMLLTYSELLPAGCNVLPTVSREQFNEAKQMLLRNPDSFGRISIFPKELWSSAITPELKSVFNKLWIEDKYHSRLEKRFNLMLVAALLTQKDNNLIYQLSALFEFHYQQAPQQLGVIYQYYFEQAGVCH

SEQ ID NO: 25449 - protein, 2104 aa, Escherichia coli 2-316-03_S1_C2; identical to SEQ ID NO: 25345

SEQ ID NO: 25450 - protein, 1119 aa, Escherichia coli 2-316-03_S1_C2; identical to SEQ ID NO: 25418

SEQ ID NO: 25451 - protein, 2657 aa, Escherichia coli 2719100
MIVGSIKLDDSEIAIGEVPLTFIVDADQWLLQGQASCSVRSSDVLIVLPRDNSTVAGFDGQSSAVNVLGLKALPVKGCQDVTVTANETYRIRTGREQISIGRFALNGKRASWVCHPDETFIGVPKVISTLPDIQSIDVTRYLSGISIERCHIQEMLGAQYLSIRNSNNETLLRRKIGILPADFSIEIKGGMHANEGTIVITTQHPCVATLKDKTLEATRKRTEGRTEIQLKAEGVPPAFITLQVLPNLAADTIDIELPFPAKGCLALDVNGRPLDKNITLHDLLGSRAFLFSRNGEPTKYTLQLHLRSISGLQAWHEWSYTALSERPVELNLYSLREHIENLISLEAGIDQVVEMRITGAGVVMAWQIRRYKYSLRYDYEKELLLSQSVNHRAGQIPSPVIMLLSEPERKSIPLASRMSEGVPVGEYELSSIVNKNGPWLVVPKPGEEMAFRPCFIRGESSLPVEESNIRSLQKATQLFNPQAEVNTITRVLGQMANDPAHSGWQFMRSLYDQFGYLPLATFEVWRALVQHPQALAMSLFKFEMSAEYLSRIENEFPILWEFFPIFEIKAASERFKLFLSQKGAPEETQKLLVTNMFQRLGLVFPTYADEIEKWLSNGYLPPSIPESCVHGWYQELLREHSEARWPEYGCKRLYKWMMSQKNPVIGINPDANHRYSVAWLPVLEDLYRELHENGNNPLVGVRALFLYPLNALINSQRERLDAWTRGFGTGIRYCLYNGNTENLHASVKSEQAKRPNEVLSREKMREEPAPILVTNGTMLEYMMVRQVDAPIIQQSKAQKSLRWIVLDEAHTYVGSQAAELALQLRRVMTAFGVTPDDVRFVATSATIAGSDAEKQLKKFLSELSGIPQERIDVLDGSRVIPELEPSKNVSLPLDEIEQIPDLELRDKNDNKIKGISSDRFYALTHSPEARYIREMLVKQPNPMKLDEITERLNVLTKQHYSQQEVLRWIDVCSGTQPNAKDPAFLKVRAHIFQRNTQGIWACVDKNCRLKHGTPLEKGWPFGYVYVNQRQNCDCGSPVYEVAFCNDCNEPHLLAQDKKGKLVQWENKGGDEFSLQDEVPVEHDTTEEKVEKENGFLPPLIIAAGETSETGYTLQRLDRQTRRIGVINNDSIPLIINDVEQVCSASGCGYRDMSGKQPFRRALLGGPFYVTNIVPTVLEYCQDFTSDEGKEGVGPDSLPGRGRRLITFTDSRQGTARMAVRMQQEAERSLLRGSVVEILSWHQRTQTSTAPNANADLEKLAARAKQAREQAEEYRSWGMPDQAKLSQAQAEQLEQAYQAATGGKAATTLVSRTWTEMVNELKDKADIRGPVLKYNHYLQPEVFNKNGGPLKLSEMLLFREFMRRPKRTNSLETQGLVQVGYQGLEKIHKSPLHWQEKGLTLDDWRDFLKVTLDLYVRESNFTQLDDELKNWIGSRFSSKFVRNPESKDPEDNQNRRWPQIRNGNVSHRLAKLLMLGAGFKTVNTATIDIINTWLKEAWAQLTGPLAVLKPDGNRFYLPKEHMTFSLITDAWICPVTNKILDTAFKGLTPYLPTHISFEHLTQAQYDTFVAQKVTMPEIWKLDRSQEDYAEGLAKARDWVNNDPLIAQLRSENVWTDINDRVVEGGFYYRTAEHSAQQSSERLQSYEKMFKNGQLNVLNCSTTMEMGVDIGGITAVVMNNVPPHPANYLQRAGRAGRSKESRAISYTLCKGNPHDQQVFANPLWPFETMIPAPMVAMNSARLVQRHVNALLLSDFLCNVIGETDKEKTSLDSLWFFGEDDGQSKCERFKVWLERPVLDIDTALERLVKGTALHGARAEHLRDKTINAITFLQQRWLSVYRDLVTQERESQPQTPYRKRIELEKKRHCGEYLLRDLAARTFLPGYGFPTDVVTFDNFTMEDYIREKSQKSRDKKDREDNVSRYKGLPSRNLGVAIREYAPGAEIILDGRVFRSAGVSLHWHNINADTNEAQRLDCAWRCHKCGTIGYEEGMSSSGMLFCSNSACGEKITMDNRRQVLQPAGFVTDAHAPVTNNIETMKFVPVVPAWVFVKAEPVPLPNPLMGYMASGADGHVFQQSLGEGGHGYALCLSCGRAESMLNENDAPKSMEAHYPPRPGKADRDSQNHRLICPGSTALMKNVTLGALARTDVFEMVLRKPQNGEYLPDNTEEGRIVAMTLAVALRQALAGVLGISAAELGYSVRPVRLEDGQSVLAVQLYDVISGGAGFASSAPVHIEAILQGMVKQLGCRHCDTACSECLLDSQTRHDHDLLDRKVALAWLGDDFTYYIGLPDEETFSLPDARYCPGAIGDTIRRAINEGAEKLTLWMTGAPNEWDLYARQFRAAIQSYRLKDNVEVDLVIPAGVDDPDLLHELSQFTALGVRLCHVEQDLQLPIVAQVTFADRVMTLASRSQQATIPGPEWHLNDELVVRSLGYKTVELNEFILPAKAANAVERVKDIQIHKQLNGPLSQFGQRFWDVLFNDHEEAQSLMKNTRITGVHYTDRYLQNPVALALLGSILKPLKTKLTDGAEVALDTLFKDKDRPGNRPFHDWMSIADFQDFADQWFAAALGRPVELTVFDSPRDIPHHRKLTVTFEDGQVLKIRFDQGMGYWRINFASQWHYFDFRDDVSFQLVKMAQACNEGNVANSEESWATDVLVEVIAS

SEQ ID NO: 25452 - protein, 279 aa, Escherichia coli 2719100
MGQSEYISWVKCTSWLSNFVNLRGLRKPDGRPLYEYHATNDEYNQLTQLLRAVGQSQSNICNKDFAACFVLFCSEWYRRDYERQCGWTWDPIYKKIGISFTATELGTIVPKGMDDYWLRPIRFYESERRNFLGTLFSEGGLPFRLLKESDSRFLAVFSRILGQYEQAKQSGFSALSLARAVIEKSALPTVFSEDTSVELISHMADNLNSLVLTHNLINHKEPVQQLDKVHPTWRSEFPIPLDDETGTHFLNGLLCAASVEAKPRLQNEPPRVSWRVFYL

SEQ ID NO: 25453 - protein, 2114 aa, Escherichia coli 2747800
MTTRYFSSLIEQSLSRSTEATLSIMGVTNPQLREHLAQQMGADCGKPGSFLASPVFQQMFGWKESNHTMRSLTEGNALLSKAVVDSLDNQSNGRYRFGADWKPFTHQLASWKALLEKKHSVVVTSGTGSGKTECFMVPVLEDLYRELHENGNNPLVGVRALFLYPLNALINSQRERLDAWTRGFGTGIRYCLYNGNTEELHAKMKTVQDNRPNEVLSREKMRLEPAPILVTNGTMLEYMMVRQVDAPIIQQSKAQKSLRWIVLDEAHTYVGSQAAELALQLRRVMTAFGVTPDDVRFVATSATIAGSDAEKQLKKFLSELSGIPQERIDVLDGSRVIPELEPSKNVSVPLDEIEQIPDLDLKDKNDNKIKGISPERFYALTHSPEARYIREMLVKHPNPMKLDEMTERLNILTKQHHSQHEVLRWIDVCSGTQPNAKDPAFLKVRAHIFQRNTQGIWACVDKDCRLKHGTPLEKGWPFGYVYVNQRQNCDCGSPVYEVAFCNDCNEPHLLARDKKGKLVQWENKGGDEFSLQDEVPVEHDATAEKVEKENSFQPPLIIAAGETSEAGYTLQRLDRQTRRIGVINNDSIPLIINDVEQVCSASGCGYRGMSGKQPFRRALLGGPFYVTNIVPTVLEYCQDFTSDEGKEGVGPDSLPGRGRRLITFTDSRQGTARMAVRMQQEAERSRLRGSVVEILSWHQRTQTSTAPNANADLEKLATRAKQAREQAEEYRSWGMPDQAKLSQAQAEQLEQAYQFAIGGKAATTLVSRTWTEMVNELKDKADIRGPVLKYNYYLKPEVFNENGGPLKLSEMLLFREFMRRPKRTNSLETQGLVQVGYLGLEKIHKLPMHWQERELTLDDWRDFLKVTLDHYVRESNFTQLDDELKNWIGSRFSSKFVRNPESKDPEDNQNRRWPQIRNGNVSHRLAKLLMLGAGFKTVNTATIDIINTWLKEAWAQLTGPLAVLKPDGNRFYLPKEHMTFSLITDAWICPVTNKILDTAFKGLTPYLPTHISFEHLTQAQYDTFVAQKVTMPEIWKLDRSQEDYAEGLAKARDWVSNDPLIAQLRSENVWTDINDRVVEGGFYYRTAEHSAQQSSERLQSYEKMFKNGQLNVLNCSTTMEMGVDIGGITAVVMNNVPPHPANYLQRAGRAGRSKESRAISYTLCKGNPHDQQVFANPLWPFETMIPAPMVAMNSARLVQRHVNALLLSDFLCNVIGETDKEKTSLDSLWFFGEDDGQSKCERFKIWLERPVLDIDTALERLVKGTALHGARAEHLRDKTISAITFLQQRWLSVYRDLVTQERESQPQTPYRKRIELEKKRHCGEYLLRDLAARTFLPGYGFPTDVVTFDNFTMEDYIREKLQKSRDKKDREDNVSRYKGLPSRNLGVAIREYAPGAEIILDGRVFRSAGVSLHWHNINADTNEAQRLDCAWRCHKCGTIGYEEGMSSSGMLFCSNSACGEKIIMDNRRQVLQPAGFVTDAHAPVTNNIETMKFVPVVPAWVFVKAEPVPLPNPLMGYMASGADGHVFQQSLGEGGHGYALCLSCGRAESMLNENDAPKSMEAHYPPRPGKADRDSQNHRLICPGSTALMKNVTLGALARTDVFEMVLRKPQKGEYLPDNTEEGRIVAMTLAVALRQALAGVLGISGAELGYSVRPVRLEDGQSVLAVQLYDVISGGAGFASSAPVHIEAILQGMVKQLGCRHCDTACSECLLDSQTRHDHDLLDRKAALAWLGDDFTYYIGLPDEETFSLPDARYCPGAIGDTIRRAINEGAEKLTLWMTGAPNEWDLYARQFRAAVQSYRLKDNVEVDLVIPAGVDDPDLLYELSQFTALGVRLCHVEQDLQLPIVAQVTFADRVMTLASRSQQATIPGPEWHLNDELVVRSLGYKTVELNEFILPAKAANAVERVKDIQIHKQLNGPLSQFGQRFWDVLFNDHEEAQSLMNNTRITGVHYTDRYLQNPVALALLGSILRPLKTKLTDVAEVALDTLFKDKDRPGNRPFHDWMSIADFQDFADQWFAAALGRPIELTVFDSPRDIPHHRKLTVTFEDGQVLKIRFDQGMGYWRINFASQWHYFDFRDDVSFQLVKMAQACNEGNVANSEESWATDVLVEVSAS

SEQ ID NO: 25454 - protein, 580 aa, Escherichia coli 2747800
MLGAQYLSIRNSNNETLLRRKIGILPADFSIEIKGGMHANEGTIVITTQHPCVAKLKDKTLEATRKRTEGRTEIQLKAEGVPPAFITLQVLPNLAADPIDIELPFPAKGCLALDVNGRPLDKNITLHDLLGSRAFLFSRNGEPTKYTLQLYLRSVSGLQAWHEWCYTALSDRPVELNLYSLREHIENLISLEAGIDQVVEMRITGAGVVMAWQIRRYKYSLRYDYEKELLLSQSVNHRAGQIPSPVIMLLSEPERKSIPLASRMSEGVPVGEYELSSIVNKNGPWLVVPKPGEEMAFRPCFIRGESSLPVEESNIRSLQKATQLFNPQAEVNTITRVLGQMANDPAHSGWQFMRSLYDQFGYLPLATFEVWRALVQHPQALAMSLFKFEMSAEYLSRIENEFPILWEFFPIFEIKAASERFKLFLSQKGAPEETQKLLVTNMFQRLGLVFPTYADEIEKWLSNGYLPPSIPESCVHGWYQELLREHSEARWPEYGCKRLYEWMMSQKNPVIGINPDADYRYSVAWLPVFAAAVASGNASFESVFDRKPGAVFFLRQVRDFDSRWFKAIFQCSLLRYVAKK

SEQ ID NO: 25455 - protein, 2114 aa, Escherichia coli 2749250
MTTRYFSSLIEQSLSRSTEATLSIMGVTNPQLREHLAQQMGADCGKPGSFLASPVFQQMFGWKESNHTMRSLTEGNALLSKAVVDSLDNQSNGRYRFGADWKPFTHQLASWKALLEKKHSVVVTSGTGSGKTECFMVPVLEDLYRELHENGNNPLVGVRALFLYPLNALINSQRERLDAWTRGFGTGIRYCLYNGNTEELHAKMKTVQDNRPNEVLSREKMRLEPAPILVTNGTMLEYMMVRQVDAPIIQQSKAQKSLRWIVLDEAHTYVGSQAAELALQLRRVMTAFGVTPDDVRFVATSATIAGSDAEKQLKKFLSELSGIPQERIDVLDGSRVIPELEPSKNVSVPLDEIEQIPDLDLKDKNDNKIKGISPERFYALTHSPEARYIREMLVKHPNPMKLDEMTERLNILTKQHHSQHEVLRWIDVCSGTQPNAKDPAFLKVRAHIFQRNTQGIWACVDKDCRLKHGTQLEKGWPFGYVYVNQRQNCDCGSPVYEVAFCNDCNEPHLLARDKKGKLVQWENKGGDEFSLQDEVPVEHDATAEKVEKENSFQPPLIIAAGETSEAGYTLQRLDRQTRRIGVINNDSIPLIINDVEQVCSASGCGYRGMSGKQPFRRALLGGPFYVTNIVPTVLEYCQDFTSDEGKEGVGPDSLPGRGRRLITFTDSRQGTARMAVRMQQEAERSRLRGSVVEILSWHQRTQTSTAPNANADLEKLATRAKQAREQAEEYRSWGMPDQAKLSQAQAEQLEQAYQFAIGGKAATTLVSRTWTEMVNELKDKADIRGPVLKYNYYLKPEVFNENGGPLKLSEMLLFREFMRRPKRTNSLETQGLVQVGYLGLEKIHKLPMHWQERELTLDDWRDFLKVTLDHYVRESNFTQLDDELKNWIGSRFSSKFVRNPESKDPEDNQNRRWPQIRNGNVSHRLAKLLMLGAGFKTVNTATIDIINTWLKEAWAQLTGPLAVLKPDGNRFYLPKEHMTFSLITDAWICPVTNKILDTAFKGLTPYLPTHISFEHLTQAQYDTFVAQKVTMPEIWKLDRSQEDYAEGLAKARDWVSNDPLIAQLRSENVWTDINDRVVEGGFYYRTAEHSAQQSSERLQSYEKMFKNGQLNVLNCSTTMEMGVDIGGITAVVMNNVPPHPANYLQRAGRAGRSKESRAISYTLCKGNPHDQQVFANPLWPFETMIPAPMVAMNSARLVQRHVNALLLSDFLCNVIGETDKEKTSLDSLWFFGEDDGQSKCERFKIWLERPVLDIDTALERLVKGTALHGARAEHLRDKTISAITFLQQRWLSVYRDLVTQERESQPQTPYRKRIELEKKRHCGEYLLRDLAARTFLPGYGFPTDVVTFDNFTMEDYIREKLQKSRDKKDREDNVSRYKGLPSRNLGVAIREYAPGAEIILDGRVFRSAGVSLHWHNINADTNEAQRLDCAWRCHKCGTIGYEEGMSSSGMLFCSNSACGEKIIMDNRRQVLQPAGFVTDAHAPVTNNIETMKFVPVVPAWVFVKAEPVPLPNPLMGYMASGADGHVFQQSLGEGGHGYALCLSCGRAESMLNENDAPKSMEAHYPPRPGKADRDSQNHRLICPGSTALMKNVTLGALARTDVFEMVLRKPQKGEYLPDNTEEGRIVAMTLAVALRQALAGVLGISGAELGYSVRPVRLEDGQSVLAVQLYDVISGGAGFASSAPVHIEAILQGMVKQLGCRHCDTACSECLLDSQTRHDHDLLDRKAALAWLGDDFTYYIGLPDEETFSLPDARYCPGAIGDTIRRAINEGAEKLTLWMTGAPNEWDLYARQFRAAVQSYRLKDNVEVDLVIPAGGDDPDLLYELSQFTALGVRLCHVEQDLQLPIVAQVTFADRVMTLASRSQQATIPGPEWHLNDELVVRSLGYKTVELNEFILPAKAANAVERVKDIQIHKQLNGPLSQFGQRFWDVLFNDHEEAQSLMNNTRITGVHYTDRYLQNPVALALLGSILRPLKTKLTDVAEVALDTLFKDKDRPGNRPFHDWMSIADFQDFADQWFAAALGRPIELTVFDSPRDIPHHRKLTVTFEDGQVLKIRFDQGMGYWRINFASQWHYFDFRDDVSFQLVKMAQACNEGNVANSEESWATDVLVEVSAS

SEQ ID NO: 25456 - protein, 580 aa, Escherichia coli 2749250; identical to SEQ ID NO: 25454

SEQ ID NO: 25457 - protein, 2114 aa, Escherichia coli 2770900
MTTRYFSSLIEQSLSRSTEATLSIMGVTNPQLREHLAQQMGADCGKPGSFLASPVFQQMFGWKESNHTMRSLTEGNALLSKAVVDSLDNQSNGRYRFGADWKPFTHQLASWKALLEKKHSVVVTSGTGSGKTECFMVPVLEDLYRELHENGNNPLVGVRALFLYPLNALINSQRERLDAWTRGFGTGIRYCLYNGNTEELHAKMKTVQDNRPNEVLSREKMRLEPAPILVTNGTMLEYMMVRQVDAPIIQQSKAQKSLRWIVLDEAHTYVGSQAAELALQLRRVMTAFGVTPDDVRFVATSATIAGSDAEKQLKKFLSELSGIPQERIDVLDGSRVIPELEPSKNVSVPLDEIEQIPDLDLKDKNDNKIKGISPERFYALTHSPEARYIREMLVKHPNPMKLDEMTERLNILTKQHHSQHEVLRWIDVCSGTQPNAKDPAFLKVRAHIFQRNTQGIWACVDKDCRLKHGTPLEKGWPFGYVYVNQRQNCDCGSPVYEVAFCNDCNEPHLLARDKKGKLVQWENKGGDEFSLQDEVPVEHDATAEKVEKENSFQPPLIIAAGETSEAGYTLQRLDRQTRRIGVINNDSIPLIINDVEQVCSASGCGYRGMRGKQPFRRALLGGPFYVTNIVPTVLEYCQDFTSDEGKEGVGPDSLPGRGRRLITFTDSRQGTARMAVRMQQEAERSRLRGSVVEILSWHQRTQTSTAPNANADLEKLATRAKQAREQAEEYRSWGMPDQAKLSQAQAEQLEQAYQFAIGGKAATTLVSRTWTEMVNELKDKADIRGPVLKYNYYLKPEVFNENGGPLKLSEMLLFREFMRRPKRTNSLETQGLVQVGYLGLEKIHKLPMHWQERELTLDDWRDFLKVTLDHYVRESNFTQLDDELKNWIGSRFSSKFVRNPESKDPEDNQNRRWPQIRNGNVSHRLAKLLMLGAGFKTVNTATIDIINTWLKEAWAQLTGPLAVLKPDGNRFYLPKEHMTFSLITDAWICPVTNKILDTAFKGLTPYLPTHISFEHLTQAQYDTFVAQKVTMPEIWKLDRSQEDYAEGLAKARDWVSNDPLIAQLRSENVWTDINDRVVEGGFYYRTAEHSAQQSSERLQSYEKMFKNGQLNVLNCSTTMEMGVDIGGITAVVMNNVPPHPANYLQRAGRAGRSKESRAISYTLCKGNPHDQQVFANPLWPFETMIPAPMVAMNSARLVQRHVNALLLSDFLCNVIGETDKEKTSLDSLWFFGEDDGQSKCERFKIWLERPVLDIDTALERLGKGTALHGARAEHLRDKTISAITFLQQRWLSVYRDLVTQERESQPQTPYRKRIELEKKRHCGEYLLRDLAARTFLPGYGFPTDVVTFDNFTMEDYIREKLQKSRDKKDREDNVSRYKGLPSRNLGVAIREYAPGAEIILDGRVFRSAGVSLHWHNINADTNEAQRLDCAWRCHKCGTIGYEEGMSSSGMLFCSNSACGEKIIMDNRRQVLQPAGFVTDAHAPVTNNIETMKFVPVVPAWVFVKAEPVPLPNPLMGYMASGADGHVFQQSLGEGGHGYALCLSCGRAESMLNENDAPKSMEAHYPPRPGKADRDSQNHRLICPGSTALMKNVTLGALARTDVFEMVLRKPQKGEYLPDNTEEGRIVAMTLAVALRQALAGVLGISGAELGYSVRPVRLEDGQSVLAVQLYDVISGGAGFASSAPVHIEAILQGMVKQLGCRHCDTACSECLLDSQTRHDHDLLDRKAALAWLGDDFTYYIGLPDEETFSLPDARYCPGAIGDTIRRAINEGAEKLTLWMTGAPNEWDLYARQFRAAVQSYRLKDNVEVDLVIPAGVDDPDLLYELSQFTALGVRLCHVEQDLQLPIVAQVTFADRVMTLASRSQQATIPGPEWHLNDELVVRSLGYKTVELNEFILPAKAANAVERVKDIQIHKQLNGPLSQFGQRFWDVLFNDHEEAQSLMNNTRITGVHYTDRYLQNPVALALLGSILRPLKTKLTDVAEVALDTLFKDKDRPGNRPFHDWMSIADFQDFADQWFAAALGRPIELTVFDSPRDIPHHRKLTVTFEDGQVLKIRFDQGMGYWRINFASQWHYFDFRDDVSFQLVKMAQACNEGNVANSEESWATDVLVEVSAS

SEQ ID NO: 25458 - protein, 580 aa, Escherichia coli 2770900; identical to SEQ ID NO: 25454

SEQ ID NO: 25459 - protein, 2114 aa, Escherichia coli 2860050; identical to SEQ ID NO: 25453

SEQ ID NO: 25460 - protein, 228 aa, Escherichia coli 2860050
MRSLYDQFGYLPLATFEVWRALVQHPQALAMSLFKFEMSAEYLSRIENEFPILWEFFPIFEIKAASERFKLFLSQKGAPEETQKLLVTNMFQRLGLVFPTYADEIEKWLSNGYLPPSIPESCVHGWYQELLREHSEARWPEYGCKRLYEWMMSQKNPVIGINPDADYRYSVAWLPVFAAAVASGNASFESVFDRKPGAVFFLRQVRDFDSRWFKAIFQCSLLRYVAKK

SEQ ID NO: 25461 - protein, 2114 aa, Escherichia coli 2860650
MTTRYFSSLIEQSLSRSTEATLSIMGVTNPQLREHLAQQMGADCGKPGSFLASPVFQQMFGWKESNHTMRSLTEGNALLSKAVVDSLDNQSNGRYRFGADWKPFTHQLASWKALLEKKHSVVVTSGTGSGKTECFMVPVLEDLYRELHENGNNPLVGVRALFLYPLNALINSQRERLDAWTRGFGTGIRYCLYNGNTEELHAKMKTVQDNRPNEVLSREKMRLEPAPILVTNGTMLEYMMVRQVDAPIIQQSKAQKSLRWIVLDEAHTYVGSQAAELALQLRRVMTAFGVTPDDVRFVATSATIAGSDAEKQLKKFLSELSGIPQERIDVLDGSRVIPELEPSKNVSVPLDEIEQIPDLDLKDKNDNKIKGISPERFYALTHSPEARYIREMLVKHPNPMKLDEMTERLNILTKQHHSQHEVLRWIDVCSGTQPNAKDPAFLKVRAHIFQRNTQGIWACVDKDCRLKHGTPLEKGWPFGYVYVNQRQNCDCGSPVYEVAFCNDCNEPHLLARDKKGKLVQWENKGGDEFSLQDEVPVEHDATAEKVEKENSFQPPLIIAAGETSEAGYTLQRLDRQTRRIGVINNDSIPLIINDVEQVCSASGCGYRGMRGKQPFRRALLGGPFYVTNIVPTVLEYCQDFTSDEGKEGVGPDSLPGRGRRLITFTDSRQGTARMAVRMQQEAERSRLRGSVVEILSWHQRTQTSTAPNANADLEKLATRAKQAREQAEEYRSWGMPDQAKLSQAQAEQLEQAYQFAIGGKAATTLVSRTWTEMVNELKDKADIRGPVLKYNYYLKPEVFNENGGPLKLSEMLLFREFMRRPKRTNSLETQGLVQVGYLGLEKIHKLPMHWQERELTLDDWRDFLKVTLDHYVRESNFTQLDDELKNWIGSRFSSKFVRNPESKDPEDNQNRRWPQIRNGNVSHRLAKLLMLGAGFKTVNTATIDIINTWLKEAWAQLTGPLAVLKPDGNRFYLPKEHMTFSLITDAWICPVTNKILDTAFKGLTPYLPTHISFEHLTQAQYDTFVAQKVTMPEIWKLDRSQEDYAEGLAKARDWVSNDPLIAQLRSENVWTDINDRVVEGGFYYRTAEHSAQQSSERLQSYEKMFKNGQLNVLNCSTTMEMGVDIGGITAVVMNNVPPHPANYLQRAGRAGRSKESRAISYTLCKGNPHDQQVFANPLWPFETMIPAPMVAMNSARLVQRHVNALLLSDFLCNVIGETDKEKTSLDSLWFFGEDDGQSKCERFKIWLERPVLDIDTALERLVKGTALHGARAEHLRDKTISAITFLQQRWLSVYRDLVTQERESQPQTPYRKRIELEKKRHCGEYLLRDLAARTFLPGYGFPTDVVTFDNFTMEDYIREKLQKSRDKKDREDNVSRYKGLPSRNLGVAIREYAPGAEIILDGRVFRSAGVSLHWHNINADTNEAQRLDCAWRCHKCGTIGYEEGMSSSGMLFCSNSACGEKIIMDNRRQVLQPAGFVTDAHAPVTNNIETMKFVPVVPAWVFVKAEPVPLPNPLMGYMASGADGHVFQQSLGEGGHGYALCLSCGRAESMLNENDAPKSMEAHYPPRPGKADRDSQNHRLICPGSTALMKNVTLGALARTDVFEMVLRKPQKGEYLPDNTEEGRIVAMTLAVALRQALAGVLGISGAELGYSVRPVRLEDGQSVLAVQLYDVISGGAGFASSAPVHIEAILQGMVKQLGCRHCDTACSECLLDSQTRHDHDLLDRKAALAWLGDDFTYYIGLPDEETFSLPDARYCPGAIGDTIRRAINEGAEKLTLWMTGAPNEWDLYARQFRAAVQSYRLKDNVEVDLVIPAGVDDPDLLYELSQFTALGVRLCHVEQDLQLPIVAQVTFADRVMTLASRSQQATIPGPEGHLNDELVVRSLGYKTVELNEFILPAKAANAVERVKDIQIHKQLNGPLSQFGQRFWDVLFNDHEEAQSLMNNTRITGVHYTDRYLQNPVALALLGSILRPLKTKLTDVAEVALDTLFKDKDRPGNRPFHDWMSIADFQDFADQWFAAALGRPIELTVFDSPRDIPHHRKLTVTFEDGQVLKIRFDQGMGYWRINFASQWHYFDFRDDVSFQLVKMAQACNEGNVANSEESWATDVLVEVSAS

SEQ ID NO: 25462 - protein, 580 aa, Escherichia coli 2860650; identical to SEQ ID NO: 25454

SEQ ID NO: 25463 - protein, 2090 aa, Escherichia coli 2866350
MGVTNPQLREHLAQQMGADCGKPGSFLASPVFQQMFGWKESNHTMRSLTEGNALLSKAVVDSLDNQSNGRYRFGADWKPFTHQLASWKALLEKKHSVVVTSGTGSGKTECFMVPVLEDLYRELHENGNNPLVGVRALFLYPLNALINSQRERLDAWTRGFGTGIRYCLYNGNTEELHAKMKTVQDNRPNEVLSREKMRLEPAPILVTNGTMLEYMMVRQVDAPIIQQSKAQKSLRWIVLDEAHTYVGSQAAELALQLRRVMTAFGVTPDDVRFVATSATIAGSDAEKQLKKFLSELSGIPQERIDVLDGSRVIPELEPSKNVSVPLDEIEQIPDLDLKDKNDNKIKGISPERFYALTHSPEARYIREMLVKHPNPMKLDEMTERLNILTKQHHSQHEVLRWIDVCSGTQPNAKDPAFLKVRAHIFQRNTQGIWACVDKDCRLKHGTPLEKGWPFGYVYVNQRQNCDCGSPVYEVAFCNDCNEPHLLARDKKGKLVQWENKGGDEFSLQDEVPVEHDATAEKVEKENSFQPPLIIAAGETSEAGYTLQRLDRQTRRIGVINNDSIPLIINDVEQVCSASGCGYRGMSGKQPFRRALLGGPFYVTNIVPTVLEYCQDFTSDEGKEGVGPDSLPGRGRRLITFTDSRQGTARMAVRMQQEAERSRLRGSVVEILSWHQRTQTSTAPNANADLEKLATRAKQAREQAEEYRSWGMPDQAKLSQAQAEQLEQAYQFAIGGKAATTLVSRTWTEMVNELKDKADIRGPVLKYNYYLKPEVFNENGGPLKLSEMLLFREFMRRPKRTNSLETQGLVQVGYLGLEKIHKLPMHWQERELTLDDWRDFLKVTLDHYVRESNFTQLDDELKNWIGSRFSSKFVRNPESKDPEDNQNRRWPQIRNGNVSHRLAKLLMLGAGFKTVNTATIDIINTWLKEAWAQLTGPLAVLKPDGNRFYLPKEHMTFSLITDAWICPVTNKILDTAFKGLTPYLPTHISFEHLTQAQYDTFVAQKVTMPEIWKLDRSQEDYAEGLAKARDWVSNDPLIAQLRSENVWTDINDRVVEGGFYYRTAEHSAQQSSERLQSYEKMFKNGQLNVLNCSTTMEMGVDIGGITAVVMNNVPPHPANYLQRAGRAGRSKESRAISYTLCKGNPHDQQVFANPLWPFETMIPAPMVAMNSARLVQRHVNALLLSDFLCNVIGETDKEKTSLDSLWFFGEDDGQSKCERFKIWLERPVLDIDTALERLVKGTALHGARAEHLRDKTISAITFLQQRWLSVYRDLVTQERESQPQTPYRKRIELEKKRHCGEYLLRDLAARTFLPGYGFPTDVVTFDNFTMEDYIREKLQKSRDKKDREDNVSRYKGLPSRNLGVAIREYAPGAEIILDGRVFRSAGVSLHWHNINADTNEAQRLDCAWRCHKCGTIGYEEGMSSSGMLFCSNSACGEKIIMDNRRQVLQPAGFVTDAHAPVTNNIETMKFVPVVPAWVFVKAEPVPLPNPLMGYMASGADGHVFQQSLGEGGHGYALCLSCGRAESMLNENDAPKSMEAHYPPRPGKADRDSQNHRLICPGSTALMKNVTLGALARTDVFEMVLRKPQKGEYLPDNTEEGRIVAMTLAVALRQALAGVLGISGAELGYSVRPVRLEDGQSVLAVQLYDVISGGAGFASSAPVHIEAILQGMVKQLGCRHCDTACSECLLDSQTRHDHDLLDRKAALAWLGDDFTYYIGLPDEETFSLPDARYCPGAIGDTIRRAINEGAEKLTLWMTGAPNEWDLYARQFRAAVQSYRLKDNVEVDLVIPAGVDDPDLLYELSQFTALGVRLCHVEQDLQLPIVAQVTFADRVMTLASRSQQATIPGPEWHLNDELVVRSLGYKTVELNEFILPAKAANAVERVKDIQIHKQLNGPLSQFGQRFWDVLFNDHEEAQSLMNNTRITGVHYTDRYLQNPVALALLGSILRPLKTKLTDVAEVALDTLFKDKDRPGNRPFHDWMSIADFQDFADQWFAAALGRPIELTVFDSPRDIPHHRKLTVTFEDGQVLKIRFDQGMGYWRINFASQWHYFDFRDDVSFQLVKMAQACNEGNVANSEESWATDVLVEVSAS

SEQ ID NO: 25464 - protein, 228 aa, Escherichia coli 2866350; identical to SEQ ID NO: 25460

SEQ ID NO: 25465 - protein, 2104 aa, Escherichia coli 2886-75; identical to SEQ ID NO: 25235

SEQ ID NO: 25466 - protein, 978 aa, Escherichia coli 2886-75; identical to SEQ ID NO: 25216

SEQ ID NO: 25467 - protein, 2104 aa, Escherichia coli 3.4870; identical to SEQ ID NO: 25235

SEQ ID NO: 25468 - protein, 978 aa, Escherichia coli 3.4870; identical to SEQ ID NO: 25216

SEQ ID NO: 25469 - protein, 2104 aa, Escherichia coli 3.4880; identical to SEQ ID NO: 25235

SEQ ID NO: 25470 - protein, 978 aa, Escherichia coli 3.4880; identical to SEQ ID NO: 25216

SEQ ID NO: 25471 - protein, 2104 aa, Escherichia coli 3-475-03_S1_C1
MDVQQLHYAPLLNQLHQRAVRSVVSQLALRSKSLTHYLESQYFQPPGQEGSLLADPVFESTFGWMPADETMEDLRDKLISSPLVDALSKAPVPFRHQLTAWRTILEDKKSLLVSSGTGSGKTECFMVPVLEDLIRQQKSTRQSLTGTQAIFLYPLNALINSQQERLREWTRGFKGKIRFALYNGETRHTKYEVQEDQLKVPEQALSREAIYEAPPSIMVTNTTMLEYMLIRRKDAPIIEKSQGMLKYIVLDEAHSYIGSQAAELALLLRRVMQAFNVGPGTDKPVQIIATSATIGEDSPEGNKELAKFVADLAGVTERDVKVVRGYRQIPRVSESLIRHEYPTSLTSLKSLSPQDLYQQLCHYRVAQQLRQALTHPGRQAVRLSELLNVARRTWPDINHRELLQLLDLMARSREGELAFTPLRMHGFIRTLAGLWACSNKQCSHKAHELNQSDWPFGQVWFEQRQYCDCGAPVFEVLRCSGCGSAYLSAKEEVRGDGTNWLVAQPAAAEVDEFALDVDVYSEDEDNDELDNNSQFDRLIAIDGEKYIISLEETTAGKIDSEAQKHYEINLLRPESRGEGRNNSFACVCCGDTQRKNNPLFRPLRLGAPFFLNEIIPTLLEFSPLPQTREEQLGPFNGRRLLTFTDSRQGTARISARLQQDADKATLRALCYQELANINEPSAKLSPAHCALLESFITQFSILPLKNSIDALKKAMVANEELSPADIQALKIIEPMVSSLSPDHAEAMQILQANSGNQQKKTMSWQTLSEQLVGSVDLADRMRGSFKELSGLDLTKQQFADFCLYSEFGRRPKNAWTLESLGLVAIHYPFIDKVTTCPQDWKTLLPDPDKQLAEWRNLLKITLDFFIRENSAVFYENEQYPRWMGARFPVKMLQGPDKKNKGQKRDQLWPQIRDRHYNRVIKLLIAVFPAIQPEQAHWKSLVNHLMIEVWDAIRPCLRQFESGYQLDIKQQAEFYSPKQVWRCPYTRRALDVTLLGYSPYLPGSKEIAPEKAVLIEMPELPVRHWRLSGGGEIAREERLEWLESNALIQHAREEGLWSTRSDRLALKDSWYRLEEHSAQRTPEQNQFNEKQFKSGKVNVLNCSTTMEMGVDIGGMSLVAMNNVPPAPANYLQRAGRAGRRGESASAAITLCKNTAHGMEVFKDPLWAFNTTASAPRVRFGSSSIVQRHVNALVLGLFLRAEVPDATKLSCKWFFEGDESQCLRFLHWLNHQADQLADKLKRLTQGTVLMSLTATQLLTRTQAMMQQVDIRWRSQLAILLENIEALKADNSAWEETPAGKAIAYQLRDYRGAYLFSKLISEAFLPGHGFPVGVVNFNYLTADELEKRRAIKATQADPNEGGESFSRRIEKLPSRDLPTALREYAPGADVVLGGKVYRSSGIMLGKVLASGQELSGDHHIPWFWHCRKCGAGATSTTRPVECSHCKADIQQLDVKRYLQPVGFATDIRYQAHNDVSMPAQLPWKDPRVLVPSSVWVSLPDAGLGRYRFSHSGELFHFSEGEFGHGYAICLSCGRAESQNQPQRTPENLKNPERENTHYLLRGGSNDRQGSNKLCHGHVHKDLWLGYSSRTDMVELQLNDDNGLLIRDEVAARSLAVALREGLAHKLGIENTELGVTTQQARDINGYTGYSIFIYDNNAGGAGYAVQLIDHWADVFNYARKLLDCSCDKFCHHCLLSYDSQHYVNRLDRHHALTLLTNVRLQRLNLAPEYQYFGDGSRVETNPLSLRIAQCLNSEIYDSCSLVLAGPQEQWDFAQWPLFKELLQFASSGGHVELLVATPLANLTDSSRHQLSALAAMPGGRLQVKSIATAQLMQGKGRWLAQVTREGQSQQWAADDSATVAPGELWGQSASSPVVTLKGTSGKTFSGQTLSAEDLLPALPTGAVRINLCEQLDGPLEGFGSRFWSLVTQQHAGWKQAFTRHKEITHVEYSDRYLNSPFTARLLGEILTELVEQGMAERASLTVCVKKLDYNSRQHDALYNAWLNEEDRQQVVTTLLEEGYLGPAWPGAISWLTGDNQSMEHGRELTVTFSDGSQHYVLLDMGLSYWRCIEDTFFDFALRVPQQVERLANTRARAVAPGNDLRSYVIAG

SEQ ID NO: 25472 - protein, 1119 aa, Escherichia coli 3-475-03_S1_C1
MLVKTPVNPLLQWLNMFFSRRSLSGADGRALYAYRCTDTEYESLAELLRTYAPRSYPRTIFISYSDVLFSIYAAEFIRRTHTVGHPKWDTILDSIDWKVPYVHRQKLVNDGIRYWKRKIRNLGQASGYLHTLACEGGLPIRMIENESGYLITYFRRIYQALRGQASQYPAAKIAQELGDTIPVTMQNELVYEIAGEFCETLCRLLSEHPPQSSDPVSALRKLSPDWHLQLPLVLPEANAAEIVRRLLSQSSEIRSASSLQVERIWVDVDDSWYCDARFRFPATMRTEQLTSLFECHIQPEQTRLIISGKWKNGGARLAMLSRYEQQDWRVELLPIAMQKLSGADAMAEISLSLHEGPILLGHTIPKGGYELTEELPWVFEAMNESESQLKLVGMGSVSSRLNALFISLPKNSHLDISGEGEFDIPRLLKNSERSLTKISGVFSVVLHDGAVCTIRTQQLYDSAIEYYIKSTEVELVKSDYPVHRAWPKIGWKKDLQYGIVPEKELFWRSIRSGNNAWYSVASEMPKGQIEVRRIVNDEVLFSGKVVVLPADFDINIIPESAQQGIIILSGITDTRIDKYSNNEKVTLKSDYSQNECAIYYNSSLMLENTVDLRVSWKDGSNLKLLLPKPVSGGRFVTNDGSVHFDGVASIAHLHGIDAELLTISCAGRGYLNIELLDENPVAEKFRYLHADLPLLSGRNDKLQQISLYENYNLLNSMLACAWNSNSTLCVDFYSDRFGKDKATLNIKRYDGSFIEHDQGLLVDIKNSVVFPANRIDELVVDAISLKDPGLHISLLKKDEFAYDLSALNVQDSPWLIVGKLDDTARIAPVIKWGLPVLQTNDLLLNALCEADSEQRKKYFNELIFEIDNNPLQNYCCLLTEYIKKYKMNNGLSLLDLDLFRGISSNYRVVVQLLISSCLSGDSDTIYDIQDELPFSWGWIPVSIWKDVFQKCWAYLEKQINDKTLALHILQPFIAFMNHRAHIDRRLTPIANMLLTYGELLPAGCNVLPTVSREQFNEAKQMLLRNPDSFGRISIFPKELWSSAITPELKSVFNKLWIEDKYHSRLEKRFNLMLVAALLTQKDNNLIHQLSALFEFHYQQAPQQLGVIYQYYFEQAGVCH

SEQ ID NO: 25473 - protein, 2104 aa, Escherichia coli 3-475-03_S1_C2
MDVQQLHYAPLLNQLHQRAVRSVVSQLALRSKSLTHYLESQYFQPPGQEGSLLADPVFESTFGWMPADETMEDLRDKLISSPLVDALSKAPVPFRHQLTAWRTILEDKKSLLVSSGTGSGKTECFMVPVLEDLIRQQKSTRQSLTGTQAIFLYPLNALINSQQERLREWTRGFKGKIRFALYNGETRHTKYEVQEDQLKVPEQALSREAIYEAPPSIMVTNTTMLEYMLIRRKDAPIIEKSQGILKYIVLDEAHSYIGSQAAELALLLRRVMQAFNVGPGTDKPVQIIATSATIGEDSPEGNKELAKFVADLAGVTERDVKVVRGYRQIPRVSESLIRHEYPTSLTSLKSLSPQDLYQQLCHYRVAQQLRQALTHPGRQAVRLSELLNVARRTWPDINHRELLQLLDLMARSREGELAFTPLRMHGFIRTLAGLWACSNKQCLHKAHELNQSDWPFGQVWFEQRQYCDCGAPVFEVLRCSGCGSAYLSAKEEVRGDGTNWLVAQPAAAEVDEFALDVDVYSEDEDNDELDNNSQFDRLIAIDGEKYIISLEETTAGKIDSEAQKHYEINLLRPESRGEGRNNSFACVCCGDTQRKNNPLFRPLRLGAPFFLNEIIPTLLEFSPLPQTREEQLGPFNGRRLLTFTDSRQGTARISARLQQDADKATLRALCYQELANINEPSAKLSPAHCALLESFITQFSILPLKNSIDALKKAMVANEELSPADIQALKIIEPMVSSLSPDHAEAMQILQANSGNQQKKTMSWQTLSEQLVGSVDLADRMRGSFKELSGLDLTKQQFADFCLYSEFGRRPKNAWTLESMGLVAIHYPFIDKVTTCPQDWKTLLPDPDKQLAEWRNLLKITLDFFIRENSAVFYENEQYPRWMGARFPVKMLQGPDKKNKGQKRDQLWPQIRDRHYNRVIKLLIAVFPAIQPEQAHWKSLVNHLMIEVWDAIRPCLRQFESGYQLDIKQQAEFYSPKQVWRCPYTRRALDVTLLGYSPYLPGSKEIAPEKAVLIEMPELPVRHWRLSGGGEIAREERLEWLESNALIQHAREEGLWSTRSDRLALKDSWYRLEEHSAQRTPEQNQFNEKQFKSGKVNVLNCSTTMEMGVDIGGMSLVAMNNVPPAPANYLQRAGRAGRRGESASAAITLCKNTAHGMEVFKDPLWAFNTTASAPRVRFGSSSIVQRHVNALVLGLFLRAEVPDATKLSCKWFFEGDESQCLRFLHWLNNQADQLADKLKRLTQGTVLMSLTATQLLTRTQAMMQQVDIRWRSQLAILLENIEALKADNSAWEETPAGKAIAYQLRDYRGAYLFSKLISEAFLPGHGFPVGVVNFNYLTADELEKRRAIKATQADPNEGGESFSRRIEKLPSRDLPTALREYAPGADVVLGGKVYRSSGIMLGKVLASGQELSGDHHIPWFWHCRKCGAGATSTTRPVECSHCKADIQQLDVKRYLQPVGFATDIRYQAHNDVSMPAQLPWKDPRVLVPSSVWVSLPDAGLGRYRFSHSGELFHFSEGEFGHGYAICLSCGRAESQNQPQRTPENLKNPERENTHYLLRGGSNDRLGSNKLCHGHVHKDLWLGYSSRTDMVELQLNDDNGLLIRDEVAARSLAVALREGLAHKLGIENTELGVTTQQARDINGYTGYSIFIYDNNAGGAGYAVQLIDHWADVFNYARKLLDCSCDKFCHHCLLSYDSQHYVNRLDRHHALTLLTNVRLQRLNLAPEYQYFGDGSRVETNPLSLRIAQCLNSEIYDSCSLVLAGPQEQWDFAQWPLFKELLQFASSGGNVELLVATPLANLTDSSRHQLSALAAMPGGRLQVKSIATAQLMQGKGRWLAQVTREGQSQQWAADDSATVAPGELWGQSASSPVVTLKGTSGKTFSGQTLSAEDLLPALPTGAVRINLCEQLDGPLEGFGSRFWSLVTQQHAGWKQAFPRHKEITHVEYSDRYLNSPFTARLLGEILTELVEQGMAERASLTVCVKKLDYNSRQHDALYNAWLNEEDRQQVVTTLLEEGYLGPAWPGAISWLTGDNQSTEHGRELTVTFSDGSQHYVLLDMGLSYWRCIEDTFFDFALRVPQQVERLANTRARAVASGNDLRSYVIAG

SEQ ID NO: 25474 - protein, 1119 aa, Escherichia coli 3-475-03_S1_C2; identical to SEQ ID NO: 25418

SEQ ID NO: 25475 - protein, 2104 aa, Escherichia coli 4-203-08_S3_C2
MDVQQLHYAPLLNQLHQRAVRSVVSQLALRSKSLTHYLESQYFQPPGQEGSLLADPVFESTFGWMPADETMEDLRDKLISSPLVDALSKAPVPFRHQLTAWRTILEDKKSLLVSSGTGSGKTECFMVPVLEDLIRQQKSPRQSLTGTQAIFLYPLNALINSQQERLREWTRGFKGKIRFALYNGETRHTKYEIQEDQLKVPEQALSREAIYEAPPSIMVTNTTMLEYMLIRRKDAPIIEKSQGMLKYIVLDEAHSYIGSQAAELALLLRRVMQAFNVGPGTDKPVQIIATSATIGEDSPEGNKELAKFVADLAGVTERDVKVVRGYRQIPRVSESLIRHEYPTSLTSLKSLSPQDLYQQLCHYRVAQQLRQALTHPGRQAVRLSELLNVARRTWPDINHRELLQLLDLMARSREGELAFTPLRMHGFIRTLAGLWACSNKQCSHKAHELNQSDWPFGQVWFEQRQYCDCGAPVFEVLRCSGCGSAYLSAKEEMRGDGTNWLVAQPAAAEVDEFALDVDVYSEDEDNDELDNNSQFDRLIASDGEKYIISLEETTAGKIDSEAQKHYEINLLRPESRGEGRNNSFACVCCGDTQRKNNPLFRPLRLGAPFFLNEIIPTLLEFSPLPQTREEQLGPFNGRRLLTFTDSRQGTARISARLQQDADKATLRALCYQELANITEPSAKLSPAHCALLEKVISQFSVLPLKNSIDALKKAMAANEELSPTDIQALKIIEPMVSSLSPDHAEAMQILQANSGNQQKKTMSWQTLSEQLVGSVDLADRMRGSFKELSGLDLTKQQFADFCLYSEFGRRPKNAWTLESLGLVAIHYPFIDKVTTCPQDWKTLLPDPDKQLAEWRNLLKITLDFFIRENSAVFYENEQYPRWMGARFPVKMLQGPDKKNKGQKRDQLWPQIRDRHYNRVIKLLIAVFPAIQPEQAHWKSLVNHLMIEVWDAIRPCLRQFESGYQLDIKQQAEFYSPKQVWRCPYTRRALDVTLLGYSPYLPGSKEIAPEKAVLIEMPELPVRHWRLSGGGEIAREERLEWLESNALIQHAREEGLWSTRSDRLALKDSWYRLEEHSAQRTPEQNQFNEKQFKSGKVNVLNCSTTMEMGVDIGGMSLVAMNNVPPAPANYLQRAGRAGRRGESASAAITLCKNTAHGMEVFKDPLWAFNTTASAPRVRFGSSSIVQRHVNALVLGLFLRAEVPDATKLSCKWFFEGDESQCFRFLHWLNHQADQLADKLKRLTQGTVLMSLTATQLLTRTQAMMQQVDIRWRSQLAILLENIEALKADNSAWEETPAGKAIAYQLRDYRGAYLFSKLISEAFLPGHGFPVGVVNFNYLTADELEKRRAIKATQADPNEGGESFSRRIEKLPSRDLPTALREYAPGADVVLGGKVYRSSGIMLGKVLASGQELSGDHHIPWFWHCRKCGAGATSTTRPVECSHCKADIQQLDVKRYLQPVGFATDIRYQAHNDVSMPAQLPWKDPRVLVPSSVWVSLPDAGLGRYRFSHSGELFHFSEGEFGHGYAICLSCGRAESQTQPQRTPENLKNPERENTHYLLRGGSNDRQGSNKLCHGHVHKDLWLGYSSRTDMVELQLNDDNGLLIRDEVAARSLAVALREGLAHKLGIENTELGVTTQQARDINGYTGYSIFIYDNNAGGAGYAVQLIDHWADVFNYARKLLDCSCDKFCHHCLLSYDSQHYVNRLDRHHALTLLTNVRLQRLNLAPEYQYFGDGSRVETNPLSLRIAQCLNSEIYDSCSLVLAGPQEQWDFAQWPLFKELLQFASSGGHVELLVATPLANLTDSSRHQLSALAAMPGGRLQVKSIATAQLMQGKGRWLAQVTREGQSQQWAADDSATVAPGELWGQSASSPVVTLKGTSGKTFSGQTLSAEDLLPALPTGAVRINLCEQLDGPLEGFGSRFWSLVTQQHAGWKQAFTRHKEITHVEYSDRYLNSPFTARLLGEILTELVEQGMAERASLTVCVKKLDYNSRQHDALYNAWLNEEDRQQVVTTLLEEGYLGPAWPGAISWLTGDNQSTEHGRELTVTFSDGSQHYVLLDMGLSYWRCIEDTFFDFALRLPQQVERLANTRARAVAPGNDLRSYIIAG

SEQ ID NO: 25476 - protein, 1119 aa, Escherichia coli 4-203-08_S3_C2
MLVKTPVNPLLQWLNMFFSRRSLSGADGRALYAYRCTDTEYESLAELLRTYAPRSYPRTIFISYSDVLFSIYAAEFIRRTHTVGHPKWDTILDSINWKVPYVHRQKLVNDGIRYWKRKIRNLGQASGYLHTLACEGGLPIRMIENESGYLITYFRRIYQALRGQSSQYPAAKIAQELGDTIPVTMQNELVYEIAGEFCETLCRLLSEHPPHSSDPVSALRKLSPDWHLQLPLVLPEANAAEIVRRLLSQSSEIRSASSLQVERIWVDVDDSWYCDARFRFPATMRTEQLTSLFECHIQPEQTRLIISGKWKNGGARLAMLSRYEQQDWRVELLPIAMQKLSGADAMAEISLSLHEGPILLGHTIPKGGYELTEELPWVFEAMNESESQLKLVGMGSVSSRLNALFISLPKNSHLDISGEGEFDIPRLLKNSERSLTKISGVFSVVLHDGAVCTIRTQQLYDSAIEYYIKSTEVELVKSDYPVHRAWPKIGWKKDLQYGIVPEKELFWRSIRSGNNAWYSVASEMPKGQIEVRRIVNDEVLFSGKVVVLPADFDINIIPESAQQGIIMLSGITDTRIDKYSNNEKVTLKSDYSQNECAIYYNSSLMLENTVDLRVSWKDGSNLKLLLPKPVSGGRFVTNDGSVHFDGVASIAHLHGIDAELLTISCAGRGYLNIELLDENPVAEKFRYLHADLPLLSGRNDKLQQISLYENYNLLNAMLACAWNSNSTLCVDFYSDRFGKDKATLNIKRYDGSFIEHDQGLLVDIKNSVVFPANRIDELVVDAISLKNPGLHISLLKKDEFAYNLSALNVQDSPWLIVGKLDGTARIAPVIKWMLPVLQTNDLLLNALCEADPEQRKKNFNELIFEIDNNPLQNYCCLLTEYIKKYKMNNGLSLLDLDLFRCISSNYRVVVQLLISSCLSGDSDTIYDIQEELPFSWGWIPVSIWKDVFQKCWTYLEKQINDKTLALHILQPFIAFMNHRAHIDRRLAPIANMLLTYSESLPTGCDVLPTVSREQFNEAKQMLLRNPDSFGRISIFPKELWSSAITPELKSVFNKLWIEDKYHSRLEKRFNLMLVAALLTQKDNNLIHQLSALFEFHYQQAPQQLGVIYQYYFEQAGVCH

SEQ ID NO: 25477 - protein, 2104 aa, Escherichia coli 4-203-08_S3_C3; identical to SEQ ID NO: 25475

SEQ ID NO: 25478 - protein, 1119 aa, Escherichia coli 4-203-08_S3_C3
MLVKTPVNPLLQWLNMFFSRRSLSGADGRALYAYRCTDTEYESLAELLRTYAPRSYPRTIFISYSDVLFSIYAAEFIRRTHTVGHPKWDTILDSINWKVPYVHRQKLVNDGIRYWKRKIRNLGQASGYLHTLACEGGLPIRMIENESGYLITYFRRIYQALRGQSSQYPAAKIAQELGDTIPVTMQNELVYEIAGEFCETLCRLLSEHPPHSSDPVSALRKLSPDWHLQLPLVLPEANAAEIVRRLLSQSSEIRSASSLQVERIWVDVDDSWYCDARFRFPATMRTEQLTSLFECHIQPEQTRLIISGKWKNGGARLAMLSRYEQQDWRGELLPIAMQKLSGADAMAEISLSLHEGPILLGHTIPKGGYELTEELPWVFEAMNESESQLKLVGMGSVSSRLNALFISLPKNSHLDISGEGEFDIPRLLKNSERSLTKISGVFSVVLHDGAVCTIRTQQLYDSAIEYYIKSTEVELVKSDYPVHRAWPKIGWKKDLQYGIVPEKELFWRSIRSGNNAWYSVASEMPKGQIEVRRIVNDEVLFSGKVVVLPADFDINIIPESAQQGIIMLSGITDTRIDKYSNNEKVTLKSDYSQNECAIYYNSSLMLENTVDLRVSWKDGSNLKLLLPKPVSGGRFVTNDGSVHFDGVASIAHLHGIDAELLTISCAGRGYLNIELLDENPVAEKFRYLHADLPLLSGRNDKLQQISLYENYNLLNAMLACAWNSNSTLCVDFYSDRFGKDKATLNIKRYDGSFIEHDQGLLVDIKNSVVFPANRIDELVVDAISLKNPGLHISLLKKDEFAYNLSALNVQDSPWLIVGKLDGTARIAPVIKWMLPVLQTNDLLLNALCEADPEQRKKNFNELIFEIDNNPLQNYCCLLTEYIKKYKMNNGLSLLDLDLFRCISSNYRVVVQLLISSCLSGDSDTIYDIQEELPFSWGWIPVSIWKDVFQKCWTYLEKQINDKTLALHILQPFIAFMNHRAHIDRRLAPIANMLLTYSESLPTGCDVLPTVSREQFNEAKQMLLRNPDSFGRISIFPKELWSSAITPELKSVFNKLWIEDKYHSRLEKRFNLMLVAALLTQKDNNLIHQLSALFEFHYQQAPQQLGVIYQYYFEQAGVCH

SEQ ID NO: 25479 - protein, 2104 aa, Escherichia coli 5.2239; identical to SEQ ID NO: 25235

SEQ ID NO: 25480 - protein, 978 aa, Escherichia coli 5.2239; identical to SEQ ID NO: 25216

SEQ ID NO: 25481 - protein, 2104 aa, Escherichia coli 5412; identical to SEQ ID NO: 25235

SEQ ID NO: 25482 - protein, 978 aa, Escherichia coli 5412; identical to SEQ ID NO: 25216

SEQ ID NO: 25483 - protein, 2114 aa, Escherichia coli 576-1; identical to SEQ ID NO: 25257

SEQ ID NO: 25484 - protein, 734 aa, Escherichia coli 576-1; identical to SEQ ID NO: 25338

SEQ ID NO: 25485 - protein, 2104 aa, Escherichia coli 5905
MDVQQLHYAPLLNQLHQRAVRSVVSQLALRSKSLTHYLESQYFQPPGQEGSLLADPVFESTFGWMPADETMEDLRDKLISSPLVDALSKAPVPFRHQLTAWRTILEDKKSLLVSSGTGSGKTECFMVPVLEDLIRQQKSTRQSLTGTQAIFLYPLNALINSQQERLREWTRGFKGKIRFALYNGETRHTKYEIQEDQLKVPEQALSREAIYEAPPSIMVTNTTMLEYMLIRRKDAPIIEKSQGMLKYIVLDEAHSYIGSQAAELALLLRRVMQAFNVGPGTDKPVQIIATSATIGEDSPEGNKELAKFVADLAGVTERDVKVVRGYRQIPRVSESLIRHEYPTSLTSLKSLSPQDLYQQLCHYRVAQQLRQALTHPGRQAVRLSELLNVARRTWPDINHRELLQLLDLMARSREGELAFTPLRMHGFIRTLAGLWACSNKQCSHKAHELNQSDWPFGQVWFEQRQYCDCGAPVFEVLRCSGCGSAYLSAKEEMRGDGTNWLVAQPAAAEVDEFALDVDVYSEDEDNDELDNNSQFDRLIASGGEKYIISLEETTAGKIDSEAQKHYEINLLRPESRGEGRNNSFACVCCGDTQRKNNPLFRPLRLGAPFFLNEIIPTLLEFSPLPQTREEQLGPFNGRRLLTFTDSRQGTARISARLQQDADKATLRALCYQELANITEPSAKLSPAHCALLEKVISQFSVLPLKNSIDALKKAMAANEELSPTDIQALKIIEPMVSSLSTEHAEAMQILQANSGNQQKKTMSWQTLSEQLVGSVDLADRMRGSFKELSGLDLTKQQFADFCLYSEFGRRPKNAWTLESLGLVAIHYPFIDKVTTCPQDWKTLLPDPDKQLAEWRNLLKITLDFFIRENSAVFYENEQYPRWMGARFPVKMLQGPDKKNKGQKRDQLWPQIRDRHYNRVIKLLIAVFPAIQPEQAHWKSLVNHLMIEVWDAIRPCLRQFESGYQLDIKQQAEFYSPKQVWRCPYTRRALDVTLLGYSPYLPGSKEIAPEKAVLIEMPELPVRHWRLSGGGEIAREERLEWLESNALIQHAREEGLWSTRSDRLALKDSWYRLEEHSAQRTPEQNQFNEKQFKSGKVNVLNCSTTMEMGVDIGGMSLVAMNNVPPAPANYLQRAGRAGRRGESASAAITLCKNTAHGMEVFKDPLWTFNTTASAPRVRFGSSSIVQRHVNALVLGLFLRAEVPDATKLSCKWFFEGDESQCLRFLHWLNHQADQLADKLKRLTQGTVLMSLTATQLLTRTQAMMQQVDIRWRSQLAILLENIEALKADNSAWEETPAGKAIAYQLRDYRGAYLFSKLISEAFLPGHGFPVGVVNFNYLTADELEKRRAIKATQADPNEGGESFSRRIEKLPSRDLPTALREYAPGADVVLGGKVYRSSGIMLGKVLASGQELSGDHHIPWFWHCRKCGAGATSTTHPVECSHCKADIQQLDVKRYLQPVGFATDIRYQAHNDVSMPAQLPWKDPRVLVPSSVWVSLPDAGLGRYRFSHSGELFHFSEGEFGHGYAICLSCGRAESQTQPQRTPENLKNPERENTHYLLRGGSNDRQGSNKLCHGHVHKDLWLGYSSRTDMVELQLNDDNGLLIRDEVAARSLAVALREGLAHKLGIENTELGVTTQQARDINGYTGYSIFIYDNNAGGAGYAVQLIDHWADVFNYARKLLDCSCDKFCHHCLLSYDSQHYVNRLDRHHALTLLTNVRLQRLNLAPEYQYFGDGSRVETNPLSLRIAQCLNSEIYDSCSLVLAGPQEQWDFAQWPLFKELLQFASSGGNVELLVATPLANLTDSSRHQLSALAAMPGGRLQVKSIATAQLMQGKGRWLAQVTREGQSQQWAADDSATVAPGELWGQSASSPVVTLKGTSGKTFSGQTLSAEDLLPALPTGAVRINLCEQLDGPLEGFGSRFWSLVTQQHAGWKQAFTRHKEITHVEYSDRYLNSPFTARLLGEILTELVEQGMAERASLTVCVKKLDYNSRQHDALYNAWLNEEDRQQVVTTLLEEGYLGPAWPGAISWLTGDNQSTEHGRELTVTFSDGSQHYVLLDMGLSYWRCIEDTFFDFALRVPQQVERLANTRARAVAPGNDLRSYIIAG

SEQ ID NO: 25486 - protein, 978 aa, Escherichia coli 5905
MIENESGYLITYFRRIYLALRGQSSQYPAAKIAQELGDTIPVTMQNELVYEIAGEFCETLCRLLSEHPPHSSDPVSALRKLSPDWHLQLPLVLPEANAAEIVRRLLSQSSEIRSASSLQVERIWVDVDDSWYCDARFRFPATMRTEQLTSLFECHIQPEQTRLIISGKWKNGGARLAMLSRYEQQDWRVELLPIAMQKLSGADAMAEISLSLHEGPILLGHTIPKGGYELTEELPWVFEAMNESESQLKLVGMGSVSSRLNALFISLPKNSHLDISGEGEFDIPRLLKNSERSLTKISGVFSVVLHDGAVCTIRTQQLYDSAIEYYIKSTEVELVKSDYPVHRAWPKIGWKKDLQCGIVPEKELFWRSIRSGNNAWYSVASEMPKGQIEVRRIVNDEVLFSGKVVVLPADFDINIIPESAQQGIIMLSGITDTRIDKYSNNEKVTLKSDYSQNECAIYYNSSLMLENTVDLRVSWKDGSNLKLLLPKPVSGGRFVTNDGSVHFDGVASIAHLHGIDAELLTISCAGRGYLNIELLDENPVAEKFRYLHADLPLLSGRNDKLQQISLYENYNLLNAMLACAWNSNSTLCVDFYSDRFGKDKATLNIKRYDGSFIEHDQGLLVDIKNSVVFPANRIDELVVDAISLKNPGLHISLLKKDEFAYDLSALNVQDSPWLIVGKLDGTARIAPVIKWMLPVLQTNDLLLNALCEADPEQRKKNFNELIFEIDNNPLQNYCCLLTEYIKKYKMNNGLSLLDLDLFRGISSNYRVVVQLLISSCLSGDSDTIYDIQEELPFSWGWIPVSIWKDVFQKCWTYLEKQINDKTLALHILQPFIAFMNHRAHIDRRLAPIANMLLTYSESLPTGCDVLPTVSREQFNEAKQMLLRNPDSFGRISIFPKELWSSAITPELKSVFNKLWIEDKYHSRLEKRFNLMLVAALLTQKDNNLIHQLSALFEFHYQQAPQQLGVIYQYYFEQAGVCH

SEQ ID NO: 25487 - protein, 2104 aa, Escherichia coli 6-175-07_S4_C1
MDVQQLHYAPLLNQLHQRAVRSVVSQLALRSKSLTHYLESQYFQPPGQEGSLLADPVFESTFGWMPADETMEDLRDKLISSPLVDALSKAPVPFRHQLTAWRTILEDKKSLLVSSGTGSGKTECFMVPVLEDLIRQQKSPRQSLTGTQAIFLYPLNALINSQQERLREWTRGFKGKIRFALYNGETRHTKYEIQEDQLKVPEQALSREAIYEAPPSIMVTNTTMLEYMLIRRKDAPIIEKSQGMLKYIVLDEAHSYIGSQAAELALLLRRVMQAFNVGPGTDKPVQIIATSATIGEDSPEGNKELAKFVADLAGVTERDVKVVRGYRQIPRVSESLIRHEYPTSLTSLKSLSPQDLYQQLCHYRVAQQLRQALTHPGRQAVRLSELLNVARRTWPDINHRELLQLLDLMARSREGELAFTPLRMHGFIRTLAGLWACSNKQCSHKAHELNQSDWPFGQVWFEQRQYCDCGAPVFEVLRCSGCGSAYLSAKEEMRGDGTNWLVAQPAAAEVDEFALDVDVYSEDEDNDELDNNSQFDRLIASDGEKYIISLEETTAGKIDSEAQKHYEINLLRPESRGEGRNNSFACVCCGDTQRKNNPLFRPLRLGAPFFLNEIIPTLLEFSPLPQTREEQLGPFNGRRLLTFTDSRQGTARISARLQQDADKATLRALCYQELANITEPSAKLSPAHCALLEKVISQFSVLPLKNSIDALKKAMAANEELSPTDIQALKIIEPMVSSLSPDHAEAMQILQANSGNQQKKTMSWQTLSEQLVGSVDLADRMRGSFKELSGLDLTKQQFADFCLYSEFGRRPKNAWTLESLGLVAIHYPFIDKVTTCPQDWKTLLPDPDKQLAEWRNLLKITLDFFIRENSAVFYENEQYPRWMGARFPVKMLQGPDKKNKGQKRDQLWPQIRDRHYNRVIKLLIAVFPAIQPEQAHWKSLVNHLMIEVWDAIRPCLRQFESGYQLDIKQQAEFYSPKQVWRCPYTRRALDVTLLGYSPYLPGSKEIAPEKAVLIEMPELPVRHWRLSGGGEIAREERLEWLESNALIQHAREEGLWSTRSDRLALKDSWYRLEEHSAQRTPEQNQFNEKQFKSGKVNVLNCSTTMEMGVDIGGMSLVAMNNVPPAPANYLQRAGRAGRRGESASAAITLCKNTAHGMEVFKDPLWAFNTTASAPRVRFGSSSIVQRHVNALVLGLFLRAEVPDATKLSCKWFFEGDESQCFRFLHWLNHQADQLADKLKRLTQGTVLMSLTATQLLTRTQAMMQQVDIRWRSQLAILLENIEALKADNSAWEETPAGKAIAYQLRDYRGAYLFSKLISEAFLPGHGFPVGVVNFNYLTADELEKRRAIKATQADPNEGGESFSRRIEKLPSRDLPTALREYAPGADVVLGGKVYRSSGIMLGKVLASGQELSGDHHIPWFWHCRKCGAGATSTTRPVECSHCKADIQQLDVKRYLQPVGFATDIRYQAHNDVSMPAQLPWKDPRVLVPSSVWVSLPDAGLGRYRFSHSGELFHFSEGEFGHGYAICLSCGRAESQTQPQRTPENLKNPERENTHYLLRGGSNDRQGSNKLCHGHVHKDLWLGYSSRTDMVELQLNDDNGLLIRDEVAARSLAVALREGLAHKLGIENTELGVTTQQARDINGYTGYSIFIYDNNAGGAGYAVQLIDHWADVFNYARKLLDCSCDKFCHHCLLSYDSQHYVNRLDRHHALTLLTNVRLQRLNLAPEYQYFGDGSRVETNPLSLRIAQCLNSEIYDSCSLVLAGPQEQWDFAQWPLFKELLQFASSGGHVELLVATPLANLTDSSRHQLSALAAMPGGRLQVKSIATAQLMQGKGRWLAQVTREGQSQQWAADDSATVAPGELWGQSASSPVVTLKGTSGKTFSGQTLSAEDLLPALPTGAVRINLCEQLDGPLEGFGSRFWSLVTQQHAGWKQAFPRHKEITHVEYSDRYLNSPFTARLLGEILTELVEQGMAERASLTVCVKKLDYNSRQHDALYNAWLNEEDRQQVVTTLLEEGYLGPAWPGAISWLTGDNQSTEHGRELTVTFSDGSQHYVLLDMGLSYWRCIEDTFFDFALRLPQQVERLANTRARAVAPGNDLRSYIIAG

SEQ ID NO: 25488 - protein, 1119 aa, Escherichia coli 6-175-07_S4_C1; identical to SEQ ID NO: 25476

SEQ ID NO: 25489 - protein, 2104 aa, Escherichia coli 6-175-07_S4_C2; identical to SEQ ID NO: 25487

SEQ ID NO: 25490 - protein, 1119 aa, Escherichia coli 6-175-07_S4_C2; identical to SEQ ID NO: 25478

SEQ ID NO: 25491 - protein, 2104 aa, Escherichia coli 6-175-07_S4_C3; identical to SEQ ID NO: 25475

SEQ ID NO: 25492 - protein, 978 aa, Escherichia coli 6-175-07_S4_C3
MIENESGYLITYFRRIYQALRGQSSQYPAAKIAQELGDTIPVTMQNELVYEIAGEFCETLCRLLSEHPPHSSDPVSALRKLSPDWHLQLPLVLPEANAAEIVRRLLSQSSEIRSASSLQVERIWVDVDDSWYCDARFRFPATMRTEQLTSLFECHIQPEQTRLIISGKWKNGGARLAMLSRYEQQDWRVELLPIAMQKLSGADAMAEISLSLHEGPILLGHTIPKGGYELTEELPWVFEAMNESESQLKLVGMGSVSSRLNALFISLPKNSHLDISGEGEFDIPRLLKNSERSLTKISGVFSVVLHDGAVCTIRTQQLYDSAIEYYIKSTEVELVKSDYPVHRAWPKIGWKKDLQYGIVPEKELFWRSIRSGNNAWYSVASEMPKGQIEVRRIVNDEVLFSGKVVVLPADFDINIIPESAQQGIIMLSGITDTRIDKYSNNEKVTLKSDYSQNECAIYYNSSLMLENTVDLRVSWKDGSNLKLLLPKPVSGGRFVTNDGSVHFDGVASIAHLHGIDAELLTISCAGRGYLNIELLDENPVAEKFRYLHADLPLLSGRNDKLQQISLYENYNLLNAMLACAWNSNSTLCVDFYSDRFGKDKATLNIKRYDGSFIEHDQGLLVDIKNSVVFPANRIDELVVDAISLKNPGLHISLLKKDEFAYNLSALNVQDSPWLIVGKLDGTARIAPVIKWMLPVLQTNDLLLNALCEADPEQRKKNFNELIFEIDNNPLQNYCCLLTEYIKKYKMNNGLSLLDLDLFRCISSNYRVVVQLLISSCLSGDSDTIYDIQEELPFSWGWIPVSIWKDVFQKCWTYLEKQINDKTLALHILQPFIAFMNHRAHIDRRLAPIANMLLTYSESLPTGCDVLPTVSREQFNEAKQMLLRNPDSFGRISIFPKELWSSAITPELKSVFNKLWIEDKYHSRLEKRFNLMLVAALLTQKDNNLIHQLSALFEFHYQQAPQQLGVIYQYYFEQAGVCH

SEQ ID NO: 25493 - protein, 2114 aa, Escherichia coli 6-319-05_S1_C1; identical to SEQ ID NO: 25453

SEQ ID NO: 25494 - protein, 648 aa, Escherichia coli 6-319-05_S1_C1
MFHSETNLANTDYRENRSMILSGLSLWEKGSPLHKSTQQVRTQGPIRHAGCRQRKLADFLCTGGIIQEMLGAQYLSIRNSNNETLLRRKIGILPADFSIEIKGGMHANEGTIVITTQHPCVAKLKDKTLEATRKRTEGRTEIQLKAEGVPPAFITLQVLPNLAADPIDIELPFPAKGCLALDVNGRPLDKNITLHDLLGSRAFLFSRNGEPTKYTLQLYLRSVSGLQAWHEWCYTALSDRPVELNLYSLREHIENLISLEAGIDQVVEMRITGAGVVMAWQIRRYKYSLRYDYEKELLLSQSVNHRAGQIPSPVIMLLSEPERKSIPLASRMSEGVPVGEYELSSIVNKNGPWLVVPKPGEEMAFRPCFIRGESSLPVEESNIRSLQKATQLFNPQAEVNTITRVLGQMANDPAHSGWQFMRSLYDQFGYLPLATFEVWRALVQHPQALAMSLFKFEMSAEYLSRIENEFPILWEFFPIFEIKAASERFKLFLSQKGAPEETQKLLVTNMFQRLGLVFPTYADEIEKWLSNGYLPPSIPESCVHGWYQELLREHSEARWPEYGCKRLYEWMMSQKNPVIGINPDADYRYSVAWLPVFAAAVASGNASFESVFDRKPGAVFFLRQVRDFDSRWFKAIFQCSLLRYVAKK

SEQ ID NO: 25495 - protein, 2114 aa, Escherichia coli 6-319-05_S1_C2; identical to SEQ ID NO: 25453

SEQ ID NO: 25496 - protein, 648 aa, Escherichia coli 6-319-05_S1_C2
MFHSETNLANTDYRENRSMILSGLSLWEKGSPLHKSTQQVRTQGPIRHADCRQRKLADFLCTGGIIQEMLGAQYLSIRNSNNETLLRRKIGILPADFSIEIKGGMHANEGTIVITTQHPCVAKLKDKTLEATRKRTEGRTEIQLKAEGVPPAFITLQVLPNLAADPIDIELPFPAKGCLALDVNGRPLDKNITLHDLLGSRAFLFSRNGEPTKYTLQLYLRSVSGLQAWHEWCYTALSDRPVELNLYSLREHIENLISLEAGIDQVVEMRITGAGVVMAWQIRRYKYSLRYDYEKELLLSQSVNHRAGQIPSPVIMLLSEPERKSIPLASRMSEGVPVGEYELSSIVNKNGPWLVVPKPGEEMAFRPCFIRGESSLPVEESNIRSLQKATQLFNPQAEVNTITRVLGQMANDPAHSGWQFMRSLYDQFGYLPLATFEVWRALVQHPQALAMSLFKFEMSAEYLSRIENEFPILWEFFPIFEIKAASERFKLFLSQKGAPEETQKLLVTNMFQRLGLVFPTYADEIEKWLSNGYLPPSIPESCVHGWYQELLREHSEARWPEYGCKRLYEWMMSQKNPVIGINPDADYRYSVAWLPVFAAAVASGNASFESVFDRKPGAVFFLRQVRDFDSRWFKAIFQCSLLRYVAKK

SEQ ID NO: 25497 - protein, 2114 aa, Escherichia coli 6-319-05_S1_C3; identical to SEQ ID NO: 25453

SEQ ID NO: 25498 - protein, 648 aa, Escherichia coli 6-319-05_S1_C3; identical to SEQ ID NO: 25496

SEQ ID NO: 25499 - protein, 2104 aa, Escherichia coli 6-537-08_S4_C1
MDVQQLHYAPLLNQLHQRAVRSVVSQLALRSKSLTHYLESQYFQPPGQEGSLLADPVFESTFGWMPADETMEDLRDKLISSPLVDALSKAPVPFRHQLTAWRTILEDKKSLLVSSGTGSGKTECFMVPVLEDLIRQQKSPRQSLTGTQAIFLYPLNALINSQQERLREWTRGFKGKIRFALYNGETRHTKYEIQEDQLKVPEQALSREAIYEAPPSIMVTNTTMLEYMLIRRKDAPIIEKSQGMLKYIVLDEAHSYIGSQAAELALLLRRVMQAFNVGPGTDKPVQIIATSATIGEDSPEGNKELAKFVADLAGVTERDVKVVRGYRQIPRVSESLIRHEYPTSLTSLKSLSPQDLYQQLCHYRVAQQLRQALTHPGRQAVRLSELLNVARRTWPDINHRELLQLLDLMARSREGELAFTPLRMHGFIRTLAGLWACSNKQCSHKAHELNQSDWPFGQVWFEQRQYCDCGAPVFEVLRCSGCGSAYLSAKEEMRGDGTNWLVAQPAAAEVDEFALDVDVYSEDEDNDELDNNSQFDRLIASDGEKYIISLEETTAGKIDSEAQKHYEINLLRPESRGEGRNNSFACVCCGDTQRKNNPLFRPLRLGAPFFLNEIIPTLLEFSPLPQTREEQLGPFNGRRLLTFTDSRQGTARISARLQQDADKATLRALCYQELANITEPSAKLSPAHCALLEKVISQFSVLPLKNSIDALKKAMAANEELSPTDIQALKIIEPMVSSLSPDHAEAMQILQANSGNQQKKTMSWQTLSEQLVGSVDLADRMRGSFKELSGLDLTKQQFADFCLYSEFGRRPKNAWTLESLGLVAIHYPFIDKVTTCPQDWKTLLPDPDKQLAEWRNLLKITLDFFIRENSAVFYENEQYPRWMGARFPVKMLQGPDKKNKGQKRDQLWPQIRDRHYNRVIKLLIAVFPAIQPEQAHWKSLVNHLMIEVWDAIRPCLRQFESGYQLDIKQQAEFYSPKQVWRCPYTRRALDVTLLGYSPYLPGSKEIAPEKAVLIEMPELPVRHWRLSGGGEIAREERLEWLESNALIQHAREEGLWSTRSDRLALKDSWYRLEEHSAQRTPEQNQFNEKQFKSGKVNVLNCSTTMEMGVDIGGMSLVAMNNVPPAPANYLQRAGRAGRRGESASAAITLCKNTAHGMEVFKDPLWAFNTTASAPRVRFGSSSIVQRHVNALVLGLFLRAEVPDATKLSCKWFFEGDESQCFRFLHWLNHQADQLADKLKRLTQGTVLMSLTATQLLTRTQAMMQQVDIRWRSQLAILLENIEALKADNSAWEETPAGKAIAYQLRDYRGAYLFSKLISEAFLPGHGFPVGVVNFNYLTADELEKRRAIKATQADPNEGGESFSRRIEKLPSRDLPTALREYAPGADVVLGGKVYRSSGIMLGKVLASGQELSGDHHIPWFWHCRKCGAGATSTTRPVECSHCKADIQQLDVKRYLQPVGFATDIRYQAHNDVSMPAQLPWKDPRVLVPSSVWVSLPDAGLGRYRFSHSGELFHFSEGEFGHGYAICLSCGRAESQTQPQRTPENLKNPERENTHYLLRGGSNDRQGSNKLCHGHVHKDLWLGYSSRTDMVELQLNDDNGLLIRDEVAARSLAVALREGLAHKLGIENTELGVTTQQARDINGYTGYSIFIYDNNAGGAGYAVQLIDHWADVFNYARKLLDCSCDKFCHHCLLSYDSQHYVNRLDRHHALTLLTNVRLQRLNLAPEYQYFGDGSRVETNPLSLRIAQCLNSEIYDSCSLVLAGPQEQWDFAQWPLFKELLQFASSGGHVELLVATPLANLTDSSRHQLSALAAMPGGRLQVKSIATAQLMQGKGRWLAQVTREGQSQQWAADDSATVAPGELWGQSASSPVVTLKGTSGKTFSGQTLSAEDLLPALPTGAVRINLCEQLDGPLEGFGSRFWSLVTQQPAGWKQAFPRHKEITHVEYSDRYLNSPFTARLLGEILTELVEQGMAERASLTVCVKKLDYNSRQHDALYNAWLNEEDRQQVVTTLLEEGYLGPAWPGAISWLTGDNQSTEHGRELTVTFSDGSQHYVLLDMGLSYWRCIEDTFFDFALRLPQQVERLANTRARAVAPGNDLRSYIIAG

SEQ ID NO: 25500 - protein, 1119 aa, Escherichia coli 6-537-08_S4_C1
MLVKTPVNPLLQWLNMFFSRRSLSGADGRALYAYRCTDTEYESLAELLRTYAPRSYPRTIFISYSDVLFSIYAAEFIRRTHTVGHPKWDTILDSINWKVPYVHRQKLVNDGIRYWKRKIRNLGQASGYLHTLACEGGLPIRMIENESGYLITYFRRIYQALRGQSSQYPAAKIAQELGDTIPVTMQNELVYEIAGEFCETLCRLLSEHPPHSSDPVSALRKLSPDWHLQLPLVLPEANAAEIVRRLLSQSSEIRSASSLQVERIWVDVDDSWYCDARFRFPATMRTEQLTSLFECHIQPEQTRLIISGKWKNGGARLAMLSRYEQQDWRGELLPISMQKLSGADAMAEISLSLHEGPILLGHTIPKGGYELTEELPWVFEAMNESESQLKLVGMGSVSSRLNALFISLPKNSHLDISGEGEFDIPRLLKNSERSLTKISGVFSVVLHDGAVCTIRTQQLYDSAIEYYIKSTEVELVKSDYPVHRAWPKIGWKKDLQYGIVPEKELFWRSIRSGNNAWYSVASEMPKGQIEVRRIVNDEVLFSGKVVVLPADFDINIIPESAQQGIIMLSGITDTRIDKYSNNEKVTLKSDYSQNECAIYYNSSLMLENTVDLRVSWKDGSNLKLLLPKPVSGGRFVTNDGSVHFDGVASIAHLHGIDAELLTISCAGRGYLNIELLDENPVAEKFRYLHADLPLLSGRNDKLQQISLYENYNLLNAMLACAWNSNSTLCVDFYSDRFGKDKATLNIKRYDGSFIEHDQGLLVDIKNSVVFPANRIDELVVDAISLKNPGLHISLLKKDEFAYNLSALNVQDSPWLIVGKLDGTARIAPVIKWMLPVLQTNDLLLNALCEADPEQRKKNFNELIFEIDNNPLQNYCCLLTEYIKKYKMNNGLSLLDLDLFRCISSNYRVVVQLLISSCLSGDSDTIYDIQEELPFSWGWIPVSIWKDVFQKCWTYLEKQINDKTLALHILQPFIAFMNHRAHIDRRLAPIANMLLTYSESLPTGCDVLPTVSREQFNEAKQMLLRNPDSFGRISIFPKELWSSAITPELKSVFNKLWIEDKYHSRLEKRFNLMLVAALLTQKDNNLIHQLSALFEFHYQQAPQQLGVIYQYYFEQAGVCH

SEQ ID NO: 25501 - protein, 2104 aa, Escherichia coli 6-537-08_S4_C2; identical to SEQ ID NO: 25475

SEQ ID NO: 25502 - protein, 1119 aa, Escherichia coli 6-537-08_S4_C2; identical to SEQ ID NO: 25476

SEQ ID NO: 25503 - protein, 2104 aa, Escherichia coli 7.1982
MDVQQLHYAPLLNQLHQRAVRSVVSQLALRSKSLTHYLESQYFQPPGQEGSLLADPVFESTFGWMPADETMEDLRDKLISSPLVDALSKAPVPFRHQLTAWRTILEDKKSLLVSSGTGSGKTECFMVPVLEDLIRQQKSTRQSLTGTQAIFLYPLNALINSQQERLREWTRGFKGKIRFALYNGETRHTKYEIQEDQLKVPEQALSREAIYEAPPSIMVTNTTMLEYMLIRRKDAPIIEKSQGMLKYIVLDEAHSYIGSQAAELALLLRRVMQAFNVGPGTDKPVQIIATSATIGEDSPEGNKELAKFVADLAGVTERDVKVVRGYRQIPRVSESLIRHEYPTSLTSLKSLSPQDLYQQLCHYRVAQQLRQALTHPGRQAVRLSELLNVARRTWPDINHRELLQLLDLMARSREGELAFTPLRMHGFIRTLAGLWACSNKQCSHKAHELNQSDWPFGQVWFEQRQYCDCGAPVFEVLRCSGCGSAYLSAKEEMRGDGTNWLVAQPAAAEVDEFALDVDVYSEDEDNDELDNNSQFDRLIASDGEKYIISLEETTAGKIDSEAQKHYEINLLRPESRGEGRNNSFACVCCGDTQRKNNPLFRPLRLGAPFFLNEIIPTLLEFSPLPQTREEQLGPFNGRRLLTFTDSRQGTARISARLQQDADKATLRALCYQELANITEPSAKLSPAHCALLEKVISQFSVLPLKNSIDALKKAMAANEELSPTDIQALKIIEPMVSSLSTEHAEAMQILQANSGNQQKKTMSWQTLSEQLVGSVDLADRMRGSFKELSGLDLTKQQFADFCLYSEFGRRPKNAWTLESLGLVAIHYPFIDKVTTCPQDWKTLLPDPDKQLAEWRNLLKITLDFFIRENSAVFYENEQYPRWMGARFPVKMLQGPDKKNKGQKRDQLWPQIRDRHYNRVIKLLIAVFPAIQPEQAHWKSLVNHLMIEVWDAIRPCLRQFESGYQLDIKQQAEFYSPKQVWRCPYTRRALDVTLLGYSPYLPGSKEIAPEKAVLIEMPELPVRHWRLSGGGEIAREERLEWLESNALIQHAREEGLWSTRSDRLALKDSWYRLEEHSAQRTPEQNQFNEKQFKSGKVNVLNCSTTMEMGVDIGGMSLVAMNNVPPAPANYLQRAGRAGRRGESASAAITLCKNTAHGMEVFKDPLWAFNTTASAPRVRFGSSSIVQRHVNALVLGLFLRAEVPDATKLSCKWFFEGDESQCLRFLHWLNHQADQLADKLKRLTQGTVLMSLTATQLLTRTQAMMQQVDIRWRSQLAILLENIEALKADNSAWEETPAGKAIAYQLRDYRGAYLFSKLISEAFLPGHGFPVGVVNFNYLTADELEKRRAIKATQADPNEGGESFSRRIEKLPSRDLPTALREYAPGADVVLGGKVYRSSGIMLGKVLASGQELSGDHHIPWFWHCRKCGAGATSTTHPVECSHCKADIQQLDVKRYLQPVGFATDIRYQAHNDVSMPAQLPRKDPRVLVPSSVWVSLPDAGLGRYRFSHSGELFHFSEGEFGHGYAICLSCGRAESQTQPQRTPENLKNPERENTHYLLRGGSNDRQGSNKLCHGHVHKDLWLGYSSRTDMVELQLNDDNGLLIRDEVAARSLAVALREGLAHKLGIENTELGVTTQQARDINGYTGYSIFIYDNNAGGAGYAVQLIDHWADVFNYARKLLDCSCDKFCHHCLLSYDSQHYVNRLDRHHALTLLTNVRLQRLNLAPEYQYFGDGSRVETNPLSLRIAQCLNSEIYDSCSLVLAGPQEQWDFAQWPLFKELLQFASSGGNVELLVATPLANLTDSSRHQLSALAAMPGGRLQVKSIATAQLMQGKGRWLAQVTREGQSQQWAADDSATVAPGELWGQSASSPVVTLKGTSGKTFSGQTLSAEDLLPALPTGAVRINLCEQLDGPLEGFGSRFWSLVTQQHAGWKQAFTRHKEITHVEYSDRYLNSPFTARLLGEILTELVEQGMAERASLTVCVKKLDYNSRQHDALYNAWLNEEDRQQVVTTLLEEGYLGPAWPGAISWLTGDNQSTEHGRELTVTFSDGSQHYVLLDMGLSYWRCIEDTFFDFALRVPQQVERLANTRARAVAPGNDLRSYIIAG

SEQ ID NO: 25504 - protein, 978 aa, Escherichia coli 7.1982
MIENESGYLITYFRRIYQALRGQSSQYPAAKIAQELGDTIPVTMQNELVYEIAGEFCETLSRLLSEHPPHSSDPVSALRKLSPDWHLQLPLVLPEANAAEIVRRLLSQSSEIRSASSLQVERIWVDVDDSWYCDARFRFPATMRTEQLTSLFECHIQPEQTRLIISGKWKNGGARLAMLSRYEQQDWRVELLPIAMQKLSGADAMAEISLSLHEGPILLGHTIPKGGYELTEELPWVFEAMNESESQLKLVGMGSVSSRLNALFISLPKNSHLDISGEGEFDIPRLLKNSERSLTKISGVFSVVLHDGAVCTIRTQQLYDSAIEYYIKSTEVELVKSDYPVHRAWPKIGWKKDLQYGIVPEKELFWRSIRSGNNAWYSVASEMPKGQIEVRRIVNDEVLFSGKVVVLPADFDINIIPESAQQGIIMLSGITDTRIDKYSNNEKVTLKSDYSQNECAIYYNSSLMLENTVDLRVSWKDGSNLKLLLPKPVSGGRFVTNDGSVHFDGVASIAHLHGIDAELLTISCAGRGYLNIELLDENPVAEKFRYLHADLPLLSGRNDKLQQISLYENYNLLNAMLACAWNSNSTLCVDFYSDRFGKDKATLNIKRYDGSFIEHDQGLLVDIKNSVVFPANRIDELVVDAISLKNPGLHISLLKKDEFAYDLSALNVQDSPWLIVGKLDGTARIAPVIKWMLPVLQTNDLLLNALCEADPEQRKKNFNELIFEIDNNPLQNYCCLLTEYIKKYKMNNGLSLLDLDLFRGISSNYRVVVQLLISSCLSGDSDTIYDIQEELPFSWGWIPVSIWKDVFQKCWTYLEKQINDKTLALHILQPFIAFMNHRAHIDRRLAPIANMLLTYSESLPTGCDVLPTVSREQFNEAKQMLLRNPDSFGRISIFPKELWSSAITPELKSVFNKLWIEDKYHSRLEKRFNLMLVAALLTQKDNNLIHQLSALFEFHYQQAPQQLGVIYQYYFEQAGVCH

SEQ ID NO: 25505 - protein, 2104 aa, Escherichia coli 8.0416; identical to SEQ ID NO: 25265

SEQ ID NO: 25506 - protein, 738 aa, Escherichia coli 8.0416
MNESESQLKLVGMGSVSSRLNALFISLPKNSHLDISGEGEFDIPRLLKNSERSLTKISGVFSVVLHDGAVCTIRTQQLYDSAIEYYIKSTEVELVKSDYPVHRAWPKIGWKKDLQYGIVPEKELFWRSIRSGNNAWYSVASEMPKGQIEVRRIVNDEVLFSGKVVVLPADFDINIIPESAQQGIIMLSGITDTRIDKYSNNEKVTLKSDYSQNECAIYYNSSLMLENTVDLRVSWKDGSNLKLLLPKPVSGGRFVTNDGSVHFDGVASIAHLHGIDAELLTISCAGRGYLNIELLDENPVAEKFRYLHADLPLLSGRNDKLQQISLYENYNLLNAMLACAWNSNSTLCVDFYSDRFGKDKATLNIKRYDGSFIEHDQGLLVDIKNSVVFPANRIDELVVDAISLKNPGLHISLLKKDEFAYDLSALNVQDSPWLIVGKLDGTARIAPVIKWMLPVLQTNDLLLNALCEADPEQRKKNFNELIFEIDNNPLQNYCCLLTEYIKKYKMNNGLSLLDLDLFRGISSNYRVVVQLLISSCLSGDSDTIYDIQEELPFSWGWIPVSIWKDVFQKCWTYLEKQINDKTLALHILQPFIAFMNHRAHIDRRLAPIANMLLTYSESLPTGCDVLPTVSREQFNEAKQMLLRNPDSFGRISIFPKELWSSAITPELKSVFNKLWIEDKYHSRLEKRFNLMLVAALLTQKDNNLIHQLSALFEFHYQQAPQQLGVIYQYYFEQAGVCH

SEQ ID NO: 25507 - protein, 2104 aa, Escherichia coli 8.0586; identical to SEQ ID NO: 25235

SEQ ID NO: 25508 - protein, 978 aa, Escherichia coli 8.0586; identical to SEQ ID NO: 25216

SEQ ID NO: 25509 - protein, 2104 aa, Escherichia coli 8.2524; identical to SEQ ID NO: 25311

SEQ ID NO: 25510 - protein, 978 aa, Escherichia coli 8.2524
MIENESGYLITYFRRIYQALRGQSSQYPAAKIAQELGDTIPVTMQNELVYEIAGEFCETLCRLLSEHPPHSSDPVSALRKLSPDWHLQLPLVLPEANAAEIVRRLLSQSSEIRSASSLQVERIWVDVDDSWYCDARFRFPATMRTEQLTSLFECHIQPEQTRLIISGKWKNGGARLAMLSRYEQQDWRVELLPIAMQKLSGADAMAEISLSLHEGPILLGHTIPKGGYELTEELPWVFEAMNESESQLKLVGMGSVSSRLNALFISLPKNSHLDISGEGEFDIPRLLKNSERSLTKISGVFSVVLHDGAVCTIRTQQLYDSAIEYYIKSTEVELVKSDYPVHRAWPKIGWKKDLQYGIVPEKELFWRSIRSGNNAWYSVASEMPKGQIEVRRIVNDEVLFSGKVVVLPADFDINIIPESAQQGIIMLSGITDTRIDKYSNNEKVTLKSDYSQNECAIYYNSSLMLENTVDLRVSWKDGSNLKLLLPKPVSGGRFVTNDGSVHFDGVASIAHLHGIDAELLTISCAGRGYLNIELLDENPVAEKFRYLHADLPLLSGRNDKLQQISLYENYNLLNAMLACAWNSNSTLCVDFYSDRFGKDKATLNIKRYDGSFIEHDQGLLVDIKNSVVFPANRIDELVVDAISLKNPGLHISLLKKDEFAYDLSALNVQDSPWLIVGKLDGTARIAPVIKWMLPVLQTNDLLLNALCEADPEQRKKIFNELIFEIDNNPLQNYCCLLTEYIKKYKMNNGLSLLDLDLFRGISSNYRVVVQLLISSCLSGDSDTIYDIQEELPFSWGWIPVSIWKDVFQKCWTYLEKQINDKTLALHILQPFIAFMNHRAHIDRRLAPIANMLLTYSESLPTGCDVLPTVSREQFNEAKQMLLRNPDSFGRISIFPKELWSSAITPELKSVFNKLWIEDKYHSRLEKRFNLMLVAALLTQKDNNLIHQLSALFEFHYQQAPQQLGVIYQYYFEQAGVCH

SEQ ID NO: 25511 - protein, 2104 aa, Escherichia coli 88.0221; identical to SEQ ID NO: 25311

SEQ ID NO: 25512 - protein, 978 aa, Escherichia coli 88.0221; identical to SEQ ID NO: 25216

SEQ ID NO: 25513 - protein, 2104 aa, Escherichia coli 88.1042; identical to SEQ ID NO: 25235

SEQ ID NO: 25514 - protein, 978 aa, Escherichia coli 88.1042; identical to SEQ ID NO: 25216

SEQ ID NO: 25515 - protein, 2104 aa, Escherichia coli 89.0511; identical to SEQ ID NO: 25235

SEQ ID NO: 25516 - protein, 978 aa, Escherichia coli 89.0511; identical to SEQ ID NO: 25216

SEQ ID NO: 25517 - protein, 2104 aa, Escherichia coli 90.0091; identical to SEQ ID NO: 25235

SEQ ID NO: 25518 - protein, 978 aa, Escherichia coli 90.0091; identical to SEQ ID NO: 25216

SEQ ID NO: 25519 - protein, 2104 aa, Escherichia coli 90.2281; identical to SEQ ID NO: 25235

SEQ ID NO: 25520 - protein, 978 aa, Escherichia coli 90.2281; identical to SEQ ID NO: 25216

SEQ ID NO: 25521 - protein, 2104 aa, Escherichia coli 907672; identical to SEQ ID NO: 25343

SEQ ID NO: 25522 - protein, 1104 aa, Escherichia coli 907672
MFFSRRSLSGADGRALYAYRCTDTEYESLAELLRTYAPRSYPRTIFISYSDVLFSIYAAEFIRRTHTVGHPKWDTILDSIDWKVPYVHRQKLVNDGIRYWKRKIRNLGQASGYLHTLACEGGLPIRMIENESGYLITYFRRIYQALRGQASQYPAAKIAQELGDTIPVTMQNELVYEIAGEFCETLCRLLSEHPPQSSDPVSALRKLSPDWHLQLPLVLPEANAAEIVRRLLSQSSEIRSASSLQVERIWVDVDDSWYCDARFRFPATMRTEQLTSLFECNIQPEQTRLIISGKWRNGGARLAMLSRYEQQDWRVELLPIAMQKLSGADAMAEISLSLHEGPILLGHTIPKGGYELTEELPWVFEAMNESESQLKLVGMGSVSSRLNALFISLPKNSHLDISGEGEFDIPRLLKNSERSLTKISGVFSVVLHDGAVCTIRTQQLYDSAIEYYIKSTEVELVKSDYPVHRAWPKIGWKKDLQYGIVPEKELFWRSIRSGNNAWYSVASKMPKGQIEVRRIVNDEVLFSGKVVVLPADFDINIIPESAQQGIIMLSGITDTRIDKYSNNEKVTLKSDYSQNECAIYYNSSEMLENTVDLRVSWKDGSNLKLLLPKPVSGGRFVTHDGSVHFDGVASIAHLHGIDAELLTISCAGRGYLNIELLDENPVAEKFRYLHADLPLLSGCNDKLKQISLYENYNLLNAMLACAWSSNSTLCVDFYSDRFGKDKATLSIKRYDGSFIEHDQGLLVDIKNSVVFPANRIDELVVDAISLKDPGLHISLLKKDEFAYDLSALNVQDSPWLIVGKLDGTARIAPVIKWGLPVLQTNDLLLNALCEADSEQRKKYFNELIFEIDNNPLQNYCCLLTEYIKKYKMNNGLSLLDLDLFRGISSNYRVVVQLLISSCLSGDSDTIYDIQEELPFSWGWIPVSIWKDVFQKCWAYLEKQINDKTLALHILQPFIAFMNHRAHIDRRLAPIANMLLTYSKLLPAGCNVLPTVSREQFNEAKQMLLRNPDSFGRISIFPKELWSSAITPELKSVFNKLWIKNKYHSRLEKRFNLMLVAALLTQKDNNLIHQLSALFEFHYQQAPQQLGVIYQYYFEQAGVCH

SEQ ID NO: 25523 - protein, 2090 aa, Escherichia coli 907713; identical to SEQ ID NO: 25375

SEQ ID NO: 25524 - protein, 1112 aa, Escherichia coli 907713; identical to SEQ ID NO: 25376

SEQ ID NO: 25525 - protein, 2090 aa, Escherichia coli 907715; identical to SEQ ID NO: 25375

SEQ ID NO: 25526 - protein, 399 aa, Escherichia coli 907715
TGVWKYRGKSKAGIDQVVEMRITGAGVVMAWQIRRYKYSLRYDYEKELLLSQSVNHRAGQIPSPVIMLLSEPERKSIPLASRMSEGVPVGEYELSSIVNKNGPWLVVPKPGEEMAFRPCFIRGESSLPVEESNIRSLQKATQLFNPQAEVNTITLVLGQMANDPAHSGWQFMRSLYDQFGYLPLATFEVWRALVQHPQALAMSLFKFEMSAEYLSRIENEFPILWEFFPIFEIKAASERFKLFLSQKGAPEETQKLLVTNMFQRLGLVFPTYADEIEKWLSNGHLPPSIPESFVHVWYQELLREHSEAQWPEYGSKRLHSWMASQKNPVIGINPDANHRYSVALLPVFAAAVASGNASFESVFDRKPGAVFFLRQVRDFDSRWFKAIFQCSLLRYVAKK

SEQ ID NO: 25527 - protein, 2090 aa, Escherichia coli 908521; identical to SEQ ID NO: 25375

SEQ ID NO: 25528 - protein, 1112 aa, Escherichia coli 908521; identical to SEQ ID NO: 25376

SEQ ID NO: 25529 - protein, 2090 aa, Escherichia coli 908522; identical to SEQ ID NO: 25375

SEQ ID NO: 25530 - protein, 589 aa, Escherichia coli 908522
SIEQCHIQEMLGAQYLSIRNSKNETLLRRKIGILPADFSIEIKGGIHANEGTIVITTQHPCVAKLKDKTLEATRKRTEGRTEIQLKAEGVPPAFITLQVLPNLAADPIDIELPFPAKGCLALDVNGRPLDKNITLHDLLGSRAFLFSRNGEPTRYTLQLHLRSVSGLQAWHEWCYTALSDRPVELNLYSLREHIENLISLEAGIDQVVEMRITGAGVVMAWQIRRYKYSLRYDYEKELLLSQSVNHRAGQIPSPVIMLLSEPERKSIPLASRMSEGVPVGEYELSSIVNKNGPWLVVPKPGEEMAFRPCFIRGESSLPVEESNIRSLQKATQLFNPQAEVNTITLVLGQMANDPAHSGWQFMRSLYDQFGYLPLATFEVWRALVQHPQALAMSLFKFEMSAEYLSRIENEFPILWEFFPIFEIKAASERFKLFLSQKGAPEETQKLLVTNMFQRLGLVFPTYADEIEKWLSNGHLPPSIPESFVHVWYQELLREHSEAQWPEYGSKRLHSWMASQKNPVIGINPDANHRYSVALLPVFAAAVASGNASFESVFDRKPGAVFFLRQVRDFDSRWFKAIFQCSLLRYVAKK

SEQ ID NO: 25531 - protein, 2104 aa, Escherichia coli 908525; identical to SEQ ID NO: 25343

SEQ ID NO: 25532 - protein, 1104 aa, Escherichia coli 908525
MFFSRRSLSGADGRALYAYRCTDTEYESLAELLRTYAPRSYPRTIFISYSDVLFSIYAAEFIRRTHTVGHPKWDTILDSIDWKVPYVHRQKLVNDGIRYWKRKIRNLGQASGYLHTLAFEGGLPIRMIENESGYLITYFRRIYQALRGQASQYPAAKIAQELGDTIPVTMQNELVYEIAGEFCETLCRLLSEHPPQSSDPVSALRKLSPDWHLQLPLVLPEANAAEIVRRLLSQSSEIRSASSLQVERIWVDVDDSWYCDARFRFPATMRTEQLTSLFECNIQPEQTRLIISGKWRNGGARLAMLSRYEQQDWRVELLPIAMQKLSGADAMAEISLSLHEGPILLGHTIPKGGYELTEELPWVFEAMNESESQLKLVGMGSVSSRLNALFISLPKNSHLDISGEGEFDIPRLLKNSERSLTKISGVFSVVLHDGAVCTIRTQQLYDSAIEYYIKSTEVELVKSDYPVHRAWPKIGWKKDLQYGIVPEKELFWRSIRSGNNAWYSVASKMPKGQIEVRRIVNDEVLFSGKVVVLPADFDINIIPESAQQGIIMLSGITDTRIDKYSNNEKVTLKSDYSQNECAIYYNSSEMLENTVDLRVSWKDGSNLKLLLPKPVSGGRFVTHDGSVHFDGVASIAHLHGIDAELLTISCAGRGYLNIELLDENPVAEKFRYLHADLPLLSGCNDKLKQISLYENYNLLNAMLACAWSSNSTLCVDFYSDRFGKDKATLSIKRYDGSFIEHDQGLLVDIKNSVVFPANRIDELVVDAISLKDPGLHISLLKKDEFAYDLSALNVQDSPWLIVGKLDGTARIAPVIKWGLPVLQTNDLLLNALCEADSEQRKKYFNELIFEIDNNPLQNYCCLLTEYIKKYKMNNGLSLLDLDLFRGISSNYRVVVQLLISSCLSGDSDTIYDIQEELPFSWGWIPVSIWKDVFQKCWAYLEKQINDKTLALHILQPFIAFMNHRAHIDRRLAPIANMLLTYSKLLPAGCNVLPTVSREQFNEAKQMLLRNPDSFGRISIFPKELWSSAITPELKSVFNKLWIKNKYHSRLEKRFNLMLVAALLTQKDNNLIHQLSALFEFHYQQAPQQLGVIYQYYFEQAGVCH

SEQ ID NO: 25533 - protein, 2090 aa, Escherichia coli 908585; identical to SEQ ID NO: 25375

SEQ ID NO: 25534 - protein, 1112 aa, Escherichia coli 908585; identical to SEQ ID NO: 25376

SEQ ID NO: 25535 - protein, 2090 aa, Escherichia coli 908616; identical to SEQ ID NO: 25375

SEQ ID NO: 25536 - protein, 1112 aa, Escherichia coli 908616; identical to SEQ ID NO: 25376

SEQ ID NO: 25537 - protein, 2104 aa, Escherichia coli 93.0055; identical to SEQ ID NO: 25235

SEQ ID NO: 25538 - protein, 978 aa, Escherichia coli 93.0055; identical to SEQ ID NO: 25216

SEQ ID NO: 25539 - protein, 2104 aa, Escherichia coli 93.0056; identical to SEQ ID NO: 25235

SEQ ID NO: 25540 - protein, 978 aa, Escherichia coli 93.0056; identical to SEQ ID NO: 25216

SEQ ID NO: 25541 - protein, 2104 aa, Escherichia coli 93-001; identical to SEQ ID NO: 25235

SEQ ID NO: 25542 - protein, 982 aa, Escherichia coli 93-001; identical to SEQ ID NO: 25416

SEQ ID NO: 25543 - protein, 2104 aa, Escherichia coli 94.0618; identical to SEQ ID NO: 25235

SEQ ID NO: 25544 - protein, 978 aa, Escherichia coli 94.0618; identical to SEQ ID NO: 25216

SEQ ID NO: 25545 - protein, 2104 aa, Escherichia coli 95.0083; identical to SEQ ID NO: 25235

SEQ ID NO: 25546 - protein, 978 aa, Escherichia coli 95.0083; identical to SEQ ID NO: 25216

SEQ ID NO: 25547 - protein, 2104 aa, Escherichia coli 95.1288; identical to SEQ ID NO: 25235

SEQ ID NO: 25548 - protein, 233 aa, Escherichia coli 95.1288
MNNGLSLLDLDLFRGISSNYRVVVQLLISSCLSGDSDTIYDIQEELPFSWGWIPVSIWKDVFQKCWTYLEKQINDKTLALHILQPFIAFMNHRAHIDRRLAPIANMLLTYSESLPTGCDVLPTVSREQFNEAKQMLLRNPDSFGRISIFPKELWSSAITPELKSVFNKLWIEDKYHSRLEKRFNLMLVAALLTQKDNNLIHQLSALFEFHYQQAPQQLGVIYQYYFEQAGVCH

SEQ ID NO: 25549 - protein, 2104 aa, Escherichia coli 96.0107; identical to SEQ ID NO: 25235

SEQ ID NO: 25550 - protein, 978 aa, Escherichia coli 96.0107; identical to SEQ ID NO: 25216

SEQ ID NO: 25551 - protein, 2104 aa, Escherichia coli 96.0109; identical to SEQ ID NO: 25235

SEQ ID NO: 25552 - protein, 978 aa, Escherichia coli 96.0109; identical to SEQ ID NO: 25216

SEQ ID NO: 25553 - protein, 2104 aa, Escherichia coli 96.0427; identical to SEQ ID NO: 25235

SEQ ID NO: 25554 - protein, 978 aa, Escherichia coli 96.0427; identical to SEQ ID NO: 25216

SEQ ID NO: 25555 - protein, 2104 aa, Escherichia coli 96.0428; identical to SEQ ID NO: 25235

SEQ ID NO: 25556 - protein, 978 aa, Escherichia coli 96.0428; identical to SEQ ID NO: 25216

SEQ ID NO: 25557 - protein, 2104 aa, Escherichia coli 96.0932; identical to SEQ ID NO: 25503

SEQ ID NO: 25558 - protein, 978 aa, Escherichia coli 96.0932; identical to SEQ ID NO: 25504

SEQ ID NO: 25559 - protein, 2104 aa, Escherichia coli 97.0003; identical to SEQ ID NO: 25235

SEQ ID NO: 25560 - protein, 982 aa, Escherichia coli 97.0003; identical to SEQ ID NO: 25416

SEQ ID NO: 25561 - protein, 2104 aa, Escherichia coli 97.0007; identical to SEQ ID NO: 25235

SEQ ID NO: 25562 - protein, 978 aa, Escherichia coli 97.0007; identical to SEQ ID NO: 25216

SEQ ID NO: 25563 - protein, 2104 aa, Escherichia coli 97.0010; identical to SEQ ID NO: 25235

SEQ ID NO: 25564 - protein, 1117 aa, Escherichia coli 97.0010
MKTPVNPLLQWLNMFFSRRSLSGADGRALYAYRCTDTEYESLAELLRTYAPRSYPRTIFISYSDVLFSIYAAEFIRRTHTVGHPKWDTILDSINWKVPYVHRQKLVNDGIRYWKRKIRNLGQASGYLHTLACEGGLPIRMIENESGYLITYFRRIYQALRGQSSQYPAAKIAQELGDTIPVTMQNELVYEIAGEFCETLCRLLSEHPPHSSDPVSALRKLSPDWHLQLPLVLPEANAAEIVRRLLSQSSEIRSASSLQVERIWVDVDDSWYCDARFRFPATMRTEQLTSLFECHIQPEQTRLIISGKWKNGGARLAMLSRYEQQDWRVELLPIAMQKLSGADAMAEISLSLHEGPILLGHTIPKGGYELTEELPWVFEAMNESESQLKLVGMGSVSSRLNALFISLPKNSHLDISGEGEFDIPRLLKNSERSLTKISGVFSVVLHDGAVCTIRTQQLYDSAIEYYIKSTEVELVKSDYPVHRAWPKIGWKKDLQYGIVPEKELFWRSIRSGNNAWYSVASEMPKGQIEVRRIVNDEVLFSGKVVVLPADFDINIIPESAQQGIIMLSGITDTRIDKYSNNEKVTLKSDYSQNECAIYYNSSLMLENTVDLRVSWKDGSNLKLLLPKPVSGGRFVTNDGSVHFDGVASIAHLHGIDAELLTISCAGRGYLNIELLDENPVAEKFRYLHADLPLLSGRNDKLQQISLYENYNLLNAMLACAWNSNSTLCVDFYSDRFGKDKATLNIKRYDGSFIEHDQGLLVDIKNSVVFPANRIDELVVDAISLKNPGLHISLLKKDEFAYDLSALNVQDSPWLIVGKLDGTARIAPVIKWMLPVLQTNDLLLNALCEADPEQRKKNFNELIFEIDNNPLQNYCCLLTEYIKKYKMNNGLSLLDLDLFRGISSNYRVVVQLLISSCLSGDSDTIYDIQEELPFSWGWIPVSIWKDVFQKCWTYLEKQINDKTLALHILQPFIAFMNHRAHIDRRLAPIANMLLTYSESLPTGCDVLPTVSREQFNEAKQMLLRNPDSFGRISIFPKELWSSAITPELKSVFNKLWIEDKYHSRLEKRFNLMLVAALLTQKDNNLIHQLSALFEFHYQQAPQQLGVIYQYYFEQAGVCH

SEQ ID NO: 25565 - protein, 2104 aa, Escherichia coli 97.1742; identical to SEQ ID NO: 25311

SEQ ID NO: 25566 - protein, 978 aa, Escherichia coli 97.1742; identical to SEQ ID NO: 25216

SEQ ID NO: 25567 - protein, 2104 aa, Escherichia coli 99.0670; identical to SEQ ID NO: 25235

SEQ ID NO: 25568 - protein, 978 aa, Escherichia coli 99.0670; identical to SEQ ID NO: 25216

SEQ ID NO: 25569 - protein, 2104 aa, Escherichia coli 99.0678; identical to SEQ ID NO: 25407

SEQ ID NO: 25570 - protein, 978 aa, Escherichia coli 99.0678; identical to SEQ ID NO: 25216

SEQ ID NO: 25571 - protein, 2104 aa, Escherichia coli 99.0713; identical to SEQ ID NO: 25235

SEQ ID NO: 25572 - protein, 978 aa, Escherichia coli 99.0713; identical to SEQ ID NO: 25216

SEQ ID NO: 25573 - protein, 2104 aa, Escherichia coli 99.0839; identical to SEQ ID NO: 25407

SEQ ID NO: 25574 - protein, 978 aa, Escherichia coli 99.0839; identical to SEQ ID NO: 25216

SEQ ID NO: 25575 - protein, 2104 aa, Escherichia coli 99.0848; identical to SEQ ID NO: 25407

SEQ ID NO: 25576 - protein, 978 aa, Escherichia coli 99.0848; identical to SEQ ID NO: 25216

SEQ ID NO: 25577 - protein, 2104 aa, Escherichia coli 99.1753; identical to SEQ ID NO: 25235

SEQ ID NO: 25578 - protein, 978 aa, Escherichia coli 99.1753; identical to SEQ ID NO: 25216

SEQ ID NO: 25579 - protein, 2104 aa, Escherichia coli 99.1762; identical to SEQ ID NO: 25311

SEQ ID NO: 25580 - protein, 978 aa, Escherichia coli 99.1762; identical to SEQ ID NO: 25216

SEQ ID NO: 25581 - protein, 2104 aa, Escherichia coli 99.1775; identical to SEQ ID NO: 25235

SEQ ID NO: 25582 - protein, 978 aa, Escherichia coli 99.1775; identical to SEQ ID NO: 25216

SEQ ID NO: 25583 - protein, 2104 aa, Escherichia coli 99.1781; identical to SEQ ID NO: 25235

SEQ ID NO: 25584 - protein, 1119 aa, Escherichia coli 99.1781
MLVKTPVNPLLQWLNMFFSRRSLSGADGRALYAYRCTDTEYESLAELLRTYAPRSYPRTIFISYSDVLFSIYAAEFIRRTHTVGHPKWDTILDSINWKVPYVHRQKLVNDGIRYWKRKIRNLGQASGYLHTLACEGGLPIRMIENESGYLITYFRRIYQALRGQSSQYPAAKIAQELGDTIPVTMQNELVYEIAGEFCETLCRLLSEHPPHSSDPVSALRKLSPDWHLQLPLVLPEANAAEIVRRLLSQSSEIRSASSLQVERIWVDVDDSWYCDARFRFPATMRTEQLTSLFECHIQPEQTRLIISGKWKNGGARLAMLSRYEQQDWRVELLPIAMQKLSGADAMAEISLSLHEGPILLGHTIPKGGYELTEELPWVFEAMNESESQLKLVGMGSVSSRLNALFISLPKNSHLDISGEGEFDIPRLLKNSERSLTKISGVFSVVLHDGAVCTIRTQQLYDSAIEYYIKSTEVELVKSDYPVHRAWPKIGWKKDLQYGIVPEKELFWRSIRSGNNAWYSVASEMPKGQIEVRRIVNDEVLFSGKVVVLPADFDINIIPESAQQGIIMLSGITDTRIDKYSNNEKVTLKSDYSQNECAIYYNSSLMLENTVDLRVSWKDGSNLKLLLPKPVSGGRFVTNDGSVHFDGVASIAHLHGIDAELLTISCAGRGYLNIELLDENPVAEKFRYLHADLPLLSGRNDKLQQISLYENYNLLNAMLACAWNSNSTLCVDFYSDRFGKDKATLNIKRYDGSFIEHDQGLLVDIKNSVVFPANRIDELVVDAISLKNPGLHISLLKKDEFAYDLSALNVQDSPWLIVGKLDGTARIAPVIKWMLPVLQTNDLLLNALCEADPEQRKKNFNELIFEIDNNPLQNYCCLLTEYIKKYKMNNGLSLLDLDLFRGISSNYRVVVQLLISSCLSGDSDTIYDIQEELPFSWGWIPVSIWKDVFQKCWTYLEKQINDKTLALHILQPFIAFMNHRAHIDRRLAPIANMLLTYSESLPTGCDVLPTVSREQFNEAKQMLLRNPDSFGRISIFPKELWSSAITPELKSVFNKLWIEDKYHSRLEKRFNLMLVAALLTQKDNNLIHQLSALFEFHYQQAPQQLGVIYQYYFEQAGVCH

SEQ ID NO: 25585 - protein, 2104 aa, Escherichia coli 99.1793
MDVQQLHYAPLLNQLHQRAVRSVVSQLALRSKSLTHYLESQYFQPPGQEGSLLADPVFESTFGWMPADETMEDLRDKLISSPLVDALSKAPVPFRHQLTAWRTILEDKKSLLVSSGTGSGKTECFMVPVLEDLIRQQKSTRQSLTGTQAIFLYPLNALINSQQERLREWTRGFKGKIRFALYNGETRHTKYEIQEDQLKVPEQALSREAIYEAPPSIMVTNTTMLEYMLIRRKDAPIIEKSQGMLKYIVLDEAHSYIGSQAAELALLLRRVMQAFNVGPGTDKPVQIIATSATIGEDSPEGNKELAKFVADLAGVTERDVKVVRGYRQIPRVSESLIRHEYPTSLTSLKSLSPQDLYQQLCHYRVAQQLRQALTHPGRQAVRLSELLNVARRTWPDINHRELLQLLDLMARSREGELAFTPLRMHGFIRTLAGLWACSNKQCSHKAHELNQSDWPFGQVWFEQRQYCDCGAPVFEVLRCSGCGSAYLSAKEEMRGDGTNWLVAQPAAAEVDEFALDVDVYSEDEDNDELDNNSQFDRLIASDGEKYIISLEETTAGKIDSEAQKHYEINLLRPESRGEGRNNSFACVCCGDTQRKNNPLFRPLRLGAPFFLNEIIPTLLEFSPLPQTREEQLGPFNGRRLLTFTDSRQGTARISARLQQDADKATLRALCYQELANITEPSAKLSPAHCALLEKVISQFSVLPLKNSIDALKKAMAANEELSPTDIQALKIIEPMVSSLSTEHAEAMQILQANSGNQQKKTMSWQTLSEQLVGSVDLADRMRGSFKELSGLDLTKQQFADFCLYSEFGRRPKNAWTLESLGLVAIHYPFIDKVTTCPQDWKTLLPDPDKQLAEWRNLLKITLDFFIRENSAVFYENEQYPRWMGARFPVKMLQGPDKKNKGQKRDQLWPQIRDRHYNRVIKLLIAVFPAIQPEQAHWKSLVNHLMIEVWDAIRPCLRQFESGYQLDIKQQAEFYSPKQVWRCPYTRRALDVTLLGYSPYLPGSKEIAPEKAVLIEMPELPVRHWRLSGGGEIAREERLEWLESNALIQHAREEGLWSTRSDRLALKDSWYRLEEHSAQRTPEQNQFNEKQFKSGKVNVLNCSTTMEMGVDIGGMSLVAMNNVPPAPANYLQRAGRAGRRGESASAAITLCKNTAHGMEVFKDPLWAFNTTASAPRVRFGSSSIVQRHVNALVLGLFLRAEVPDATKLSCKWFFEGDESQCLRFLHWLNHQADQLADKLKRLTQGTVLMSLTATQLLTRTQAMMQQVDIRWRSQLAILLENIEALKADNSAWEETPAGKAIAYQLRDYRGAYLFSKLISEAFLPGHGFPVGVVNFNYLTADELEKRRAIKATQADPNEGGESFSRRIEKLPSRDLPTALREYAPGADVVLGGKVYRSSGIMLGKVLASGQELSGDHHIPWFWHCRKCGAGATSTTHPVECSHCKADIQQLDVKRYLQPVGFATDIRYQAHNDVSMPAQLPWKDPRVLVPSSVWVSLPDAGLGRYRFSHSGELFHFSEGEFGHGYTICLSCGRAESQTQPQRTPENLKNPERENTHYLLRGGSNDRQGSNKLCHGHVHKDLWLGYSSRTDMVELQLNDDNGLLIRDEVAARSLAVALREGLAHKLGIENTELGVTTQQARDINGYTGYSIFIYDNNAGGAGYAVQLIDHWADVFNYARKLLDCSCDKFCHHCLLSYDSQHYVNRLDRHHALTLLTNVRLQRLNLAPEYQYFGDGSRVETNPLSLRIAQCLNSEIYDSCSLVLAGPQEQWDFAQWPLFKELLQFASSGGNVELLVATPLANLTDSSRHQLSALAAMPGGRLQVKSIATAQLMQGKGRWLAQVTREGQSQQWAADDSATVAPGELWGQSASSPVVTLKGTSGKTFSGQTLSAEDLLPALPTGAVRINLCEQLDGPLEGFGSRFWSLVTQQHAGWKQAFTRHKEITHVEYSDRYLNSPFTARLLGEILTELVEQGMAERASLTVCVKKLDYNSRQHDALYNAWLNEEDRQQVVTTLLEEGYLGPAWPGAISWLTGDNQSTEHGRELTVTFSDGSQHYVLLDMGLSYWRCIEDTFFDFALRVPQQVERLANTRARAVAPGNDLRSYIIAG

SEQ ID NO: 25586 - protein, 978 aa, Escherichia coli 99.1793; identical to SEQ ID NO: 25216

SEQ ID NO: 25587 - protein, 2104 aa, Escherichia coli ATCC 35150; identical to SEQ ID NO: 25215

SEQ ID NO: 25588 - protein, 1129 aa, Escherichia coli ATCC 35150
QKKLIMLPSETMIWQPEFTDKTLSRKPGAVHSLSGADGRALYAYRCTDTEYESLAELLRTYAPRSYPRTIFISYSDVLFSIYAAEFIRRTHTVGHPKWDTILDSINWKVPYVHRQKLVNDGIRYWKRKIRNLGQASGYLHTLACEGGLPIRMIENESGYLITYFRRIYQALRGQSSQYPAAKIAQELGDTIPVTMQNELVYEIAGEFCETLCRLLSEHPPHSSDPVSALRKLSPDWHLQLPLVLPEANAAEIVRRLLSQSSEIRSASSLQVERIWVDVDDSWYCDARFRFPATMRTEQLTSLFECHIQPEQTRLIISGKWKNGGARLAMLSRYEQQDWRVELLPIAMQKLSGADAMAEISLSLHEGPILLGHTIPKGGYELTEELPWVFEAMNESESQLKLVGMGSVSSRLNALFISLPKNSHLDISGEGEFDIPRLLKNSERSLTKISGVFSVVLHDGAVCTIRTQQLYDSAIEYYIKSTEVELVKSDYPVHRAWPKIGWKKDLQYGIVPEKELFWRSIRSGNNAWYSVASEMPKGQIEVRRIVNDEVLFSGKVVVLPADFDINIIPESAQQGIIMLSGITDTRIDKYSNNEKVTLKSDYSQNECAIYYNSSLMLENTVDLRVSWKDGSNLKLLLPKPVSGGRFVTNDGSVHFDGVASIAHLHGIDAELLTISCAGRGYLNIELLDENPVAEKFRYLHADLPLLSGRNDKLQQISLYENYNLLNAMLACAWNSNSTLCVDFYSDRFGKDKATLNIKRYDGSFIEHDQGLLVDIKNSVVFPANRIDELVVDAISLKNPGLHISLLKKDEFAYDLSALNVQDSPWLIVGKLDGTARIAPVIKWMLPVLQTNDLLLNALCEADPEQRKKNFNELIFEIDNNPLQNYCCLLTEYIKKYKMNNGLSLLDLDLFRGISSNYRVVVQLLISSCLSGDSDTIYDIQEELPFSWGWIPVSIWKDVFQKCWTYLEKQINDKTLALHILQPFIAFMNHRAHIDRRLAPIANMLLTYSESLPTGCDVLPTVSREQFNEAKQMLLRNPDSFGRISIFPKELWSSAITPELKSVFNKLWIEDKYHSRLEKRFNLMLVAALLTQKDNNLIHQLSALFEFHYQQAPQQLGVIYQYYFEQAGVCH

SEQ ID NO: 25589 - protein, 2104 aa, Escherichia coli ATCC 700728; identical to SEQ ID NO: 25235

SEQ ID NO: 25590 - protein, 978 aa, Escherichia coli ATCC 700728; identical to SEQ ID NO: 25216

SEQ ID NO: 25591 - protein, 2104 aa, Escherichia coli ATCC 8739
MDVQQLHYAPLLNQLHQRAVRSVVSQLALRSKSLTHYLESQYFQPPGQEGSLLADPVFESTFGWMPADETMEDLRDKLISSPLVDALSKAPVPFRHQLTAWRTILEDKKSLLVSSGTGSGKTECFMVPVLEDLIRQQKSTRQSLTGTQAIFLYPLNALINSQQERLREWTRGFKGKIRFALYNGETRHTKYEVQEDQLKVPEQALSREAIYEAPPSIMVTNTTMLEYMLIRRKDAPIIEKSQGMLKYIVLDEAHSYIGSQAAELALLLRRVMQAFNVGPGTDKPVQIIATSATIGEDSPEGNKELAKFVADLAGVTERDVKVVRGYRQIPRVSESLIRHEYPTSLTSLKSLSPQDLYQQLCHYRVAQQLRQALTHPGRQAVRLSELLNVARRTWPNIDHRELLQLLDLMARSREGELAFTPLRMHGFIRTLAGLWACSNKQCSHKAHELNQSDWPFGQVWFEQRQYCDCGAPVFEVLRCSGCGSAYLSAKEEMRGDGTNWLVAQPAAAEVDEFALDVDVYSEDEDNDELDNNSQFDRLIASDGEKYIISLEETTAGKIDSEAQKHYEINLLRPESRGEGRNNSFACVCCGDSQRKNNPLFRPLRLGAPFFLNEIIPTLLEFSPLPQTREEQLGPFNGRRLLTFTDSRQGTARISARLQQDADKATLRALCYQELANINEPSAKLSPAHCALLESFIAQFSILPLKNSIDALKKAMVANEELSPADIQALKIIEPMVSSLSPDHAEAMQILQANSGNQQKKTMSWQTLSEQLVGSVDLADRMRGSFKELSGLDLTKQQFADFCLYSEFGRRPKNAWTLESLGLVAIHYPFIDKVTTCPQDWKTLLPDPDKQLAEWRNLLKITLDFFIRENSAVFYENEQYPRWMGARFPVKMLQGPDKKNKGQKRDQLWPQIRDRHYNRVIKLLIAVFPAIQPEQAHWKSLVNHLMIEVWDAIRPCLRQFESGYQLDIKQQAEFYSPKQVWRCPYTRRALDVTLLGYSPYLPGSKEIAPEKAVLIEMPELPVRHWRLSGGGEIAREERLEWLESNALIQHAREEGLWSTRSDRLALKDSWYRLEEHSAQRTPEQNQFNEKQFKSGKVNVLNCSTTMEMGVDIGGMSLVAMNNVPPAPANYLQRAGRAGRRGESASAAITLCKNTAHGMEVFKDPLWAFNTTASAPRVRFGSSSIVQRHVNALVLGLFLRAEVPDATKLSCKWFFEGDESQCLRFLHWLNNQADQLADKLKRLTQGTVLMSLTATQLLTRTQAMMQQVDIRWRSQLAILLENIEALKADNSAWEETPAGKAIAYQLRDYRGAYLFSKLISEAFLPGHGFPVGVVNFNYLTADELEKRRAIKATQADPNEGGESFSRRIEKLPSRDLPTALREYAPGADVVLGGKVYRSSGIMLGKVLASGQELSGDHHIPWFWHCRKCGAGATSATHPVECSHCKADIQQLDVKRYLQPVGFATDIRYQAHNDVSMPAQLPWKDPRVLVPSSVWVSLPDAGLGRYRFSHSGELFHFSEGEFGHGYAICLSCGRAESQTQPQRTPENLKNPERENTHYLLRGGSNDRQGSNKLCHGHVHKDLWLGYSSRTDMVELQLNDDNGLLIRDEVAARSLAVALREGLAHKLGIENTELGVTTQQARDINGYTGYSIFIYDNNAGGAGYAVQLIDHWADVFNYARKLLDCSCDKFCHHCLLSYDSQHYVNRLERHHALTLLTNVRLQRLNLAPEYQYFVDGSRVETNPLSLRIAQCLNSEIYDSCSLVLAGPQEQWDFAQWPLFKELLQFASSGGNVELLVATPLENLTDSSRHQLSALAAMPGGRLQVKSIATAQLMQGKGRWLAQVTREGQSQQWAADDSATVAPGELWGQSASSPVVTLKGTSGKTFSGQTLSAEDLLPALPTGAVRINLCEQLDGPLEGFGSRFWSLVTQQHAGWKQAFTRHKEITHVEYSDRYLNSPFTARMLGEILTELVEQGMAERASLTVCVKKLDYNSRQHNALYNAWLNEEDRQQVVTTLLEEGYLGPAWPGAISWLTGDNQSTEHGRELTVTFSDGSQHYVLLDMGLSYWRCIEDTFFDFALRVPQQVERLANTRARAVAPGNDLRSYVIAG

SEQ ID NO: 25592 - protein, 1119 aa, Escherichia coli ATCC 8739
MLVKTPVNPLLQWLNMFFSRRSLSGADGRALYAYRCTDTEYESLAELLRTYAPRSYPRTIFISYSDVLFSIYAAEFIRRTHTVGHPKWDTILDSINWKVPYVHRQKLVNDGIRYWKRKIRNLGQASGYLHTLACEGGLPIRMIENESGYLITYFRRIYQALRGQSSQYPAAKIAQELGDTIPVTMQNELVYEIAGEFCETLCRLLSEHPPHSSDPVSALRKLSPDWHLQLPLVLPEANAAEIVRRLLSQSSEIRSASSLQVERIWVDVDDSWYCDARFRFPATMRTEQLTSLFECHIQPEQTRLIISGKWKNGGARLAMLSRYEQQDWRVELLPIAMQKLSGADAMAEISLSLHEGPILLGHTIPKGGYELTEELPWVFEAMNESESQLKLVGMGSVSSRLNALFISLPKNSHLDISGEGEFDIPRLLKNSERSLTKISGVFSVVLHDGAVCTIRTQQLYDSAIEYYIKSTEVELVKSDYPVHRAWPKIGWKKDLQYGIVPEKELFWRSIRSGNNAWYSVASEMPKGQIEVRRIVNDEVLFSGKVVVLPADFDINIIPESAQQGIIMLSGITDTRIDKYSNNEKVTLKSDYSQNECAIYYNSSLMLENTVDLRVSWKDGSNLKLLLPKPVSGGRFVTNDGSVHFDGVASIAHLHGIDAELLTISCAGRGYLNIELLDENPVAEKFRYLHADLPLLSGRNDKLQQISLYENYNLLNAMLACAWNSNSTLCVDFYSDRFGKDKATLNIKRYDGSFIEHDQGLLVDIKNSVVFPANRIDELVVDAISLKNPGLHISLLKKDEFAYDLSALNVQDSPWLIVGKLDGTARIAPVIKWMLPVLQTNDLLLNALCEADPEQRKKNFNELIFEIDNNPLQNYCCLLTEYIKKYKMNNGLSLLDLDLFRCISSNYRVVVQLLISSCLSGDSDTIYDIQEELPFSWGWIPVSIWKDVFQKCWTYLEKQINDKTLALHILQPFIAFMNHRAHIDRRLAPIANMLLTYSESLPTGCDVLPTVSREQFNEAKQMLLRNPDSFGRISIFPKELWSSAITPELKSVFNKLWIKNKYHSRLEKRFNLMLVAALLTQKDNNLIHQLSALFEFHYQQAPQQLGVIYQYYFEQAGVCH

SEQ ID NO: 25593 - protein, 2104 aa, Escherichia coli ATCC BAA-2192; identical to SEQ ID NO: 25235

SEQ ID NO: 25594 - protein, 287 aa, Escherichia coli ATCC BAA-2192
MLPVLQTNDLLLNALCEADPEQRKKNFNELIFEIDNNPLQNYCCLLTEYIKKYKMNNGLSLLDLDLFRGISSNYRVVVQLLISSCLSGDSDTIYDIQEELPFSWGWIPVSIWKDVFQKCWTYLEKQINDKTLALHILQPFIAFMNHRAHIDRRLAPIANMLLTYSESLPTGCDVLPTVSREQFNEAKQMLLRNPDSFGRISIFPKELWSSAITPELKSVFNKLWIEDKYHSRLEKRFNLMLVAALLTQKDNNLIHQLSALFEFHYQQAPQQLGVIYQYYFEQAGVCH

SEQ ID NO: 25595 - protein, 2104 aa, Escherichia coli B102; identical to SEQ ID NO: 25235

SEQ ID NO: 25596 - protein, 978 aa, Escherichia coli B102; identical to SEQ ID NO: 25216

SEQ ID NO: 25597 - protein, 2104 aa, Escherichia coli B103; identical to SEQ ID NO: 25235

SEQ ID NO: 25598 - protein, 978 aa, Escherichia coli B103; identical to SEQ ID NO: 25216

SEQ ID NO: 25599 - protein, 2104 aa, Escherichia coli B104; identical to SEQ ID NO: 25235

SEQ ID NO: 25600 - protein, 978 aa, Escherichia coli B104; identical to SEQ ID NO: 25216

SEQ ID NO: 25601 - protein, 2104 aa, Escherichia coli B105; identical to SEQ ID NO: 25235

SEQ ID NO: 25602 - protein, 978 aa, Escherichia coli B105; identical to SEQ ID NO: 25216

SEQ ID NO: 25603 - protein, 2104 aa, Escherichia coli B106; identical to SEQ ID NO: 25235

SEQ ID NO: 25604 - protein, 978 aa, Escherichia coli B106; identical to SEQ ID NO: 25216

SEQ ID NO: 25605 - protein, 2104 aa, Escherichia coli B107; identical to SEQ ID NO: 25235

SEQ ID NO: 25606 - protein, 978 aa, Escherichia coli B107; identical to SEQ ID NO: 25216

SEQ ID NO: 25607 - protein, 2104 aa, Escherichia coli B108; identical to SEQ ID NO: 25235

SEQ ID NO: 25608 - protein, 978 aa, Escherichia coli B108; identical to SEQ ID NO: 25216

SEQ ID NO: 25609 - protein, 2104 aa, Escherichia coli B109; identical to SEQ ID NO: 25235

SEQ ID NO: 25610 - protein, 978 aa, Escherichia coli B109; identical to SEQ ID NO: 25216

SEQ ID NO: 25611 - protein, 2104 aa, Escherichia coli B112; identical to SEQ ID NO: 25311

SEQ ID NO: 25612 - protein, 978 aa, Escherichia coli B112; identical to SEQ ID NO: 25216

SEQ ID NO: 25613 - protein, 2104 aa, Escherichia coli B113; identical to SEQ ID NO: 25311

SEQ ID NO: 25614 - protein, 1119 aa, Escherichia coli B113; identical to SEQ ID NO: 25584

SEQ ID NO: 25615 - protein, 2104 aa, Escherichia coli B114; identical to SEQ ID NO: 25311

SEQ ID NO: 25616 - protein, 978 aa, Escherichia coli B114; identical to SEQ ID NO: 25216

SEQ ID NO: 25617 - protein, 2104 aa, Escherichia coli B15; identical to SEQ ID NO: 25235

SEQ ID NO: 25618 - protein, 978 aa, Escherichia coli B15; identical to SEQ ID NO: 25216

SEQ ID NO: 25619 - protein, 2104 aa, Escherichia coli B17; identical to SEQ ID NO: 25235

SEQ ID NO: 25620 - protein, 978 aa, Escherichia coli B17; identical to SEQ ID NO: 25216

SEQ ID NO: 25621 - protein, 2104 aa, Escherichia coli B26-1; identical to SEQ ID NO: 25235

SEQ ID NO: 25622 - protein, 978 aa, Escherichia coli B26-1; identical to SEQ ID NO: 25216

SEQ ID NO: 25623 - protein, 2104 aa, Escherichia coli B26-2; identical to SEQ ID NO: 25235

SEQ ID NO: 25624 - protein, 978 aa, Escherichia coli B26-2; identical to SEQ ID NO: 25216

SEQ ID NO: 25625 - protein, 2104 aa, Escherichia coli B28-1; identical to SEQ ID NO: 25311

SEQ ID NO: 25626 - protein, 978 aa, Escherichia coli B28-1; identical to SEQ ID NO: 25216

SEQ ID NO: 25627 - protein, 2104 aa, Escherichia coli B28-2; identical to SEQ ID NO: 25311

SEQ ID NO: 25628 - protein, 978 aa, Escherichia coli B28-2; identical to SEQ ID NO: 25216

SEQ ID NO: 25629 - protein, 2104 aa, Escherichia coli B29-1; identical to SEQ ID NO: 25311

SEQ ID NO: 25630 - protein, 978 aa, Escherichia coli B29-1; identical to SEQ ID NO: 25216

SEQ ID NO: 25631 - protein, 2104 aa, Escherichia coli B29-2; identical to SEQ ID NO: 25311

SEQ ID NO: 25632 - protein, 359 aa, Escherichia coli B29-2
LVDIKNSVVFPANRIDELVVDAISLKNPGLHISLLKKDEFAYDLSALNVQDSPWLIVGKLDGTARIAPVIKWMLPVLQTNDLLLNALCEADPEQRKKNFNELIFEIDNNPLQNYCCLLTEYIKKYKMNNGLSLLDLDLFRGISSNYRVVVQLLISSCLSGDSDTIYDIQEELPFSWGWIPVSIWKDVFQKCWTYLEKQINDKTLALHILQPFIAFMNHRAHIDRRLAPIANMLLTYSESLPTGCDVLPTVSREQFNEAKQMLLRNPDSFGRISIFPKELWSSAITPELKSVFNKLWIEDKYHSRLEKRFNLMLVAALLTQKDNNLIHQLSALFEFHYQQAPQQLGVIYQYYFEQAGVCH

SEQ ID NO: 25633 - protein, 2104 aa, Escherichia coli B36-1; identical to SEQ ID NO: 25311

SEQ ID NO: 25634 - protein, 978 aa, Escherichia coli B36-1; identical to SEQ ID NO: 25216

SEQ ID NO: 25635 - protein, 2104 aa, Escherichia coli B36-2; identical to SEQ ID NO: 25311

SEQ ID NO: 25636 - protein, 978 aa, Escherichia coli B36-2; identical to SEQ ID NO: 25216

SEQ ID NO: 25637 - protein, 2104 aa, Escherichia coli B40-1; identical to SEQ ID NO: 25235

SEQ ID NO: 25638 - protein, 978 aa, Escherichia coli B40-1; identical to SEQ ID NO: 25216

SEQ ID NO: 25639 - protein, 2104 aa, Escherichia coli B40-2; identical to SEQ ID NO: 25235

SEQ ID NO: 25640 - protein, 978 aa, Escherichia coli B40-2; identical to SEQ ID NO: 25216

SEQ ID NO: 25641 - protein, 2104 aa, Escherichia coli B49-2; identical to SEQ ID NO: 25235

SEQ ID NO: 25642 - protein, 978 aa, Escherichia coli B49-2; identical to SEQ ID NO: 25216

SEQ ID NO: 25643 - protein, 2104 aa, Escherichia coli B5-2; identical to SEQ ID NO: 25235

SEQ ID NO: 25644 - protein, 978 aa, Escherichia coli B5-2; identical to SEQ ID NO: 25216

SEQ ID NO: 25645 - protein, 2104 aa, Escherichia coli B7-1; identical to SEQ ID NO: 25311

SEQ ID NO: 25646 - protein, 978 aa, Escherichia coli B7-1; identical to SEQ ID NO: 25216

SEQ ID NO: 25647 - protein, 2104 aa, Escherichia coli B7-2; identical to SEQ ID NO: 25311

SEQ ID NO: 25648 - protein, 978 aa, Escherichia coli B7-2; identical to SEQ ID NO: 25216

SEQ ID NO: 25649 - protein, 2104 aa, Escherichia coli B83; identical to SEQ ID NO: 25235

SEQ ID NO: 25650 - protein, 978 aa, Escherichia coli B83; identical to SEQ ID NO: 25216

SEQ ID NO: 25651 - protein, 2104 aa, Escherichia coli B84; identical to SEQ ID NO: 25235

SEQ ID NO: 25652 - protein, 978 aa, Escherichia coli B84; identical to SEQ ID NO: 25216

SEQ ID NO: 25653 - protein, 2104 aa, Escherichia coli B85; identical to SEQ ID NO: 25235

SEQ ID NO: 25654 - protein, 978 aa, Escherichia coli B85; identical to SEQ ID NO: 25216

SEQ ID NO: 25655 - protein, 2104 aa, Escherichia coli B86; identical to SEQ ID NO: 25235

SEQ ID NO: 25656 - protein, 978 aa, Escherichia coli B86; identical to SEQ ID NO: 25216

SEQ ID NO: 25657 - protein, 2104 aa, Escherichia coli B89; identical to SEQ ID NO: 25311

SEQ ID NO: 25658 - protein, 978 aa, Escherichia coli B89; identical to SEQ ID NO: 25216

SEQ ID NO: 25659 - protein, 2104 aa, Escherichia coli B90; identical to SEQ ID NO: 25311

SEQ ID NO: 25660 - protein, 978 aa, Escherichia coli B90; identical to SEQ ID NO: 25216

SEQ ID NO: 25661 - protein, 2104 aa, Escherichia coli B93; identical to SEQ ID NO: 25311

SEQ ID NO: 25662 - protein, 978 aa, Escherichia coli B93; identical to SEQ ID NO: 25216

SEQ ID NO: 25663 - protein, 2104 aa, Escherichia coli B94; identical to SEQ ID NO: 25311

SEQ ID NO: 25664 - protein, 978 aa, Escherichia coli B94; identical to SEQ ID NO: 25216

SEQ ID NO: 25665 - protein, 2104 aa, Escherichia coli B95; identical to SEQ ID NO: 25407

SEQ ID NO: 25666 - protein, 978 aa, Escherichia coli B95; identical to SEQ ID NO: 25216

SEQ ID NO: 25667 - protein, 2114 aa, Escherichia coli BIDMC 15; identical to SEQ ID NO: 25257

SEQ ID NO: 25668 - protein, 1096 aa, Escherichia coli BIDMC 15
MGQSEYISWVKCTSWLSNFVNLRGLRQPDGRPLYEYHATNDEYTQLTQLLRAVGQSQSNICNRDFAACFVLFCSEWYRRDYERQCGWTWDPIYKKIGISFTATELGTIVPKGMEDYWLRPIRFYESERRNFLGTLFSEGGLPFRLLKESDSRFLAVFSRILGQYEQAKQSGFSALSLARAVIEKSALPTVFSEDTSVELISHMADNLNSLVLTHNLINHKEPVQQLEKVHPTWRSEFPIPLDDETGTHFLNGLLCAASVEAKPRLQKNKSTRCQFYWSEKHPDELRVIVSLPDEVSFPVTSEPSTTRFELAICEDGEEVSGLGPAYASLENRQATVRLRKSEVRFGRQNPSAGLSLVARAGGMIVGSIKLDDSEIAIGEVPLTFIVDADQWLLQGQASCSVRSSDVLIVLPRDNSNVAGFDGQSRAVNVLGLKALPVKGCQDVTVTANETYRIRTGREQISIGRFALNGKRASWVCHPDETFIGVPKVISTLPDIQSIDVTRYLSGISIEQCHIQEMLGAQYLSIRNSKNETLLRRKIGILPADFSIEIKGGIHANEGTIVITTQHPCVAKLKDKTLEATRKRTEGRTEIQLKAEGVPPAFITLQVLPNLAADPIDIELPFPAKGCLALDVNGRPLDKNITLHDLLGSRAFLFSRNGEPTRYTLQLHLRSVSGLQAWHEWCYTALSDRPVELNLYSLREHIENLISLEAGIDQVVEMRITGAGVVMAWQIRRYKYSLRYDYEKELLLSQSVNHRAGQIPSPVIMLLSEPERKSIPLASRMSEGVPVGEYELSSIVNKNGPWLVVPKPGEEMAFRPCFIRGESSLPVEESNIRSLQKAPQLFNPQAEVNTITLVLGQMANDPAHSGWQFMRSLYDQFGYLPLATFEVWRALVQHPQALAMSLFKFEMSAEYLSRIENEFPILWEFFPIFEIKAASERFKLFLSQKGAPEETQKLLVTNMFQRLGLVFPTYADEIEKWLSNGHLPPSIPESFVHVWYQELLREHSEAQWPEYGSKRLHSWMASQKNPVIGINPDANHRYSVALLPVFAAAVASGNASFESVFDRKPGAVFFLRQVRDFDSRWFKAIFQCSLLRYVAKK

SEQ ID NO: 25669 - protein, 2114 aa, Escherichia coli BIDMC 17A; identical to SEQ ID NO: 25257

SEQ ID NO: 25670 - protein, 1096 aa, Escherichia coli BIDMC 17A; identical to SEQ ID NO: 25668

SEQ ID NO: 25671 - protein, 2114 aa, Escherichia coli BIDMC 17B; identical to SEQ ID NO: 25257

SEQ ID NO: 25672 - protein, 1096 aa, Escherichia coli BIDMC 17B; identical to SEQ ID NO: 25668

SEQ ID NO: 25673 - protein, 2114 aa, Escherichia coli BIDMC 19A; identical to SEQ ID NO: 25257

SEQ ID NO: 25674 - protein, 1096 aa, Escherichia coli BIDMC 19A; identical to SEQ ID NO: 25668

SEQ ID NO: 25675 - protein, 2114 aa, Escherichia coli BIDMC 19B; identical to SEQ ID NO: 25257

SEQ ID NO: 25676 - protein, 1096 aa, Escherichia coli BIDMC 19B; identical to SEQ ID NO: 25668

SEQ ID NO: 25677 - protein, 2114 aa, Escherichia coli BIDMC 19C; identical to SEQ ID NO: 25257

SEQ ID NO: 25678 - protein, 1096 aa, Escherichia coli BIDMC 19C; identical to SEQ ID NO: 25668

SEQ ID NO: 25679 - protein, 2114 aa, Escherichia coli BIDMC 2B; identical to SEQ ID NO: 25257

SEQ ID NO: 25680 - protein, 1096 aa, Escherichia coli BIDMC 2B; identical to SEQ ID NO: 25668

SEQ ID NO: 25681 - protein, 2114 aa, Escherichia coli BIDMC 3; identical to SEQ ID NO: 25257

SEQ ID NO: 25682 - protein, 1096 aa, Escherichia coli BIDMC 3; identical to SEQ ID NO: 25668

SEQ ID NO: 25683 - protein, 2104 aa, Escherichia coli BIDMC 39
MDVQQLHYAPLLNQLHQRAVRSVVSQLALRSKSLTHYLESQYFQPPGQEGSLLADPVFESTFGWMPADETMEDLRDKLISSPLVDALSKAPVPFRHQLTAWRTILEDKKSLLVSSGTGSGKTECFMVPVLEDLIRQQKSTRQSLTGTQAIFLYPLNALINSQQERLREWTRGFKGKIRFALYNGETRHTKYEVQEDQLKVPEQALSREAIYEAPPSIMVTNTTMLEYMLIRRKDAPIIEKSQGMLKYIVLDEAHSYIGSQAAELALLLRRVMQAFNVGPGTDKPVQIIATSATIGEDSPEGNKELAKFVADLAGVTERDVKVVRGYRQIPRVSESLIRHEYPTSLTSLKSLSPQDLYQQLCHYRVAQQLRQALTHPGRQAVRLSELLNVARRTWPDINHRELLQLLDLMARSREGELAFTPLRMHGFIRTLAGLWACSNKQCSHKAHELNQSDWPFGQVWFEQRQYCDCGAPVFEVLRCSGCGSAYLSAKEEVRGDGTNWLVAQPAAAEVDEFALDVDVYSEDEDNDELDNNSQFDRLIAIDGEKYIISLEETTAGKIDSEAQKHYEINLLRPESRGEGRNNSFACVCCGDTQRKNNPLFRPLRLGAPFFLNEIIPTLLEFSPLPQTREEQLGPFNGRRLLTFTDSRQGTARISARLQQDADKATLRALCYQELANINEPSAKLSPAHCALLESFITQFSILPLKNSIDALKKAMVANEELSPADIQALKIIEPMVSSLSPDHAEAMQILQANSGNQQKKTMSWQTLSEQLVGSVDLADRMRGSFKELSGLDLTKQQFADFCLYSEFGRRPKNAWTLESLGLVAIHYPFIDKVTTCPQDWKTLLPDPDKQLAEWRNLLKITLDFFIRENSAVFYENEQYPRWMGARFPVKMLQGPDKKNKGQKRDQLWPQIRDRHYNRVIKLLIAVFPAIQPEQAHWKSLVNHLMIEVWDAIRPCLRQFESGYQLDIKQQAEFYSPKQVWRCPYTRRALDVTLLGYSPYLPGSKEIAPEKAVLIEMPELPVRHWRLSGGGEIAREERLEWLESNALIQHAREEGLWSTRSDRLALKDSWYRLEEHSAQRTPEQNQFNEKQFKSGKVNVLNCSTTMEMGVDIGGMSLVAMNNVPPAPANYLQRAGRAGRRGESASAAITLCKNTAHGMEVFKDPLWAFNTTASAPRVRFGSSSIVQRHVNALVLGLFLRAEVPDATKLSCKWFFEGDESQCLRFLHWLNHQADQLADKLKRLTQGTVLMSLTATQLLTRTQAMMQQVDIRWRSQLAILLENIEALKADNSAWEETPAGKAIAYQLRDYRGAYLFSKLISEAFLPGHGFPVGVVNFNYLTADELEKRRAIKATQADPNEGGESFSRRIEKLPSRDLPTALREYAPGADVVLGGKVYRSSGIMLGKVLASGQELSGDHHIPWFWHCRKCGAGATSTTRPVECSHCKADIQQLDVKRYLQPVGFATDIRYQAHNDVSMPAQLPWKDPRVLVPSSVWVSLPDAGLGRYRFSHSGELFHFSEGEFGHGYAICLSCGRAESQNQPQRTPENLKNPERENTHYLLRGGSNDRQGSNKLCHGHVHKDLWLGYSSRTDMVELQLNDDNGLLIRDEVAARSLAVALREGLAHKLGIENTELGVTTQQARDINGYTGYSIFIYDNNAGGAGYAVQLIDHWADVFNYARKLLDCSCDKFCHHCLLSYDSQHYVNRLDRHHALTLLTNVRLQRLNLAPEYQYFGDGSRVETNPLSLRIAQCLNSEIYDSCSLVLAGPQEQWDFAQWPLFKELLQFASSGGHVELLVATPLANLTDSSRHQLSALAAMPGGRLQVKSVATAQLMQGKGRWLAQVTREGQSQQWAADDSATVAPGELWGQSASSPVVTLKGTSGKTFSGQTLSAEDLLPALPTGAVRINLCEQLDGPLEGFGSRFWSLVTQQHAGWKQAFTRHKEITHVEYSDRYLNSPFTARLLGEILTELVEQGMAERASLTVCVKKLDYNSRQHDALYNAWLNEEDRQQVVTTLLEEGYLGPAWPGAISWLTGDNQSMEHGRELTVTFSDGSQHYVLLDMGLSYWRCIEDTFFDFALRVPQQVERLANTRARAVAPGNDLRSYVIAG

SEQ ID NO: 25684 - protein, 1119 aa, Escherichia coli BIDMC 39
MLVKTPVNPLLQWLNMFFSRRSLSGADGRALYAYRCTDTEYESLAELLRTYAPRSYPRTIFISYSDVLFSIYAAEFIRRTHTVGHPKWDTILDSIDWKVPYVHRQKLVNDGIRYWKRKIRNLGQASGYLHTLACEGGLPIRMIENESGYLITYFRRIYQALRGQASQYPAAKIAQELGDTIPVTMQNELVYEIAGEFCETLCRLLSEHPPQSSDPVSALRKLSPDWHLQLPLVLPEANAAEIVRRLLSQSSEIRSASSLQVERIWVDVDDSWYCDARFRFPATMRTEQLTSLFECHIQPEQTRLIISGKWKNGGARLAMLSRYEQQDWRVELLPIAMQKLSGADAMAEISLSLHEGPILLGHTIPKGGYELTEELPWVFEAMNESESQLKLVGMGSVSSRLNALFISLPKNSHLDISGEGEFDIPRLLKNSERSLTKISGVFSVVLHDGAVCTIRTQQLYDSAIEYYIKSTEVELVKSDYPVHRAWPKIGWKKDLQYGIVPEKELFWRSIRSGNNAWYSVASEMPKGQIEVRRIVNDEVLFSGKVVVLPADFDINIIPESAQQGIIMLSGITDTRIDKYSNNEKVTLKSDYSQNECAIYYNSSLMLENTVDLRVSWKDGSNLKLLLPKPVSGGRFVTNDGSVHFDGVASIAHLHGIDAELLTISCAGRGYLNIELLDENPVAEKFRYLHADLPLLSGRNDKLQQISLYENYNLLNSMLACAWNSNSTLCVDFYSDRFGKDKATLNIKRYDGSFIEHDQGLLVDIKNSVVFPANRIDELVVDAISLKDPGLHISLLKKDEFAYDLSALNVQDSPWLIVGKLDDTARIAPVIKWGLPVLQTNDLLLNALCEADSEQRKKYFNELIFEIDNNPLQNYCCLLTEYIKKYKMNNGLSLLDLDLFRGISSNYRVVVQLLISSCLSGDSDTIYDIQDELPFSWGWIPVSIWKDVFQKCWAYLEKQINDKTLALHILQPFIAFMNHRAHIDRRLTPIANMLLTYGELLPAGCNVLPTVSREQFNEAKQMLLRNPDSFGRISIFPKELWSSAITPELKSVFNKLWIEDKYHSRLEKRFNLMLVAALLTQKDNNLIHQLSALFEFHYQQAPQQLGVIYQYYFEQAGVCH

SEQ ID NO: 25685 - protein, 2114 aa, Escherichia coli BIDMC 43a
MTTRYFSSLIEQSLSRSTEATLSIMGVTNPQLREHLAQQMGADCGKPGSFLASPVFQQMFGWKESNHTMRSLTEGNALLSKAVVDSLDDQNNGRYRFGADWRPFTHQLASWKALLEKKHSVVVTSGTGSGKTECFMVPVLEDLYRELHENGNNPLVGVRALFLYPLNALINSQRERLDAWTRGFGTGIRYCLYNGNTENLHASVKSEQAKRPNEVLSREKMREEPAPILVTNGTMLEYMMVRQVDAPIIQQSKAQKSLRWIVLDEAHTYVGSQAAELALQLRRVMTAFGVTPDDVRFVATSATIAGSDAEKQLKKFLSELSGIPQERIDVLDGSRVIPELEPSKNVSVPLDEIEQIPDLDLRDKNDNKIKGISPERFYALTHSPEARYIREMLVKQPNPMKLDEITERLHVLTKQHYSQQEVLRWIDVCSGTQPNAKDPAFLKVRAHIFQRNTQGIWACVDKDCRLKHGTPLDKGWPFGYVYVNQRQNCDCGSPVYEVAFCNDCNEPHLLARDKKGKLVQWENKGGDEFSLQDEVPVEHDATEEKVEKENSFQPPLIIAAGETSEAGYTLQRLDRQTRRIGVINNDSIPLIINDIEQVCSASGCGYRGMSGKQPFRRALLGGPFYVTNIVPTVLEYCQDFTSDEGKEGVGPDSLPGRGRRLITFTDSRQGTARMAVRMQQEAERSRLRGSVVEILSWHQRTQTSTAPNANADLEKLAARAKQAREQAEEYRSWGMPDQAKLSQAQAEQLEQAYQAATGGKAATILVSRTWTEMVNELKERADIRGPVLQYNHYLKPEVFNENGGPLKLSEMLLFREFMRRPKRTNSLETQGLVQVGYQGLEKIHKSPLHWQEKGLTLDDWRDFLKVTLDHYVRESNFTQLDDELKNWIGSRFSSKFVRNPESKDPEDNQNRRWPQIRNGNVSHRLAKLLMLGAGFKTVNAATIDIINTWLKEAWAQLTGPLAVLKPDGNRFYLPKEHMTFSLITDAWICPVTNKILDTAFKGLTPYLPTHISFEHLTLAQYDTFVAQKVTMPEIWKLDRSQEDYAEGLAKARDWVSHDPLIAQLRSENVWTDINDRVVEGGFYYRTAEHSAQQSSERLQSYEKMFKNGQLNVLNCSTTMEMGVDIGGITAVVMNNVPPHPANYLQRAGRAGRSKESRAISYTLCKGNPHDQQVFANPLWPFETMIPAPMFAMNSARLVQRHVNALLLSDFLCNVIGETDKEKTSLDSLWFFGEDDGQSKCERFKIWLERPVLDIDTALERLVKGTALHGARAEYLRDKTINAITFLQQRWLSVYRDLVTQERESQPQTPYRKRIELEKKRHCGEYLLRDLAARTFLPGYGFPTDVVTFDNFTMEDYIREKSQKSRDKKDREDNVSRYKGLPSRNLGVAIREYAPGAEIILDGRVFRSAGVSLHWHNINADTNEAQRLDCAWRCHKCGTIGYEEGMSSSGMLFCSNSACGEKIIMDNRRQVLQPAGFVTDAHAPVTNNIETMKFVPVVPAWVFVKAEPVPLPNPLMGYMASGADGHVFQQSLGEGGHGYALCLSCGRAESMLNENDAPKSMEAHYPPRPGKADRDSQNHRLICPGSTALMKNVTLGALARTDVFEMVLRKPQNGEYLPDNTEEGRIVAMTLAVALRQALAGVLGISAAELGYSVRPVRLEDGQSVLAVQLYDVISGGAGFASSAPVHIEAILQGMVKQLGCRHCETACSECLLDSQTRHDHDLLDRKAALAWLGDDFTYYIGLPDEETFSLPDARYCPGAIGDTIRRAINEGAEKLTLWMTGAPNEWDLYARQFRAAVQNYRLKDNVEVDLVIPTGVDDPDLLHELSQFTALGVRLCHVEQDLQLPIVAQVTFTDRVMTLASRSQQATIPGPEWHLNDELVVRSLGYKTVELNEFILPAKATNAVERVKDIQIHKQLNGPLSQFGQRFWDVLFNDHEEAQSLMNNTRITGVHYTDRYLQNPVALALLGSILRPLKTKLTDGAEVTLDTLFKDKDRPGNRPFHDWMSIADFQDFADQWFAAALGRPVELTVFDSPRDIPHHRKLTVTFEDGQVLKIRFDQGMGYWRINFSSQWHYFDFRDDVSFQLVKMAQACKEGNVANSEESWATDVLVEVIAS

SEQ ID NO: 25686 - protein, 1096 aa, Escherichia coli BIDMC 43a; identical to SEQ ID NO: 25668

SEQ ID NO: 25687 - protein, 2114 aa, Escherichia coli BIDMC 43b; identical to SEQ ID NO: 25685

SEQ ID NO: 25688 - protein, 1096 aa, Escherichia coli BIDMC 43b; identical to SEQ ID NO: 25668

SEQ ID NO: 25689 - protein, 2114 aa, Escherichia coli BIDMC 6; identical to SEQ ID NO: 25257

SEQ ID NO: 25690 - protein, 1096 aa, Escherichia coli BIDMC 6; identical to SEQ ID NO: 25668

SEQ ID NO: 25691 - protein, 2114 aa, Escherichia coli BIDMC 82; identical to SEQ ID NO: 25257

SEQ ID NO: 25692 - protein, 1096 aa, Escherichia coli BIDMC 82; identical to SEQ ID NO: 25668

SEQ ID NO: 25693 - protein, 2114 aa, Escherichia coli BIDMC 9; identical to SEQ ID NO: 25257

SEQ ID NO: 25694 - protein, 1096 aa, Escherichia coli BIDMC 9; identical to SEQ ID NO: 25668

SEQ ID NO: 25695 - protein, 2104 aa, Escherichia coli CB7326; identical to SEQ ID NO: 25235

SEQ ID NO: 25696 - protein, 978 aa, Escherichia coli CB7326; identical to SEQ ID NO: 25216

SEQ ID NO: 25697 - protein, 2114 aa, Escherichia coli D6-113.11; identical to SEQ ID NO: 25257

SEQ ID NO: 25698 - protein, 1096 aa, Escherichia coli D6-113.11; identical to SEQ ID NO: 25332

SEQ ID NO: 25699 - protein, 2104 aa, Escherichia coli DEC5A
MDVQQLHYAPLLNQLHQRAVRSVVSQLALRSKSLTHYLESQYFQPPGQEGSLLADPVFESTFGWMPADETMEDLRDKLISSPLVDALSKAPVPFRHQLTAWRTILEDKKSLLVSSGTGSGKTECFMVPVLEDLIRQQKSTRQSLTGTQAIFLYPLNALINSQQERLREWTRGFKGKIRFALYNGETRHTKYEIQEDQLKVPEQALSREAIYEAPPSIMVTNTTMLEYMLIRRKDAPIIEKSQGMLKYIVLDEAHSYIGSQAAELALLLRRVMQAFNVGPGTDKPVQIIATSATIGEDSPEGNKELAKFVADLAGVTERDVKVVRGYRQIPRVSESLIRHEYPTSLTSLKSLSPQDLYQQLCHYRVAQQLRQALTHPGRQAVRLSELLNVARRTWPDINHRELLQLLDLMARSREGELAFTPLRMHGFIRTLAGLWACSNKQCSHKAHELNQSDWPFGQVWFEQRQYCDCGAPVFEVLRCSGCGSAYLSAKEEMRGDGTNWLVAQPAAAEVDEFALDVDVYSEDEDNDELDNNSQFDRLIASGGEKYIISLEETTAGKIDSEAQKHYEINLLRPESRGEGRNNSFACVCCGDTQRKNNPLFRPLRLGAPFFLNEIIPTLLEFSPLPQTREEQLGPFNGRRLLTFTDSRQGTARISARLQQDADKATLRALCYQELANITEPSAKLSPAHCALLEKVISQFSVLPLKNSIDALKKAMAANEELSPTDIQALKIIEPMVSSLSTEHAEAMQILQANSGNQQKKTMSWQTLSEQLVGSVDLADRMRGSFKELSGLDLTKQQFADFCLYSEFGRRPKNAWTLESLGLVAIHYPFIDKVTTCPQDWKTLLPDPDKQLAEWRNLLKITLDFFIRENSAVFYENEQYPRWMGARFPVKMLQGPDKKNKGQKRDQLWPQIRDRHYNRVIKLLIAVFPAIQPEQAHWKSLVNHLMIEVWDAIRPCLRQFESGYQLDIKQQAEFYSPKQVWRCPYTRRALDVTLLGYSPYLPGSKEIAPEKAVLIEMPELPVRHWRLSGGGEIAREERLEWLESNALIQHAREEGLWSTRSDRLALKDSWYRLEEHSAQRTPEQNQFNEKQFKSGKVNVLNCSTTMEMGVDIGGMSLVAMNNVPPAPANYLQRAGRAGRRGESASAAITLCKNTAHGMEVFKDPLWAFNTTASAPRVRFGSSSIVQRHVNALVLGLFLRAEVPDATKLSCKWFFEGDESQCLRFLHWLNHQADQLADKLKRLTQGTVLMSLTATQLLTRTQAMMQQVDIRWRSQLAILLENIEALKADNSAWEETPAGKAIAYQLRDYRGAYLFSKLISEAFLPGHGFPVGVVNFNYLTADELEKRRAIKATQADPNEGGESFSRRIEKLPSRDLPTALREYAPGADVVLGGKVYRSSGIMLGKVLASGQELSGDHHIPWFWHCRKCGAGATSTTHPVECSHCKADIQQLDVKRYLQPVGFATDIRYQAHNDVSMPAQLPWKDPRVLVPSSVWVSLPDAGLGRYRFSHSGELFHFSEGEFGHGYAICLSCGRAESQTQPQRTPENLKNPERENTHYLLRGGSNDRQGSNKLCHGHVHKDLWLGYSSRTDMVELQLNDDNGLLIRDEVAARSLAVALREGLAHKLGIENTELGVTTQQARDINGYTGYSIFIYDNNAGGAGYAVQLIDHWADVFNYARKLLDCSCDKFCHHCLLSYDSQHYVNRLDRHHALTLLTNVRLQRLNLAPEYQYFGDGSRVETNPLSLRIAQCLNSEIYDSCSLVLAGPQEQWDFAQWPLFKELLQFASSGGNVELLVATPLANLTDSSRHQLSALAAMPGGRLQVKSIATAQLMQGKGRWLAQVTREGQSQQWAADDSATVAPGELWGQSASSPVVTLKGTSGKTFSGQTLSAEDLLPALPTGAVRINLCEQLDGPLEGFGSRFWSLVTQQHAGWKQAFTRHKEITHVEYSDRYLNSPFTARLLGEILTELVEQGMAERASLTVCVKKLDYNSRQHDALYNAWLNEEDRQQVVTTLLEEGYLGPAWPGAISWLTGDNQSTEHGRELTVTFSDGSQHYVLLDMGLSYWRCIEDTFFDFALRVPQQVERLANTRARAVAPGNDLRSYIIAG

SEQ ID NO: 25700 - protein, 1104 aa, Escherichia coli DEC5A
MFFSRRSLSGADGRALYAYRCTDTEYESLAELLRTYAPRSYPRTIFISYSDVLFSIYAAEFIRRTHTVGHPKWDTILDSINWKVPYVHRQKLVNDGIRYWKRKIRNLGQASGYLHTLACEGGLPIRMIENESGYLITYFRRIYQALRGQSSQYPAAKIAQELGDTIPVTMQNELVYEIAGEFCETLCRLLSEHPPHSSDPVSALRKLSPDWHLQLPLVLPEANAAEIVRRLLSQSSEIRSASSLQVERIWVDVDDSWYCDARFRFPATMRTEQLTSLFECHIQPEQTRLIISGKWKNGGARLAMLSRYEQQDWRVELLPIAMQKLSGADAMAEISLSLHEGPILLGHTIPKGGYELTEELPWVFEAMNESESQLKLVGMGSVSSRLNALFISLPKNSHLDISGEGEFDIPRLLKNSERSLTKISGVFSVVLHDGAVCTIRTQQLYDSAIEYYIKSTEVELVKSDYPVHRAWPKIGWKKDLQYGIVPEKELFWRSIRSGNNAWYSVASEMPKGQIEVRRIVNDEVLFSGKVVVLPADFDINIIPESAQQGIIMLSGITDTRIDKYSNNEKVTLKSDYSQNECAIYYNSSLMLENTVDLRVSWKDGSNLKLLLPKPVSGGRFVTNDGSVHFDGVASIAHLHGIDAELLTISCAGRGYLNIELLDENPVAEKFRYLHADLPLLSGRNDKLQQISLYENYNLLNAMLACAWNSNSTLCVDFYSDRFGKDKATLNIKRYDGSFIEHDQGLLVDIKNSVVFPANRIDELVVDAISLKNPGLHISLLKKDEFAYDLSALNVQDSPWLIVGKLDGTARIAPVIKWMLPVLQTNDLLLNALCEADPEQRKKNFNELIFEIDNNPLQNYCCLLTEYIKKYKMNNGLSLLDLDLFRGISSNYRVVVQLLISSCLSGDSDTIYDIQEELPFSWGWIPVSIWKDVFQKCWTYLEKQINDKTLALHILQPFIAFMNHRAHIDRRLAPIANMLLTYSESLPTGCDVLPTVSREQFNEAKQMLLRNPDSFGRISIFPKELWSSAITPELKSVFNKLWIEDKYHSRLEKRFNLMLVAALLTQKDNNLIHQLSALFEFHYQQAPQQLGVIYQYYFEQAGVCH

SEQ ID NO: 25701 - protein, 2104 aa, Escherichia coli EC1734; identical to SEQ ID NO: 25311

SEQ ID NO: 25702 - protein, 978 aa, Escherichia coli EC1734; identical to SEQ ID NO: 25216

SEQ ID NO: 25703 - protein, 2104 aa, Escherichia coli EC1735; identical to SEQ ID NO: 25311

SEQ ID NO: 25704 - protein, 978 aa, Escherichia coli EC1735; identical to SEQ ID NO: 25216

SEQ ID NO: 25705 - protein, 2104 aa, Escherichia coli EC1736; identical to SEQ ID NO: 25311

SEQ ID NO: 25706 - protein, 978 aa, Escherichia coli EC1736; identical to SEQ ID NO: 25216

SEQ ID NO: 25707 - protein, 2104 aa, Escherichia coli EC1737; identical to SEQ ID NO: 25311

SEQ ID NO: 25708 - protein, 978 aa, Escherichia coli EC1737; identical to SEQ ID NO: 25216

SEQ ID NO: 25709 - protein, 2104 aa, Escherichia coli EC1738; identical to SEQ ID NO: 25235

SEQ ID NO: 25710 - protein, 553 aa, Escherichia coli EC1738
MLSGITDTRIDKYSNNEKVTLKSDYSQNECAIYYNSSLMLENTVDLRVSWKDGSNLKLLLPKPVSGGRFVTNDGSVHFDGVASIAHLHGIDAELLTISCAGRGYLNIELLDENPVAEKFRYLHADLPLLSGRNDKLQQISLYENYNLLNAMLACAWNSNSTLCVDFYSDRFGKDKATLNIKRYDGSFIEHDQGLLVDIKNSVVFPANRIDELVVDAISLKNPGLHISLLKKDEFAYDLSALNVQDSPWLIVGKLDGTARIAPVIKWMLPVLQTNDLLLNALCEADPEQRKKNFNELIFEIDNNPLQNYCCLLTEYIKKYKMNNGLSLLDLDLFRGISSNYRVVVQLLISSCLSGDSDTIYDIQEELPFSWGWIPVSIWKDVFQKCWTYLEKQINDKTLALHILQPFIAFMNHRAHIDRRLAPIANMLLTYSESLPTGCDVLPTVSREQFNEAKQMLLRNPDSFGRISIFPKELWSSAITPELKSVFNKLWIEDKYHSRLEKRFNLMLVAALLTQKDNNLIHQLSALFEFHYQQAPQQLGVIYQYYFEQAGVCH

SEQ ID NO: 25711 - protein, 2104 aa, Escherichia coli EC1845; identical to SEQ ID NO: 25407

SEQ ID NO: 25712 - protein, 978 aa, Escherichia coli EC1845; identical to SEQ ID NO: 25216

SEQ ID NO: 25713 - protein, 2104 aa, Escherichia coli EC1846; identical to SEQ ID NO: 25407

SEQ ID NO: 25714 - protein, 978 aa, Escherichia coli EC1846; identical to SEQ ID NO: 25216

SEQ ID NO: 25715 - protein, 2104 aa, Escherichia coli EC1847; identical to SEQ ID NO: 25407

SEQ ID NO: 25716 - protein, 978 aa, Escherichia coli EC1847; identical to SEQ ID NO: 25216

SEQ ID NO: 25717 - protein, 2104 aa, Escherichia coli EC1848; identical to SEQ ID NO: 25407

SEQ ID NO: 25718 - protein, 978 aa, Escherichia coli EC1848; identical to SEQ ID NO: 25216

SEQ ID NO: 25719 - protein, 2104 aa, Escherichia coli EC1849; identical to SEQ ID NO: 25407

SEQ ID NO: 25720 - protein, 978 aa, Escherichia coli EC1849; identical to SEQ ID NO: 25216

SEQ ID NO: 25721 - protein, 2104 aa, Escherichia coli EC1850; identical to SEQ ID NO: 25407

SEQ ID NO: 25722 - protein, 978 aa, Escherichia coli EC1850; identical to SEQ ID NO: 25216

SEQ ID NO: 25723 - protein, 2104 aa, Escherichia coli EC1856; identical to SEQ ID NO: 25407

SEQ ID NO: 25724 - protein, 978 aa, Escherichia coli EC1856; identical to SEQ ID NO: 25216

SEQ ID NO: 25725 - protein, 2104 aa, Escherichia coli EC1862; identical to SEQ ID NO: 25407

SEQ ID NO: 25726 - protein, 978 aa, Escherichia coli EC1862; identical to SEQ ID NO: 25216

SEQ ID NO: 25727 - protein, 2104 aa, Escherichia coli EC1863; identical to SEQ ID NO: 25311

SEQ ID NO: 25728 - protein, 978 aa, Escherichia coli EC1863; identical to SEQ ID NO: 25216

SEQ ID NO: 25729 - protein, 2104 aa, Escherichia coli EC1864; identical to SEQ ID NO: 25311

SEQ ID NO: 25730 - protein, 978 aa, Escherichia coli EC1864; identical to SEQ ID NO: 25216

SEQ ID NO: 25731 - protein, 2104 aa, Escherichia coli EC1866; identical to SEQ ID NO: 25311

SEQ ID NO: 25732 - protein, 978 aa, Escherichia coli EC1866; identical to SEQ ID NO: 25216

SEQ ID NO: 25733 - protein, 2104 aa, Escherichia coli EC1868
MDVQQLHYAPLLNQLHQRAVRSVVSQLALRSKSLTHYLESQYFQPPGQEGSLLADPVFESTFGWMPADETMEDLRDKLISSPLVDALSKAPVPFRHQLTAWRTILEDKKSLLVSSGTGSGKTECFMVPVLEDLIRQQKSTRQSLTGTQAIFLYPLNALINSQQERLREWTRGFKGKIRFALYNGETRHTKYEIQEDQLKVPEQALSREAIYEEPPSIMVTNTTMLEYMLIRRKDAPIIEKSQGMLKYIVLDEAHSYIGSQAAELALLLRRVMQAFNVGPGTDKPVQIIATSATIGEDSPEGNKELAKFVADLAGVTERDVKVVRGYRQIPRVSESLIRHEYPTSLTSLKSLSPQDLYQQLCHYRVAQQLRQALTHPGRQAVRLSELLNVARRTWPDINHRELLQLLDLMARSREGELAFTPLRMHGFIRTLAGLWACSNKQCSHKAHELNQSDWPFGQVWFEQRQYCDCGAPVFEVLRCSGCGSAYLSAKEEMRGDGTNWLVAQPAAAEVDEFALDVDVYSEDEDNDELDNNSQFDRLIASDGEKYIISLEETTAGKIDSEAQKHYEINLLRPESRGEGRNNSFACVCCGDTQRKNNPLFRPLRLGAPFFLNEIIPTLLEFSPLPQTREEQLGPFNGRRLLTFTDSRQGTARISARLQQDADKATLRALCYQELANITEPSAKLSPAHCALLEKVISQFSVLPLKNSIDALKKAMAANEELSPTDIQALKIIEPMVSSLSTEHAEAMQILQANSGNQQKKTMSWQTLSEQLVGSVDLADRMRGSFKELSGLDLTKQQFADFCLYSEFGRRPKNAWTLESLGLVAIHYPFIDKVTTSPQDWKTLLPDPDKQLAEWRNLLKITLDFFIRENSAVFYENEQYPRWMGARFPVKMLQGPDKKNKGQKRDQLWPQIRDRHYNRVIKLLIAVFPAIQPEQAHWKSLVNHLMIEVWDAIRPCLRQFESGYQLDIKQQAEFYSPKQVWRCPYTRRALDVTLLGYSPYLPGSKEIAPEKAVLIEMPELPVRHWRLSGGGEIAREERLEWLESNALIQHAREEGLWSTRSDRLALKDSWYRLEEHSAQRTPEQNQFNEKQFKSGKVNVLNCSTTMEMGVDIGGMSLVAMNNVPPAPANYLQRAGRAGRRGESASAAITLCKNTAHGMEVFKDPLWAFNTTASAPRVRFGSSSIVQRHVNALVLGLFLRAEVPDATKLSCKWFFEGDESQCLRFLHWLNHQADQLADKLKRLTQGTVLMSLTATQLLTRTQAMMQQVDIRWRSQLAILLENIEALKADNSAWEETPAGKAIAYQLRDYRGAYLFSKLISEAFLPGHGFPVGVVNFNYLTADELEKRRAIKATQADPNEGGESFSRRIEKLPSRDLPTALREYAPGADVVLGGKVYRSSGIMLGKVLASGQELSGDHHIPWFWHCRKCGAGATSTTHPVECSHCKADIQQLDVKRYLQPVGFATDIRYQAHNDVSMPAQLPWKDPRVLVPSSVWVSLPDAGLGRYRFSHSGELFHFSEGEFGHGYAICLSCGRAESQTQPQRTPENLKNPERENTHYLLRGGSNDRQGSNKLCHGHVHKDLWLGYSSRTDMVELQLNDDNGLLIRDEVAARSLAVALREGLAHKLGIENTELGVTTQQARDINGYTGYSIFIYDNNAGGAGYAVQLIDHWADVFNYARKLLDCSCDKFCHHCLLSYDSQHYVNRLDRHHALTLLTNVRLQRLNLAPEYQYFGDGSRVETNPLSLRIAQCLNSEIYDSCSLVLAGPQEQWDFAQWPLFKELLQFASSGGNVELLVATPLANLTDSSRHQLSALAAMPGGRLQVKSIATAQLMQGKGRWLAQVTREGQSQQWAADDSATVAPGELWGQSASSPVVTLKGTSGKTFSGQTLSAEDLLPALPTGAVRINLCEQLDGPLEGFGSRFWSLVTQQHAGWKQAFTRHKEITHVEYSDRYLNSPFTARLLGEILTELVEQGMAERASLTVCVKKLDYNSRQHDALYNAWLNEEDRQQVVTTLLEEGYLGPAWPGAISWLTGDNQSTEHGRELTVTFSDGSQHYVLLDMGLSYWRCIEDTFFDFALRVPQQVERLANTRARAVAPGNDLRSYIIAG

SEQ ID NO: 25734 - protein, 978 aa, Escherichia coli EC1868; identical to SEQ ID NO: 25216

SEQ ID NO: 25735 - protein, 2104 aa, Escherichia coli EC1869; identical to SEQ ID NO: 25311

SEQ ID NO: 25736 - protein, 978 aa, Escherichia coli EC1869; identical to SEQ ID NO: 25216

SEQ ID NO: 25737 - protein, 2104 aa, Escherichia coli EC1870; identical to SEQ ID NO: 25311

SEQ ID NO: 25738 - protein, 978 aa, Escherichia coli EC1870; identical to SEQ ID NO: 25216

SEQ ID NO: 25739 - protein, 2104 aa, Escherichia coli EC4013; identical to SEQ ID NO: 25407

SEQ ID NO: 25740 - protein, 978 aa, Escherichia coli EC4013; identical to SEQ ID NO: 25216

SEQ ID NO: 25741 - protein, 2104 aa, Escherichia coli EC4196; identical to SEQ ID NO: 25407

SEQ ID NO: 25742 - protein, 978 aa, Escherichia coli EC4196; identical to SEQ ID NO: 25216

SEQ ID NO: 25743 - protein, 2104 aa, Escherichia coli EC4203; identical to SEQ ID NO: 25407

SEQ ID NO: 25744 - protein, 978 aa, Escherichia coli EC4203; identical to SEQ ID NO: 25216

SEQ ID NO: 25745 - protein, 2104 aa, Escherichia coli EC4402; identical to SEQ ID NO: 25407

SEQ ID NO: 25746 - protein, 978 aa, Escherichia coli EC4402; identical to SEQ ID NO: 25216

SEQ ID NO: 25747 - protein, 2104 aa, Escherichia coli EC4421; identical to SEQ ID NO: 25235

SEQ ID NO: 25748 - protein, 978 aa, Escherichia coli EC4421; identical to SEQ ID NO: 25216

SEQ ID NO: 25749 - protein, 2104 aa, Escherichia coli EC4422; identical to SEQ ID NO: 25235

SEQ ID NO: 25750 - protein, 978 aa, Escherichia coli EC4422; identical to SEQ ID NO: 25216

SEQ ID NO: 25751 - protein, 2104 aa, Escherichia coli EC4436; identical to SEQ ID NO: 25311

SEQ ID NO: 25752 - protein, 978 aa, Escherichia coli EC4436; identical to SEQ ID NO: 25216

SEQ ID NO: 25753 - protein, 2104 aa, Escherichia coli EC4437; identical to SEQ ID NO: 25311

SEQ ID NO: 25754 - protein, 978 aa, Escherichia coli EC4437; identical to SEQ ID NO: 25216

SEQ ID NO: 25755 - protein, 2104 aa, Escherichia coli EC4439; identical to SEQ ID NO: 25407

SEQ ID NO: 25756 - protein, 978 aa, Escherichia coli EC4439; identical to SEQ ID NO: 25216

SEQ ID NO: 25757 - protein, 2104 aa, Escherichia coli EC4448; identical to SEQ ID NO: 25407

SEQ ID NO: 25758 - protein, 978 aa, Escherichia coli EC4448; identical to SEQ ID NO: 25216

SEQ ID NO: 25759 - protein, 2104 aa, Escherichia coli EC96038; identical to SEQ ID NO: 25235

SEQ ID NO: 25760 - protein, 978 aa, Escherichia coli EC96038; identical to SEQ ID NO: 25216

SEQ ID NO: 25761 - protein, 2114 aa, Escherichia coli ECC-Z; identical to SEQ ID NO: 25385

SEQ ID NO: 25762 - protein, 734 aa, Escherichia coli ECC-Z; identical to SEQ ID NO: 25338

SEQ ID NO: 25763 - protein, 1715 aa, Escherichia coli Envira 10/1
MKLDEMTERLNILTKQHHSQHEVLRWIDVCSGTQPNAKDPAFLKVRAHIFQRNTQGIWACVDKDCRLKHGTPLEKGWPFGYVYVNQRQNCDCGSPVYEVAFCNDCNEPHLLARDKKGKLVQWENKGGDEFSLQDEVPVEHDATAEKVEKENSFQPPLIIAAGETSEAGYTLQRLDRQTRRIGVINNDSIPLIINDVEQVCSASGCGYRGMSGKQPFRRALLGGPFYVTNIVPTVLEYCQDFTSDEGKEGVGPDSLPGRGRRLITFTDSRQGTARMAVRMQQEAERSRLRGSVVEILSWHQRTQTSTAPNANADLEKLATRAKQAREQAEEYRSWGMPDQAKLSQAQAEQLEQAYQFAIGGKAATTLVSRTWTEMVNELKDKADIRGPVLKYNYYLKPEVFNENGGPLKLSEMLLFREFMRRPKRTNSLETQGLVQVGYLGLEKIHKLPMHWQERELTLDDWRDFLKVTLDHYVRESNFTQLDDELKNWIGSRFSSKFVRNPESKDPEDNQNRRWPQIRNGNVSHRLAKLLMLGAGFKTVNTATIDIINTWLKEAWAQLTGPLAVLKPDGNRFYLPKEHMTFSLITDAWICPVTNKILDTAFKGLTPYLPTHISFEHLTQAQYDTFVAQKVTMPEIWKLDRSQEDYAEGLAKARDWVSNDPLIAQLRSENVWTDINDRVVEGGFYYRTAEHSAQQSSERLQSYEKMFKNGQLNVLNCSTTMEMGVDIGGITAVVMNNVPPHPANYLQRAGRAGRSKESRAISYTLCKGNPHDQQVFANPLWPFETMIPAPMVAMNSARLVQRHVNALLLSDFLCNVIGETDKEKTSLDSLWFFGEDDGQSKCERFKIWLERPVLDIDTALERLVKGTALHGARAEHLRDKTISAITFLQQRWLSVYRDLVTQERESQPQTPYRKRIELEKKRHCGEYLLRDLAARTFLPGYGFPTDVVTFDNFTMEDYIREKLQKSRDKKDREDNVSRYKGLPSRNLGVAIREYAPGAEIILDGRVFRSAGVSLHWHNINADTNEAQRLDCAWRCHKCGTIGYEEGMSSSGMLFCSNSACGEKIIMDNRRQVLQPAGFVTDAHAPVTNNIETMKFVPVVPAWVFVKAEPVPLPNPLMGYMASGADGHVFQQSLGEGGHGYALCLSCGRAESMLNENDAPKSMEAHYPPRPGKADRDSQNHRLICPGSTALMKNVTLGALARTDVFEMVLRKPQKGEYLPDNTEEGRIVAMTLAVALRQALAGVLGISGAELGYSVRPVRLEDGQSVLAVQLYDVISGGAGFASSAPVHIEAILQGMVKQLGCRHCDTACSECLLDSQTRHDHDLLDRKAALAWLGDDFTYYIGLPDEETFSLPDARYCPGAIGDTIRRAINEGAEKLTLWMTGAPNEWDLYARQFRAAVQSYRLKDNVEVDLVIPAGVDDPDLLYELSQFTALGVRLCHVEQDLQLPIVAQVTFADRVMTLASRSQQATIPGPEWHLNDELVVRSLGYKTVELNEFILPAKAANAVERVKDIQIHKQLNGPLSQFGQRFWDVLFNDHEEAQSLMNNTRITGVHYTDRYLQNPVALALLGSILRPLKTKLTDVAEVALDTLFKDKDRPGNRPFHDWMSIADFQDFADQWFAAALGRPIELTVFDSPRDIPHHRKLTVTFEDGQVLKIRFDQGMGYWRINFASQWHYFDFRDDVSFQLVKMAQACNEGNVANSEESWATDVLVEVSAS

SEQ ID NO: 25764 - protein, 191 aa, Escherichia coli Envira 10/1
MFHSETNLANTDYRENRSMILSGLSLWEKGSPLHKSTQQVRTQGPIRHADCRQRKLADFLCTGGIIQEMLGAQYLSIRNSNNETLLRRKIGILPADFSIEIKGGMHANEGTIVITTQHPCVAKLKDKTLEATRKRTEGRTEIQLKAEGVPPAFITLQVLPNLAADPIDIELPFPAKGCLALDVNGRPLDKN

SEQ ID NO: 25765 - protein, 1715 aa, Escherichia coli Envira 8/11; identical to SEQ ID NO: 25763

SEQ ID NO: 25766 - protein, 443 aa, Escherichia coli Envira 8/11
MILSGLSLWEKGSPLHKSTQQVRTQGPIRHADCRQRKLADFLCTGGIIQEMLGAQYLSIRNSNNETLLRRKIGILPADFSIEIKGGMHANEGTIVITTQHPCVAKLKDKTLEATRKRTEGRTEIQLKAEGVPPAFITLQVLPNLAADPIDIELPFPAKGCLALDVNGRPLDKNITLHDLLGSRAFLFSRNGEPTKYTLQLYLRSVSGLQAWHEWCYTALSDRPVELNLYSLREHIENLISLEAGIDQVVEMRITGAGVVMAWQIRRYKYSLRYDYEKELLLSQSVNHRAGQIPSPVIMLLSEPERKSIPLASRMSEGVPVGEYELSSIVNKNGPWLVVPKPGEEMAFRPCFIRGESSLPVEESNIRSLQKATQLFNPQAEVNTITRVLGQMANDPAHSGWQFMRSLYDQFGYLPLATFEVWRALVQHPQALAMSLFKFEMSAE

SEQ ID NO: 25767 - protein, 2104 aa, Escherichia coli FDA504; identical to SEQ ID NO: 25235

SEQ ID NO: 25768 - protein, 978 aa, Escherichia coli FDA504; identical to SEQ ID NO: 25216

SEQ ID NO: 25769 - protein, 2104 aa, Escherichia coli FDA505; identical to SEQ ID NO: 25235

SEQ ID NO: 25770 - protein, 978 aa, Escherichia coli FDA505; identical to SEQ ID NO: 25216

SEQ ID NO: 25771 - protein, 2104 aa, Escherichia coli FDA506; identical to SEQ ID NO: 25235

SEQ ID NO: 25772 - protein, 978 aa, Escherichia coli FDA506; identical to SEQ ID NO: 25216

SEQ ID NO: 25773 - protein, 2104 aa, Escherichia coli FDA507; identical to SEQ ID NO: 25235

SEQ ID NO: 25774 - protein, 978 aa, Escherichia coli FDA507; identical to SEQ ID NO: 25216

SEQ ID NO: 25775 - protein, 2104 aa, Escherichia coli FDA517; identical to SEQ ID NO: 25235

SEQ ID NO: 25776 - protein, 978 aa, Escherichia coli FDA517; identical to SEQ ID NO: 25216

SEQ ID NO: 25777 - protein, 2104 aa, Escherichia coli FRIK1985; identical to SEQ ID NO: 25235

SEQ ID NO: 25778 - protein, 978 aa, Escherichia coli FRIK1985; identical to SEQ ID NO: 25216

SEQ ID NO: 25779 - protein, 2104 aa, Escherichia coli FRIK1997; identical to SEQ ID NO: 25235

SEQ ID NO: 25780 - protein, 978 aa, Escherichia coli FRIK1997; identical to SEQ ID NO: 25216

SEQ ID NO: 25781 - protein, 2104 aa, Escherichia coli FRIK523; identical to SEQ ID NO: 25235

SEQ ID NO: 25782 - protein, 978 aa, Escherichia coli FRIK523; identical to SEQ ID NO: 25216

SEQ ID NO: 25783 - protein, 2114 aa, Escherichia coli FVEC1302; identical to SEQ ID NO: 25257

SEQ ID NO: 25784 - protein, 580 aa, Escherichia coli FVEC1302
MLGAQYLSIRNSKNETLLRRKIGILPADFSIEIKGGIHANEGTIVITTQHPCVAKLKDKTLEATRKRTEGRTEIQLKAEGVPPAFITLQVLPNLAADPIDIELPFPAKGCLALDVNGRPLDKNITLHDLLGSRAFLFSRNGEPTRYTLQLHLRSVSGLQAWHEWCYTALSDRPVELNLYSLREHIENLISLEAGIDQVVEMRITGAGVVMAWQIRRYKYSLRYDYEKELLLSQSVNHRAGQIPSPVIMLLSEPERKSIPLASRMSEGVPVGEYELSSIVNKNGPWLVVPKPGEEMAFRPCFIRGESSLPVEESNIRSLQKATQLFNPQAEVNTITLVLGQMANDPAHSGWQFMRSLYDQFGYLPLATFEVWRALVQHPQALAMSLFKFEMSAEYLSRIENEFPILWEFFPIFEIKAASERFKLFLSQKGAPEETQKLLVTNMFQRLGLVFPTYADEIEKWLSNGHLPPSIPESFVHVWYQELLREHSEAQWPEYGSKRLHSWMASQKNPVIGINPDANHRYSVALLPVFAAAVASGNASFESVFDRKPGAVFFLRQVRDFDSRWFKAIFQCSLLRYVAKK

SEQ ID NO: 25785 - protein, 2114 aa, Escherichia coli FVEC1412; identical to SEQ ID NO: 25257

SEQ ID NO: 25786 - protein, 580 aa, Escherichia coli FVEC1412; identical to SEQ ID NO: 25784

SEQ ID NO: 25787 - protein, 2114 aa, Escherichia coli HVH 10 (4-6832164); identical to SEQ ID NO: 25257

SEQ ID NO: 25788 - protein, 1096 aa, Escherichia coli HVH 10 (4-6832164); identical to SEQ ID NO: 25332

SEQ ID NO: 25789 - protein, 2114 aa, Escherichia coli HVH 106 (4-6881831); identical to SEQ ID NO: 25257

SEQ ID NO: 25790 - protein, 1096 aa, Escherichia coli HVH 106 (4-6881831); identical to SEQ ID NO: 25332

SEQ ID NO: 25791 - protein, 1302 aa, Escherichia coli HVH 110 (4-6978754)
MTTRYFSSLIEQSLSRSTEATLSIMGVTNPQLREHLAQQMGADCGKPGSFLASPVFQQMFGWKESNHTMRSLTEGNALLSKAVVDSLDDQNNGRYRFGADWRPFTHQLASWKALLEKKHSVVVTSGTGSGKTECFMVPVLEDLYRELHENGNNPLVGVRALFLYPLNALINSQRERLDAWTRGFGTGIRYCLYNGNTENLHASVKSEQAKRPNEVLSREKMREEPAPILVTNGTMLEYMMVRQVDAPIIQQSKAQKSLRWIVLDEAHTYVGSQAAELALQLRRVMTAFGVTPDDVRFVATSATIAGSDAEKQLKKFLSELSGIPQERIDVLDGSRVIPELEPSKNVSVPLDEIEQIPDLDLRDKNDNKIKGISPERFYALTHSPEARYIREMLVKQPNPMKLDEITERLHVLTKQHYSQQEVLRWIDVCSGTQPNAKDPAFLKVRAHIFQRNTQGIWACVDKDCRLKHGTPLDKGWPFGYVYVNQRQNCDCGSPVYEVAFCNDCNEPHLLARDKKGKLVQWENKGGDEFSLQDEVPVEHDATEEKVEKENSFQPPLIIAAGETSEAGYTLQRLDRQTRRIGVINNDSIPLIINDIEQVCSASGCGYRGMSGKQPFRRALLGGPFYVTNIVPTVLEYCQDFTSDEGKEGVGPDSLPGRGRRLITFTDSRQGTARMAVRMQQEAERSRLRGSVVEILSWHQRTQTSTAPNANADLEKLAARAKQAREQAEEYRSWGMPDQAKLSQAQAEQLEQAYQAATGGKAATILVSRTWTEMVNELKERADIRGPVLQYNHYLKPEVFNENGGPLKLSEMLLFREFMRRPKRTNSLETQGLVQVGYQGLEKIHKSPLHWQEKGLTLDDWRDFLKVTLDHYVRESNFTQLDDELKNWIGSRFSSKFVRNPESKDPEDNQNRRWPQIRNGNVSHRLAKLLMLGAGFKTVNAATIDIINTWLKEAWAQLTGPLAVLKPDGNRFYLPKEHMTFSLITDAWICPVTNKILDTAFKGLTPYLPTHISFEHLTLAQYDTFVAQKVTMPEIWKLDRSQEDYAEGLAKARDWVSHDPLIAQLRSENVWTDINDRVVEGGFYYRTAEHSAQQSSERLQSYEKMFKNGQLNVLNCSTTMEMGVDIGGITAVVMNNVPPHPANYLQRAGRAGRSKESRAISYTLCKGNPHDQQVFANPLWPFETMIPAPMVAMNSARLVQRHVNALLLSDFLCNVIGETDKEKTSLDSLWFFGEDDGQSKCERFKIWLERPVLDIDTALERLVKGTALHGARAEYLRDKTINAITFLQQAVALRLSRSRDTGA

SEQ ID NO: 25792 - protein, 1096 aa, Escherichia coli HVH 110 (4-6978754); identical to SEQ ID NO: 25332

SEQ ID NO: 25793 - protein, 2114 aa, Escherichia coli HVH 113 (4-7535473); identical to SEQ ID NO: 25257

SEQ ID NO: 25794 - protein, 1096 aa, Escherichia coli HVH 113 (4-7535473); identical to SEQ ID NO: 25332

SEQ ID NO: 25795 - protein, 2114 aa, Escherichia coli HVH 119 (4-6879578); identical to SEQ ID NO: 25257

SEQ ID NO: 25796 - protein, 1096 aa, Escherichia coli HVH 119 (4-6879578); identical to SEQ ID NO: 25332

SEQ ID NO: 25797 - protein, 2114 aa, Escherichia coli HVH 122 (4-6851606); identical to SEQ ID NO: 25257

SEQ ID NO: 25798 - protein, 1096 aa, Escherichia coli HVH 122 (4-6851606); identical to SEQ ID NO: 25332

SEQ ID NO: 25799 - protein, 2114 aa, Escherichia coli HVH 130 (4-7036876); identical to SEQ ID NO: 25257

SEQ ID NO: 25800 - protein, 1096 aa, Escherichia coli HVH 130 (4-7036876); identical to SEQ ID NO: 25332

SEQ ID NO: 25801 - protein, 2114 aa, Escherichia coli HVH 134 (4-6073441); identical to SEQ ID NO: 25257

SEQ ID NO: 25802 - protein, 1096 aa, Escherichia coli HVH 134 (4-6073441); identical to SEQ ID NO: 25332

SEQ ID NO: 25803 - protein, 2114 aa, Escherichia coli HVH 135 (4-4449320); identical to SEQ ID NO: 25257

SEQ ID NO: 25804 - protein, 1096 aa, Escherichia coli HVH 135 (4-4449320); identical to SEQ ID NO: 25332

SEQ ID NO: 25805 - protein, 2104 aa, Escherichia coli HVH 136 (4-5970458); identical to SEQ ID NO: 25345

SEQ ID NO: 25806 - protein, 1119 aa, Escherichia coli HVH 136 (4-5970458); identical to SEQ ID NO: 25418

SEQ ID NO: 25807 - protein, 2114 aa, Escherichia coli HVH 140 (4-5894387); identical to SEQ ID NO: 25257

SEQ ID NO: 25808 - protein, 1096 aa, Escherichia coli HVH 140 (4-5894387); identical to SEQ ID NO: 25332

SEQ ID NO: 25809 - protein, 2114 aa, Escherichia coli HVH 145 (4-5672112); identical to SEQ ID NO: 25257

SEQ ID NO: 25810 - protein, 1096 aa, Escherichia coli HVH 145 (4-5672112); identical to SEQ ID NO: 25332

SEQ ID NO: 25811 - protein, 2114 aa, Escherichia coli HVH 150 (4-3258106); identical to SEQ ID NO: 25217

SEQ ID NO: 25812 - protein, 1096 aa, Escherichia coli HVH 150 (4-3258106); identical to SEQ ID NO: 25218

SEQ ID NO: 25813 - protein, 2114 aa, Escherichia coli HVH 151 (4-5755573); identical to SEQ ID NO: 25257

SEQ ID NO: 25814 - protein, 1096 aa, Escherichia coli HVH 151 (4-5755573); identical to SEQ ID NO: 25332

SEQ ID NO: 25815 - protein, 2114 aa, Escherichia coli HVH 155 (4-4509048); identical to SEQ ID NO: 25257

SEQ ID NO: 25816 - protein, 1096 aa, Escherichia coli HVH 155 (4-4509048); identical to SEQ ID NO: 25332

SEQ ID NO: 25817 - protein, 2114 aa, Escherichia coli HVH 163 (4-4697553); identical to SEQ ID NO: 25257

SEQ ID NO: 25818 - protein, 1096 aa, Escherichia coli HVH 163 (4-4697553); identical to SEQ ID NO: 25332

SEQ ID NO: 25819 - protein, 2114 aa, Escherichia coli HVH 167 (4-6073565); identical to SEQ ID NO: 25257

SEQ ID NO: 25820 - protein, 1096 aa, Escherichia coli HVH 167 (4-6073565); identical to SEQ ID NO: 25332

SEQ ID NO: 25821 - protein, 2114 aa, Escherichia coli HVH 173 (3-9175482); identical to SEQ ID NO: 25257

SEQ ID NO: 25822 - protein, 1096 aa, Escherichia coli HVH 173 (3-9175482); identical to SEQ ID NO: 25332

SEQ ID NO: 25823 - protein, 2104 aa, Escherichia coli HVH 182 (4-0985554); identical to SEQ ID NO: 25345

SEQ ID NO: 25824 - protein, 1119 aa, Escherichia coli HVH 182 (4-0985554); identical to SEQ ID NO: 25418

SEQ ID NO: 25825 - protein, 2114 aa, Escherichia coli HVH 183 (4-3205932); identical to SEQ ID NO: 25257

SEQ ID NO: 25826 - protein, 1096 aa, Escherichia coli HVH 183 (4-3205932); identical to SEQ ID NO: 25332

SEQ ID NO: 25827 - protein, 2104 aa, Escherichia coli HVH 193 (4-3331423)
MDVQQLHYAPLLNQLHQRAVRSVVSQLALRSKSLTHYLESQYFQPPGQEGSLLADPVFESTFGWMPADETMEDLRDKLISSPLVDALSKAPVPFRHQLTAWRTILEDKKSLLVSSGTGSGKTECFMVPVLEDLIRQQKSTRQSLTGTQAIFLYPLNALINSQQERLREWTRGFKGKIRFALYNGETRHTKYEVQEDQLKVPEQALSREAIYEAPPSIMVTNTTMLEYMLIRRKDAPIIEKSQGMLKYIVLDEAHSYIGSQAAELALLLRRVMQAFNVGPGTDKPVQIIATSATIGEDSPEGNKELAKFVADLAGVTERDVKVVRGYRQIPQVSESLIRHEYPTSLTSLKSLSPQDLYQQLCHYRVAQQLRQALTHPGRQAVRLSELLNVARRTWPDINHRELLQLLDLMARSREGELAFTPLRMHGFIRTLAGLWACSNKQCSHKAHELNQSDWPFGQVWFEQRQYCDCGAPVFEVLRCSGCGSAYLSAKEEVRGDGTNWLVAQPAAAEVDEFALDVDVYSEDEDNDELDNNSQFDRLIAIDGEKYIISLEETTAGKIDSEAQKHYEINLLRPESRGEGRNNSFACVCCGDTQRKNNPLFRPLRLGAPFFLNEIIPTLLEFSPLPQTREEQLGPFNGRRLLTFTDSRQGTARISARLQQDADKATLRALCYQELANINEPSAKLSPAHCALLESFITQFSILPLKNSIDALKKAMVANEELSPADIQALKIIEPMVSSLSPDHAEAMQILQANSGNQQKKTMSWQTLSEQLVGSVDLADRMRGSFKELSGLDLTKQQFADFCLYSEFGRRPKNAWTLESLGLVAIHYPFIDKVTTCPQDWKTLLPDPDKQLAEWRNLLKITLDFFIRENSAVFYENEQYPRWMGARFPVKMLQGPDKKNKGQKRDQLWPQIRDRHYNRVIKLLIAVFPAIQPEQAHWKSLVNHLMIEVWDAIRPCLRQFESGYQLDIKQQAEFYSPKQVWRCPYTRRALDVTLLGYSPYLPGSKEIAPEKAVLIEMPELPVRHWRLSGGGEIAREERLEWLESNALIQHAREEGLWSTRCDRLALKDSWYRLEEHSAQRTPEQNQFNEKQFKSGKVNVLNCSTTMEMGVDIGGMSLVAMNNVPPAPANYLQRAGRAGRRGESASAAITLCKNTAHGMEVFKDPLWAFNTTASAPRVRFGSSSIVQRHVNALVLGLFLRAEVPDATKLSCKWFFEGDESQCLRFLHWLNNQADQLADKLKRLTQGTVLMSLTATQLLTRTQAMMQQVDIRWRSQLAILLENIEALKADNSAWEETPAGKAIAYQLRDYRGAYLFSKLISEAFLPGHGFPVGVVNFNYLTADELEKRRAIKATQADPNEGGESFSRRIEKLPSRDLPTALREYAPGADVVLGGKVYRSSGIMLGKVLASGQELSGDHHIPWFWHCRKCGAGATSTTRPVECSHCKADIQQLDVKRYLQPVGFATDIRYQAHNDVSMPAQLPWKDPRVLVPSSVWVSLPDAGLGRYRFSHSGELFHFSEGEFGHGYAICLSCGRAESQNQPQRTPENLKNPERENTHYLLRGGSNDRQGSNKLCHGHVHKDLWLGYSSRTDMVELQLNDDNGLLIRDEVAARSLAVALREGLAHKLGIENTELGVTTQQARDINGYTGYSIFIYDNNAGGAGYAVQLIDHWADVFNYARKLLDCSCDKFCHHCLLSYDSQHYVNRLDRHHALTLLTNVRLQRLNLAPEYQYFGDGSRVETNPLSLRIAQCLNSEIYDSCSLVLAGPQEQWDFAQWPLFKELLQFASSGGHVELLVATPLANLTDSSRHQLSALAAMPGGRLQVKSIATAQLMQGKGRWLAQVTREGQSQQWAADDSATVAPGELWGQSASSPVVTLKGTSGKTFLGQILSAEDLLPALPTGAVRINLCEQLDGPLEGFGSRFWSLVTQQHAGWKQAFTRHKEITHVEYSDRYLNSPFTARLLGEILTELVGQGMAERASLTVCVKKLDYNSRQHDALYNAWLNEEDRQQVVTTLLEEGYLGPAWPGAISWLTGDNQSTEHGRELTVTFSDGSQHYVLLDMGLSYWRCIEDTFFDFALRVPQQVERLANTRARAVAPGNDLRSYIIAG

SEQ ID NO: 25828 - protein, 1119 aa, Escherichia coli HVH 193 (4-3331423)
MLVKTPVNPLLQWLNMFFSRRSLSGADGRALYAYRCTDTEYESLAELLRTYAPRSYPRTIFISYSDVLFSIYAAEFIRRTHTVGHPKWDTILDSIDWKVPYVHRQKLVNDGIRYWKRKIRNLGQASGYLHTLACEGGLPIRMIENESGYLITYFRRIYQALRGQASQYPAAKIAQELGDTIPVTMQNELVYEIAGEFCETLCRLLSEHPPQSSDPVSALRKLSPDWHLQLPLVLPEANAAEIVRRLLSQSSEIRSASSLQVERIWVDVDDSWYCDARFRFPATMRTEQLTSLFECNIQPEQTRLIISGKWRNGGARLAMLSRYEQQDWRVELLPIAMQKLSGADAMAEISLSLHEGPILLGHTIPKGGYELTEELPWVFEAMNESESQLKLVGMGSVSSRLNALFISLPKNSHLDISGEGEFDIPRLLKNSERSLTKISGVFSVVLHDGAVCTIRTQQLYDSAIEYYIKSTEVELVKSDYPVHRAWPKIGWKKDLQYGIVPEKELFWRSIRSGNNAWYSVASEMPKGQIEVRRIVNDEVLFSGKVVVLPADFDINIIPESAQQGIIMLSGITDTRIDKYSNNEKVTLKSDYSQNECAIYYNSSEMLENTVDLRVSWKDGSNLKLLLPKPVSGGRFVTHDGSVHFDGVASIAHLHGIDAELLTISCAGRGYLNIELLDENPVAEKFRYLHADLPLLSGCNDKLKKISLYENYNLLNAMLACAWNSNSTLCVDFYSDRFGKDKATLSIKRYDGSFIEHDQGLLVDIKNSVVFPANRIDELVVDAISLKDPGLHISLLKKDEFAYDLSALNVQDSPWLIVGKLDGTARIAPVIKWGLPVLQTNDLLLNALCEADSEQRKKYFNELIFEIDNNPLQNYCCLLTEYIKKYKMNNGLSLLDLDLFRGISSNYRVVVQLLISSCLSGDSDTIYDIQEELPFSWGWIPVSIWKDVFQKCWAYLEKQINDKTLALHILQPFIAFMNHRAHIDRRLAPIANMLLTYSELLPVGCNVLPTVSREQFNEAKQMLLRNPDSFGRISIFPKELWSSAITPELKSVFNKLWIKNKYHSRLEKRFNLMLVAALLTQKDNNLIHQLSALFEFHYQQAPQQLGVIYQYYFEQAGVCH

SEQ ID NO: 25829 - protein, 2114 aa, Escherichia coli HVH 197 (4-4466217)
MTTRYFSSLIEQSLSRSTEATLSIMGVTNPQLREHLAQQMGADCGKPGSFLASPVFQQMFGWKESNHTMRSLTEGNALLSKAVVDSLDDQNNGRYRFGADWRPFTHQLASWKALLEKKHSVVVTSGTGSGKTECFMVPVLEDLYRELHENGNNPLVGVRALFLYPLNALINSQRERLDAWTRGFGTGIRYCLYNGNTENLHASVKSEQAKRPNEVLSREKMREEPAPILVTNGTMLEYMMVRQVDAPIIQQSKAQKSLRWIVLDEAHTYVGSQAAELALQLRRVMTAFGVTPDDVRFVATSATIAGSDAEKQLKKFLSELSGIPQERIDVLDGSRVIPELEPSKNVSVPLDEIEQIPDLDLRDKNDNKIKGISPERFYALTHSPEARYIREMLVKQPNPMKLDEITERLHVLTKQHYSQQEVLRWIDVCSGTQPNAKDPAFLKVRAHIFQRNTQGIWACVDKDCRLKHGTPLDKGWPFGYVYVNQRQNCDCGSPVYEVAFCNDCNEPHLLARDKKGKLVQWENKGGDEFSLQDEVPVEHDATEEKVEKENSFQPPLIIAAGETSEAGYTLQRLDRQTRRIGVINNDSIPLIINDIEQVCSASGCGYRGMSGKQPFRRALLGGPFYVTNIVPTVLEYCQDFTSDEGKEGVGPDSLPGRGRRLITFTDSRQGTARMAVRMQQEAERSRLRGSVVEILSWHQRTQTSTAPNANADLEKLAARAKQAREQAEEYRSWGMPDQAKLSQAQAEQLEQAYQAATGGKAATILVSRTWTEMVNELKERADIRGPVLQYNHYLKPEVFNENGSPLKLSEMLLFREFMRRPKRTNSLETQGLVQVGYQGLEKIHKSPLHWQEKGLTLDDWRDFLKVTLDHYVRESNFTQLDDELKNWIGSRFSSKFVRNPESKDPEDNQNRRWPQIRNGNVSHRLAKLLMLGAGFKTVNAATIDIINTWLKEAWAQLTGPLAVLKPDGNRFYLPKEHMTFSLITDAWICPVTNKILDTAFKGLTPYLPTHISFEHLTLAQYDTFVAQKVTMPEIWKLDRSQEDYAEGLAKARDWVSHDPLIAQLRSENVWTDINDRVVESGFYYRTAEHSAQQSSERLQSYEKMFKNGQLNVLNCSTTMKMGVDIGGITAVVMNNVPPHPANYLQRAGRAGRSKESRAISYTLCKGNPHDQQVFANPLWPFETMIPAPMVAMNSARLVQRHVNALLLSDFLCNVIGETDKEKTSLDSLWFFGEDDGQSKCERFKIWLERPVLDIDTALERLVKGTALHGARAEYLRDKTINAITFLQQRWLSVYRDLVTQERESQPQTPYRKRIELEKKRHCGEYLLRDLAARTFLPGYGFPTDVVTFDNFTMEDYIREKSQKSRDKKDREDNVSRYKGLPSRNLGVAIREYAPGAEIILDGRVFRSAGVSLHWHNINADTNEAQRLDCAWRCHKCGTIGYEEGMSSSGMLFCSNSACGEKIIMDNRRQVLQPAGFVTDAHAPVTNNIETMKFVPVVPAWVFVKAEPVPLPNPLMGYMASGADGHVFQQSLGEGGHGYALCLSCGRAESMLNENDAPKSMEAHYPPRPGKADRDSQNHRLICPGSTALMKNVTLGALARTDVFEMVLRKPQNGEYLPDNTEEGRIVAMTLAVALRQALAGVLGISAAELGYSVRPVRLEDGQSVLAVQLYDVISGGAGFASSAPVHIEAILQGMVKQLGCRHCETACSECLLDSQTRHDHDLLDRKAALAWLGDDFTYYIGLPDEETFSLPDARYCPGAIGDTIRRAINEGAEKLTLWMTGAPNEWDLYARQFRAAVQNYRLKDNVEVDLVIPTGVDDPDLLHELSQFTALGVRLCHVEQDLQLPIVAQVTFTDRVMTLASRSQQATIPGPEWHLNDELVVRSLGYKTVELNEFILPAKATNAVERVKDIQIHKQLNGPLSQFGQRFWDVLFNDHEEAQSLMNNTRITGVHYTDRYLQNPVALALLGSILRPLKTKLTDGAEVTLDTLFKDKDRPGNRPFHDWMSIADFQDFADQWFAAALGRPVELTVFDSPRDIPHHRKLTVTFEDGQVLKIRFDQGMGYWRINFSSQWHYFDFRDDVSFQLVKMAQACKEGNVANSEESWATDVLVEVIAS

SEQ ID NO: 25830 - protein, 1096 aa, Escherichia coli HVH 197 (4-4466217); identical to SEQ ID NO: 25332

SEQ ID NO: 25831 - protein, 2114 aa, Escherichia coli HVH 206 (4-3128229); identical to SEQ ID NO: 25257

SEQ ID NO: 25832 - protein, 847 aa, Escherichia coli HVH 206 (4-3128229)
MNGLLCAASVEAKPRLQKNKSTRCQFYWSEKHPDELRVIVSLPDEVSFPVTSEPSTTRFELAICEDGEEVSGLGPAYASLENRQATVRLRKSEVRFGRQNPSAGLSLVARAGGMIVGSIKLDDSEIAIGEVPLTFIVDADQWLLQGQASCSVRSSDVLIVLPRDNSNVAGFDGQSRAVNVLGLKALPVKGCQDVTVTANETYRIRTGREQISIGRFALNGKRASWVCHPDETFIGVPKVISTLPDIQSIDVTRYLSGISIEQCHIQEMLGAQYLSIRNSKNETLLRRKIGILPADFSIEIKGGIHANEGTIVITTQHPCVAKLKDKTLEATRKRTEGRTEIQLKAEGVPPAFITLQVLPNLAADPIDIELPFPAKGCLALDVNGRPLDKNITLHDLLGSRAFLFSRNGEPTRYTLQLHLRSVSGLQAWHEWCYTALSDRPVELNLYSLREHIENLISLEAGIDQVVEMRITGAGVVMAWQIRRYKYSLRYDYEKELLLSQSVNHRAGQIPSPVIMLLSEPERKSIPLASRMSEGVPVGEYELSSIVNKNGPWLVVPKPGEEMAFRPCFIRGESSLPVEESNIRSLQKATQLFNPQAEVNTITLVLGQMANDPAHSGWQFMRSLYDQFGYLPLATFEVWRALVQHPQALAMSLFKFEMSAEYLSRIENEFPILWEFFPIFEIKAASERFKLFLSQKGAPEETQKLLVTNMFQRLGLVFPTYADEIEKWLSNGHLPPSIPESFVHVWYQELLREHSEAQWPEYGSKRLHSWMASQKNPVIGINPDANHRYSVALLPVFAAAVASGNASFESVFDRKPGAVFFLRQVRDFDSRWFKAIFQCSLLRYVAKK

SEQ ID NO: 25833 - protein, 2114 aa, Escherichia coli HVH 208 (4-3112292); identical to SEQ ID NO: 25257

SEQ ID NO: 25834 - protein, 1096 aa, Escherichia coli HVH 208 (4-3112292); identical to SEQ ID NO: 25332

SEQ ID NO: 25835 - protein, 2114 aa, Escherichia coli HVH 215 (4-3008371); identical to SEQ ID NO: 25257

SEQ ID NO: 25836 - protein, 1096 aa, Escherichia coli HVH 215 (4-3008371); identical to SEQ ID NO: 25332

SEQ ID NO: 25837 - protein, 2114 aa, Escherichia coli HVH 22 (4-2258986); identical to SEQ ID NO: 25257

SEQ ID NO: 25838 - protein, 1096 aa, Escherichia coli HVH 22 (4-2258986); identical to SEQ ID NO: 25332

SEQ ID NO: 25839 - protein, 2114 aa, Escherichia coli HVH 223 (4-2976528); identical to SEQ ID NO: 25257

SEQ ID NO: 25840 - protein, 516 aa, Escherichia coli HVH 223 (4-2976528)
MITGVWKYRGKSKAEGVPPAFITLQVLPNLAADPIDIELPFPAKGCLALDVNGRPLDKNITLHDLLGSRAFLFSRNGEPTRYTLQLHLRSVSGLQAWHEWCYTALSDRPVELNLYSLREHIENLISLEAGIDQVVEMRITGAGVVMAWQIRRYKYSLRYDYEKELLLSQSVNHRAGQIPSPVIMLLSEPERKSIPLASRMSEGVPVGEYELSSIVNKNGPWLVVPKPGEEMAFRPCFIRGESSLPVEESNIRSLQKATQLFNPQAEVNTITLVLGQMANDPAHSGWQFMRSLYDQFGYLPLATFEVWRALVQHPQALAMSLFKFEMSAEYLSRIENEFPILWEFFPIFEIKAASERFKLFLSQKGAPEETQKLLVTNMFQRLGLVFPTYADEIEKWLSNGHLPPSIPESFVHVWYQELLREHSEAQWPEYGSKRLHSWMASQKNPVIGINPDANHRYSVALLPVFAAAVASGNASFESVFDRKPGAVFFLRQVRDFDSRWFKAIFQCSLLRYVAKK

SEQ ID NO: 25841 - protein, 2114 aa, Escherichia coli HVH 29 (4-3418073); identical to SEQ ID NO: 25257

SEQ ID NO: 25842 - protein, 1096 aa, Escherichia coli HVH 29 (4-3418073); identical to SEQ ID NO: 25332

SEQ ID NO: 25843 - protein, 2104 aa, Escherichia coli HVH 43 (4-2173468); identical to SEQ ID NO: 25345

SEQ ID NO: 25844 - protein, 1119 aa, Escherichia coli HVH 43 (4-2173468); identical to SEQ ID NO: 25418

SEQ ID NO: 25845 - protein, 2104 aa, Escherichia coli HVH 44 (4-2298570); identical to SEQ ID NO: 25345

SEQ ID NO: 25846 - protein, 1119 aa, Escherichia coli HVH 44 (4-2298570); identical to SEQ ID NO: 25418

SEQ ID NO: 25847 - protein, 2114 aa, Escherichia coli HVH 45 (4-3129918); identical to SEQ ID NO: 25257

SEQ ID NO: 25848 - protein, 1096 aa, Escherichia coli HVH 45 (4-3129918); identical to SEQ ID NO: 25332

SEQ ID NO: 25849 - protein, 2114 aa, Escherichia coli HVH 63 (4-2542528); identical to SEQ ID NO: 25257

SEQ ID NO: 25850 - protein, 1096 aa, Escherichia coli HVH 63 (4-2542528); identical to SEQ ID NO: 25332

SEQ ID NO: 25851 - protein, 2114 aa, Escherichia coli HVH 69 (4-2837072); identical to SEQ ID NO: 25257

SEQ ID NO: 25852 - protein, 1096 aa, Escherichia coli HVH 69 (4-2837072); identical to SEQ ID NO: 25332

SEQ ID NO: 25853 - protein, 2114 aa, Escherichia coli HVH 85 (4-0792144)
MTTRYFSSLIEQSLSRSTEATLSIMGVTNPQLREHLAQQMGADCGKPGSFLASPVFQQMFGWKESNHTMRSLTEGNALLSKAVVDSLDDQNNGRYRFGADWRPFTHQLASWKALLEKKHSVVVTSGTGSGKTECFMVPVLEDLYRELHENGNNPLVGVRALFLYPLNALINSQRERLDAWTRGFGTGIRYCLYNGNTENLHASVKSEQAKRPNEVLSREKMREEPAPILVTNGTMLEYMMVRQVDAPIIQQSKAQKSLRWIVLDEAHTYVGSQAAELALQLRRVMTAFGMTPDDVRFVATSATIAGSDAEKQLKKFLSELSGIPQERIDVLDGSRVIPELEPSKNVSVPLDEIEQIPDLDLRDKNDNKIKGISPERFYALTHSPEARYIREMLVKQPNPMKLDEITERLHVLTKQHYSQQEVLRWIDVCSGTQPNAKDPAFLKVRAHIFQRNTQGIWACVDKDCRLKHGTPLDKGWPFGYVYVNQRQNCDCGSPVYEVAFCNDCNEPHLLARDKKGKLVQWENKGGDEFSLQDEVPVEHDATEEKVEKENSFQPPLIIAAGETSEAGYTLQRLDRQTRRIGVINNDSIPLIINDIEQVCSASGCGYRGMSGKQPFRRALLGGPFYVTNIVPTVLEYCQDFTSDEGKEGVGPDSLPGRGRRLITFTDSRQGTARMAVRMQQEAERSRLRGSVVEILSWHQRTQTSTAPNANADLEKLAARAKQAREQAEEYRSWGMPDQAKLSQAQAEQLEQAYQAATGGKAATILVSRTWTEMVNELKERADIRGPVLQYNHYLKPEVFNENGGPLKLSEMLLFREFMRRPKRTNSLETQGLVQVGYQGLEKIHKSPLHWQEKGLTLDDWRDFLKVTLDHYVRESNFTQLDDELKNWIGSRFSSKFVRNPESKDPEDNQNRRWPQIRNGNVSHRLAKLLMLGAGFKTVNAATIDIINTWLKEAWAQLTGPLAVLKPDGNRFYLPKEHMTFSLITDAWICPVTNKILDTAFKGLTPYLPTHISFEHLTLAQYDTFVAQKVTMPEIWKLDRSQEDYAEGLAKARDWVSHDPLIAQLRSENVWTDINDRVVEGGFYYRTAEHSAQQSSERLQSYEKMFKNGQLNVLNCSTTMEMGVDIGGITAVVMNNVPPHPANYLQRAGRAGRSKESRAISYTLCKGNPHDQQVFANPLWPFETMIPAPMVAMNSARLVQRHVNALLLSDFLCNVIGETDKEKTSLDSLWFFGEDDGQSKCERFKIWLERPVLDIDTALERLVKGTALHGARAEYLRDKTINAITFLQQRWLSVYRDLVTQERESQPQTPYRKRIELEKKRHCGEYLLRDLAARTFLPGYGFPTDVVTFDNFTMEDYIREKSQKSRDKKDREDNVSRYKGLPSRNLGVAIREYAPGAEIILDGRVFRSAGVSLHWHNINADTNEAQRLDCAWRCHKCGTIGYEEGMSSSGMLFCSNSACGEKIIMDNRRQVLQPAGFVTDAHAPVTNNIETMKFVPVVPAWVFVKAEPVPLPNPLMGYMASGADGHVFQQSLGEGGHGYALCLSCGRAESMLNENDAPKSMEAHYPPRPGKADRDSQNHRLICPGSTALMKNVTLGALARTDVFEMVLRKPQNGEYLPDNTEEGRIVAMTLAVALRQALAGVLGISAAELGYSVRPVRLEDGQSVLAVQLYDVISGGAGFASSAPVHIEAILQGMVKQLGCRHCETACSECLLDSQTRHDHDLLDRKAALAWLGDDFTYYIGLPDEETFSLPDARYCPGAIGDTIRRAINEGAEKLTLWMTGAPNEWDLYARQFRAAVQNYRLKDNVEVDLVIPTGVDDPDLLHELSQFTALGVRLCHVEQDLQLPIVAQVTFTDRVMTLASRSQQATIPGPEWHLNDELVVRSLGYKTVELNEFILPAKATNAVERVKDIQIHKQLNGPLSQFGQRFWDVLFNDHEEAQSLMNNTRITGVHYTDRYLQNPVALALLGSILRPLKTKLTDGAEVTLDTLFKDKDRPGNRPFHDWMSIADFQDFADQWFAAALGRPVELTVFDSPRDIPHHRKLTVTFEDGQVLKIRFDQGMGYWRINFSSQWHYFDFRDDVSFQLVKMAQACKEGNVANSEESWATDVLVEVIAS

SEQ ID NO: 25854 - protein, 1096 aa, Escherichia coli HVH 85 (4-0792144)
MGQSEYISWVKCTSWLSNFVNLRGLRQPDGRPLYEYHATNDEYTQLTQLLRAVGQSQSNICNRDFAACFVLFCSEWYRRDYERQCGWTWDPIYKKIGISFTATELGTIVPKGMEDYWLRPIRFYESERRNFLGTLFSEGGLPFRLLKESDSRFLAVFSRILGQYEQAKQSGFSALSLARAVIEKSALPTVFSEDTSVELISHMADNLNSLVLTHNLINHKEPVQQLEKVHPTWRSEFPIPLDDETGTHFLNGLLCAASVEAKPRLQKNKSTRCQFYWSEKHPDELRVIVSLPDEVSFPVTSEPSTTRFELAICEDGEEVSGLGPAYASLENRQATVRLRKSEVRFGRQNPSAGLSLVARAGGMIVGSIKLDDSEIAIGEVPLTFIVDADQWLLQGQASCSVRSSDVLIVLPRDNSNVAGFDGQSRAVNVLGLKALPVKGCQDVTVTANETYRIRTGREQISIGRFALNGKRASWVCHPDETFIGVPKVISTLPDIQSIDVTRYLSGISIEQCHIQEMLGAQYLSIRNSKNETLLRRKIGILPADFSIEIKGGIHANEGTIVITTQHPCVAKLKDKTLEATRKRTEGRTEIQLKAEGVPPAFITLQVLPNLAADPIDIELPFPAKGCLALDVNGRPLDKNITLHDLLGSRAFLFSRNGEPTRYTLQLHLRSVSGLQAWHEWCYTALSDRPVELNLYSLREHIENLISLEAGIDQVVEMRITGAGVVMAWQIRRYKYSLRYDYEKELLLSQSVNHRAGQIPSPVIMLLSEPERKSIPLASRVSEGVPVGEYELSSIVNKNGPWLVVPKPGEEMAFRPCFIRGESSLPVEESNIRSLQKATQLFNPQAEVNTITLVLGQMANDPAHSGWQFMRSLYDQFGYLPLATFEVWRALVQHPQALAMSLFKFEMSAEYLSRIENEFPILWEFFPIFEIKAASERFKLFLSQKGAPEETQKLLVTNMFQRLGLVFPTYADEIEKWLSNGHLPPSIPESFVHVWYQELLREHSEAQWPEYGSKRLHSWMASQKNPVIGINPDANHRYSVALLPVFAAAVASGNASFESVFDRKPGAVFFLRQVRDFDSRWFKAIFQCSLLRYVAKK

SEQ ID NO: 25855 - protein, 2114 aa, Escherichia coli KOEGE 33 (68a); identical to SEQ ID NO: 25371

SEQ ID NO: 25856 - protein, 1096 aa, Escherichia coli KOEGE 33 (68a); identical to SEQ ID NO: 25372

SEQ ID NO: 25857 - protein, 2114 aa, Escherichia coli KOEGE 62 (175a); identical to SEQ ID NO: 25257

SEQ ID NO: 25858 - protein, 1096 aa, Escherichia coli KOEGE 62 (175a)
MGQSEYISWVKCTSWLSNFVNLRGLRQPDGRPLYEYHATNDEYTQLTQLLRAVGQSQSNICNRDFAACFVLFCSEWYRRDYERQCGWTWDPIYKKIGISFTATELGTIVPKGMEDYWLRPIRFYESERRNFLGTLFSEGGLPFRLLKESDSRFLAVFSRSLGQYEQAKQSGFSALSLARAVIEKSALPTVFSEDTSVELISHMADNLNSLVLTHNLINHKEPVQQLEKVHPTWRSEFPIPLDDETGTHFLNGLLCAASVEAKPRLQKNKSTRCQFYWSEKHPDELRVIVSLPDEVSFPVTSEPSTTRFELAICEDGEEVSGLGPAYASLENRQATVRLRKSEVRFGRQNPSAGLSLVARAGGMIVGSIKLDDSEIAIGEVPLTFIVDADQWLLQGQASCSVRSSDVLIVLPRDNSNVAGFDGQSRAVNVLGLKALPVKGCQDVTVTANETYRIRTGREQISIGRFALNGKRASWVCHPDETFIGVPKVISTLPDIQSIDVTRYLSGISIEQCHIQEMLGAQYLSIRNSKNETLLRRKIGILPADFSIEIKGGIHANEGTIVITTQHPCVAKLKDKTLEATRKRTEGRTEIQLKAEGVPPAFITLQVLPNLAADPIDIELPFPAKGCLALDVNGRPLDKNITLHDLLGSRAFLFSRNGEPTRYTLQLHLRSVSGLQAWHEWCYTALSDRPVELNLYSLREHIENLISLEAGIDQVVEMRITGAGVVMAWQIRRYKYSLRYDYEKELLLSQSVNHRAGQIPSPVIMLLSEPERKSIPLASRMSEGVPVGEYELSSIVNKNGPWLVVPKPGEEMAFRPCFIRGESSLPVEESNIRSLQKATQLFNPQAEVNTITLVLGQMANDPAHSGWQFMRSLYDQFGYLPLATFEVWRALVQHPQALAMSLFKFEMSAEYLSRIENEFPILWEFFPIFEIKAASERFKLFLSQKGAPEETQKLLVTNMFQRLGLVFPTYADEIEKWLSNGHLPPSIPESFVHVWYQELLREHSEAQWPEYGSKRLHSWMASQKNPVIGINPDANHRYSVALLPVFAAAVASGNASFESVFDRKPGAVFFLRQVRDFDSRWFKAIFQCSLLRYVAKK

SEQ ID NO: 25859 - protein, 2114 aa, Escherichia coli KOEGE 68 (182a); identical to SEQ ID NO: 25853

SEQ ID NO: 25860 - protein, 1096 aa, Escherichia coli KOEGE 68 (182a); identical to SEQ ID NO: 25854

SEQ ID NO: 25861 - protein, 2114 aa, Escherichia coli KOEGE 73 (195a); identical to SEQ ID NO: 25257

SEQ ID NO: 25862 - protein, 1096 aa, Escherichia coli KOEGE 73 (195a); identical to SEQ ID NO: 25332

SEQ ID NO: 25863 - protein, 2114 aa, Escherichia coli KTE1; identical to SEQ ID NO: 25257

SEQ ID NO: 25864 - protein, 1096 aa, Escherichia coli KTE1; identical to SEQ ID NO: 25332

SEQ ID NO: 25865 - protein, 2114 aa, Escherichia coli KTE102; identical to SEQ ID NO: 25257

SEQ ID NO: 25866 - protein, 660 aa, Escherichia coli KTE102
MKGCQDVTVTANETYRIRTGREQISIGRFALNGKRASWVCHPDETFIGVPKVISTLPDIQSIDVTRYLSGISIEQCHIQEMLGAQYLSIRNSKNETLLRRKIGILPADFSIEIKGGIHANEGTIVITTQHPCVAKLKDKTLEATRKRTEGRTEIQLKAEGVPPAFITLQVLPNLAADPIDIELPFPAKGCLALDVNGRPLDKNITLHDLLGSRAFLFSRNGEPTRYTLQLHLRSVSGLQAWHEWCYTALSDRPVELNLYSLREHIENLISLEAGIDQVVEMRITGAGVVMAWQIRRYKYSLRYDYEKELLLSQSVNHRAGQIPSPVIMLLSEPERKSIPLASRMSEGVPVGEYELSSIVNKNGPWLVVPKPGEEMAFRPCFIRGESSLPVEESNIRSLQKATQLFNPQAEVNTITLVLGQMANDPAHSGWQFMRSLYDQFGYLPLATFEVWRALVQHPQALAMSLFKFEMSAEYLSRIENEFPILWEFFPIFEIKAASERFKLFLSQKGAPEETQKLLVTNMFQRLGLVFPTYADEIEKWLSNGHLPPSIPESFVHVWYQELLREHSEAQWPEYGSKRLHSWMASQKNPVIGINPDANHRYSVALLPVFAAAVASGNASFESVFDRKPGAVFFLRQVRDFDSRWFKAIFQCSLLRYVAKK

SEQ ID NO: 25867 - protein, 2114 aa, Escherichia coli KTE116; identical to SEQ ID NO: 25257

SEQ ID NO: 25868 - protein, 1096 aa, Escherichia coli KTE116; identical to SEQ ID NO: 25332

SEQ ID NO: 25869 - protein, 2114 aa, Escherichia coli KTE122; identical to SEQ ID NO: 25257

SEQ ID NO: 25870 - protein, 1096 aa, Escherichia coli KTE122; identical to SEQ ID NO: 25332

SEQ ID NO: 25871 - protein, 2104 aa, Escherichia coli KTE125; identical to SEQ ID NO: 25345

SEQ ID NO: 25872 - protein, 1119 aa, Escherichia coli KTE125; identical to SEQ ID NO: 25418

SEQ ID NO: 25873 - protein, 2114 aa, Escherichia coli KTE127; identical to SEQ ID NO: 25257

SEQ ID NO: 25874 - protein, 1096 aa, Escherichia coli KTE127; identical to SEQ ID NO: 25332

SEQ ID NO: 25875 - protein, 2114 aa, Escherichia coli KTE128; identical to SEQ ID NO: 25257

SEQ ID NO: 25876 - protein, 1096 aa, Escherichia coli KTE128; identical to SEQ ID NO: 25332

SEQ ID NO: 25877 - protein, 2114 aa, Escherichia coli KTE130; identical to SEQ ID NO: 25217

SEQ ID NO: 25878 - protein, 362 aa, Escherichia coli KTE130
GKTSIFSHPVYLFLRKFSLQDSRGGSPVIMLLSEPERKSIPLASRMSEGVPVGEYELSSIVNKNGPWLVVPKPGEEMAFRPCFIRGESSLPVEESNIRSLQKATQLFNPQAEVNTITRVLGQMANDPAHSGWQFMRSLYDQFGYLPLATFEVWRALVQHPQALAMSLFKFEMSAEYLSRIENEFPILWEFFPIFEIKAASERFKLFLSQKGAPEETQKLLVTNMFQRLGLVFPTYADEIEKWLSNGYLPPSIPESCVHGWYQELLREHSEARWPEYGCKRLYKWMMSQKNPVIGINPDANHRYSVAWLPVFAAAVASGNASFESVFDRKPGAVFFLRQVRDFDSRWFKAIFQFSLLRYVAKK

SEQ ID NO: 25879 - protein, 2114 aa, Escherichia coli KTE132; identical to SEQ ID NO: 25217

SEQ ID NO: 25880 - protein, 362 aa, Escherichia coli KTE132; identical to SEQ ID NO: 25878

SEQ ID NO: 25881 - protein, 2114 aa, Escherichia coli KTE134; identical to SEQ ID NO: 25257

SEQ ID NO: 25882 - protein, 1096 aa, Escherichia coli KTE134; identical to SEQ ID NO: 25332

SEQ ID NO: 25883 - protein, 2114 aa, Escherichia coli KTE154; identical to SEQ ID NO: 25217

SEQ ID NO: 25884 - protein, 717 aa, Escherichia coli KTE154
MPLTFIVDADQWLLQGQASCSVRSSDVLIVLPRDNSTVAGFDGQSSAVNVLGLKALPVKGCQDVTVTANETYRIRTGREQISIGRFALNGKRASWVCHPDETFIGVPKVISTLPDIQSIDVTRYLSGISIEQCHIQEMLGAQYLSIRNSNNETLLRRKIGILPADFSIEIKGGMHANEGTIVITTQHPCVATLKDKTLEATRKRTEGRTEIQLKAEGVPPAFITLQVLPNLAADTIDIELPFPAKGCLALDVNGRPLDKNITLHDLLGSRAFLFSRNGEPTKYTLQLHLRSISGLQAWHEWSYTALSERPVELNLYSLREHIENLISLEAGIDQVVEMRITGAGVVMAWQIRRYKYSLRYDYEKELLLSQSVNHRAGQIPSPVIMLLSEPERKSIPLASRMSEGVPVGEYELSSIVNKNGPWLVVPKPGEEMAFRPCFIRGESSLPVEESNIRSLQKATQLFNPQAEVNTITRVLGQMANDPAHSGWQFMRSLYDQFGYLPLATFEVWRALVQHPQALAMSLFKFEMSAEYLSRIENEFPILWEFFPIFEIKAASERFKLFLSQKGAPEETQKLLVTNMFQRLGLVFPTYADEIEKWLSNGYLPPSIPESCVHGWYQELLREHSEARWPEYGCKRLYKWMMSQKNPVIGINPDANHRYSVAWLPVFAAAVASGNASFESVFDRKPGAVFFLRQVRDFDSRWFKAIFQFSLLRYVAKK

SEQ ID NO: 25885 - protein, 2114 aa, Escherichia coli KTE158; identical to SEQ ID NO: 25853

SEQ ID NO: 25886 - protein, 1096 aa, Escherichia coli KTE158; identical to SEQ ID NO: 25854

SEQ ID NO: 25887 - protein, 2104 aa, Escherichia coli KTE161
MDVQQLHYAPLLNQLHQRAVRSVVSQLALRSKSLTHYLESQYFQPPGQEGSLLADPVFESTFGWMPADETMEDLRDKLISSPLVDALSKAPVPFRHQLTAWRTILEDKKSLLVSSGTGSGKTECFMVPVLEDLIRQQKSTRQSLTGTQAIFLYPLNALINSQQERLREWTRGFKGKIRFALYNGETRHTKYEVQEDQLKVPEQALSREAIYEAPPSIMVTNTTMLEYMLIRRKDAPIIEKSQGILKYIVLDEAHSYIGSQAAELALLLRRVMQAFNVGPGTDKPVQIIATSATIGEDSPEGNKELAKFVADLAGVTERDVKVVRGYRQIPRVSESLIRHEYPTSLTSLKSLSPQDLYQQLCHYRVAQQLRQALTHPGRQAVRLSELLNVARRTWPDINHRELLQLLDLMARSREGELAFTPLRMHGFIRTLAGLWACSNKQCLHKAHELNQSDWPFGQVWFEQRQYCDCGAPVFEVLRCSGCGSAYLSAKEEVRGDGTNWLVAQPAAAEVDEFALDVDVYSEDEDNDELDNNSQFDRLIAIDGEKYIISLEETTAGKIDSEAQKHYEINLLRPESRGEGRNNSFACVCCGDTQRKNNPLFRPLRLGAPFFLNEIIPTLLEFSPLPQTREEQLGPFNGRRLLTFTDSRQGTARISARLQQDADKATLRALCYQELANINEPSAKLSPAHCALLESFITQFSILPLKNSIDALKKAMVANEELSPADIQALKIIEPMVSSLSPDHAEAMQILQANSGNQQKKTMSWQTLSEQLVGSVDLADRMRGSFKELSGLDLTKQQFADFCLYSEFGRRPKNAWTLESMGLVAIHYPFIDKVTTCPQDWKTLLPDPDKQLAEWRNLLKITLDFFIRENSAVFYENEQYPRWMGARFPVKMLQGPDKKNKGQKRDQLWPQIRDRHYNRVIKLLIAVFPAIQPEQAHWKSLVNHLMIEVWDAIRPCLRQFESGYQLDIKQQAEFYSPKQVWRCPYTRRALDVTLLGYSPYLPGSKEIAPEKAVLIEMPELPVRHWRLSGGGEIAREERLEWLESNALIQHAREEGLWSTRSDRLALKDSWYRLEEHSAQRTPEQNQFNEKQFKSGKVNVLNCSTTMEMGVDIGGMSLVAMNNVPPAPANYLQRAGRAGRRGESASAAITLCKNTAHGMEVFKDPLWAFNTTASAPRVRFGSSSIVQRHVNALVLGLFLRAEVPDATKLSCKWFFEGDESQCLRFLHWLNNQADQLADKLKRLTQGTVLMSLTATQLLTRTQAMMQQVDIRWRSQLAILLENIEALKADNSAWEETPAGKAIAYQLRDYRGAYLFSKLISEAFLPGHGFPVGVVNFNYLTADELEKRRAIKATQADPNEGGESFSRRIEKLPSRDLPTALREYAPGADVVLGGKVYRSSGIMLGKVLASGQELSGDHHIPWFWHCRKCGAGATSTTRPVECSHCKADIQQLDVKRYLQPVGFATDIRYQAHNDVSMPAQLPWKDPRVLVPSSVWVSLPDAGLGRYRFSHSGELFHFSEGEFGHGYAICLSCGRAESQNQPQRTPENLKNPERENTHYLLRGGSNDRLGSNKLCHGHVHKDLWLGYSSRTDMVELQLNDDNGLLIRDEVAARSLAVALREGLAHKLGIENTELGVTTQQARDINGYTGYSIFIYDNNAGGAGYAVQLIDHWADVFNYARKLLDCSCDKFCHHCLLSYDSQHYVNRLDRHHALTLLTNVRLQRLNLAPEYQYFGDGSRVETNPLSLRIAQCLNSEIYDPCSLVLAGPQEQWDFAQWPLFKELLQFASSGGNVELLVATPLANLTDSSRHQLSALAAMPGGRLQVKSIATAQLMQGKGRWLAQVTREGQSQQWAADDSATVAPGELWGQSASSPVVTLKGTSGKTFSGQTLSAEDLLPALPTGAVRINLCEQLDGPLEGFGSRFWSLVTQQHAGWKQAFTRHKEITHVEYSDRYLNSPFTARLLGEILTELVEQGMAERASLTVCVKKLDYNSRQHDALYNAWLNEEDRQQVVTTLLEEGYLGPAWPGAISWLTGDNQSTEHGRELTVTFSDGSQHYVLLDMGLSYWRCIEDTFFDFALRVPQQVERLANTRARAVASGNDLRSYVIAG

SEQ ID NO: 25888 - protein, 1119 aa, Escherichia coli KTE161; identical to SEQ ID NO: 25418

SEQ ID NO: 25889 - protein, 2114 aa, Escherichia coli KTE166; identical to SEQ ID NO: 25217

SEQ ID NO: 25890 - protein, 1096 aa, Escherichia coli KTE166
MGQSEYISWVKCTSWLSNFVNLRGLRQPDGRPLYEYHATNAEYNQLTQLLCAVGQSQSNICNRDFAACFVLFCSEWYRRDYERQCGWTWDPIYKKIGISFTATELGTIVPKGMEDHWLRPIRFYESERRNFLGTLFSEGGLPFRLLKESDSRFLAVFSRILGQYEQAKQSGFSALSLARAVIEKSALPTVFSEDTSVELISHMADNLNSLVLTHNLTNHKEPVQQLDKVHPTWRSEFPIPLDDETGTHFLNGLLCAASVEAKPRLQKNKSTRCQFYWSEKHPDELRVIVSLPDEVSFPVTSEPSTTRFELAIYEDGEEVSGLGPAYASLENRQATVRLRKSEVRFVRQNPSAGLSLVARAGGMIVGSIKLDDSEIAIGEVPLTFIVDADQWLLQGQASCSVRSSDVLIVLPRDNSTVAGFDGQSSAVNVLGLKALPVKGCQDVTVTANETYRIRTGREQISIGRFALNGKRASWVCHPDETFIGVPKVISTLPDIQSIDVTRYLSGISIEQCHIQEMLGAQYLSIRNSNNETLLRRKIGILPADFSIEIKGGMHANEGTIVITTQHPCVATLKDKTLEATRKRTEGRTEIQLKAEGVPPAFITLQVLPNLAADTIDIELPFPAKGCLALDVNGRPLDKNITLHDLLGSRAFLFSRNGEPTKYTLQLHLRSISGLQAWHEWSYTALSERPVELNLYSLREHIENLISLEAGIDQVVEMRITGAGVVMAWQIRRYKYSLRYDYEKELLLSQSVNHRAGQIPSPVIMLLSEPERKSIPLASRMSEGVPVGEYELSSIVNKNGPWLVVPKPGEEMAFRPCFIRGESSLPVEESNIRSLQKATQLFNPQAEVNTITRVLGQMANDPAHSGWQFMRSLYDQFGYLPLATFEVWRALVQHPQALAMSLFKFEMSAEYLSRIENEFPILWEFFPIFEIKAASERFKLFLSQKGAPEETQKLLVTNMFQRLGLVFPTYADEIEKWLSNGYLPPSIPESCVHGWYQELLREHSEARWPEYGCKRLYKWMMSQKNPVIGINPDANHRYSVAWLPVFAAAVASGNASFESVFDRKPGAVFFLRQVRDFDSRWFKAIFQFSLLRYVAKK

SEQ ID NO: 25891 - protein, 2114 aa, Escherichia coli KTE170
MTTRYFSSLIEQSLSRSTEATLSIMGVTNPQLREHLAQQMGADCGKPGSFLASPVFQQMFGWKESNHTMRSLTEGNALLSKAVVDSLDDQNNGRYRFGADWRPFTHQLASWKALLEKKHSVVVTSGTGSGKTECFMVPVLEDLYRELHENGNNPLVGVRALFLYPLNALINSQRERLDAWTRGFGTGIRYCLYNGNTENLHASVKSEQAKRPNEVLSREKMREEPAPILVTNGTMLEYMMVRQVDAPIIQQSKAQKSLRWIVLDEAHTYVGSQAAELALQLRRVMTAFGVTPDDVRFVATSATIAGSDAEKQLKKFLSELSGIPQERIDVLDGSRVIPELEPSKNVSVPLDEIEQIPDLDLRDKNDNKIKGISPERFYALTHSPEARYIREMLVKQPNPMKLDEITERLHVLTKQHYSQQEVLRWIDVCSGTQPNAKDPAFLKVRAHIFQRNTQGIWACVDKDCRLKHGTPLDKGWPFGYVYVNQRQNCDCGSPVYEVAFCNDCNEPHLLARDKKGKLVQWENKGGDEFSLQDEVPVEHDATEEKVEKENSFQPPLIIAAGETSEAGYTLQRLDRQTRRIGVINNDSIPLIINDIEQVCSASGCGYRGMSGKQPFRRALLGGPFYVTNIVPTVLEYCQDFTSDEGKEGVGPDSLPGRGRRLITFTDSRQGTARMAVRMQQEAERSRLRGSVVEILSWHQRTQTSTAPNANADLEKLAARAKQAREQAEEYRSWGMPDQAKLSQAQAEQLEQAYQAATGGKAATILVSRTWTEMVNELKERADIRGPVLQYNHYLKPEVFNENGGPLKLSEMLLFREFMRRPKRTNSLETQGLVQVGYQGLEKIHKSPLHWQEKGLTLDDWRDFLKVTLDHYVRESNFTQLDDELKNWIGSRFSSKFVRNPESKDPEDNQNRRWPQIRNGNVSHRLAKLLMLGAGFKTVNAATIDIINTWLKEAWAQLTGPLAVLKPDGNRFYLPKEHMTFSLITDAWICPVTNKILDTAFKGLTPYLPTHISFEHLTLAQYDTFVAQKVTMPEIWKLDRSQEDYAEGLAKARDWVSHDPLIAQLRSENVWTDINDRVVEGGFYYRTAEHSAQQSSERLQSYEKMFKNGQLNVLNCSTTMEMGVDIGGITAVVMNNVPPHPANYLQRAGRAGRSKESRAISYTLCKGNPHDQQVFANPLWPFETMIPAPMVAMNSARLVQRHVNALLLSDFLCNVIGETDKEKTSLDSLWFFGEDDGQSKCERFKIWLERPVLDIDTALERLVKGTALHGARAEYLRDKTINAITFLQQRWLSVYRDLVTQERESQPQTPYRKRIELEKKRHCGEYLLRDLAARTFLPGYGFPTDVVTFDNFTMEDYIREKSQKSRDKKDREDNVSRYKGLPSRNLGVAIREYAPGAEIILDGRVFRSAGVSLHWHNINADTNEAQRLDCAWRCHKCGTIGYEEGMSSSGMLFCSNSACGEKIIMDNRRQVLQPAGFVTDAHAPVTNNIETMKFVPVVPAWVFVKAEPVPLPNPLMGYMASGADGHVFQQSLGEGGHGYALCLSCGRAESMLNENDAPKSMEAHYPPRPGKADRDSQNHRLICPGSTALMKNVTLGALARTDVFEMVLRKPQNGEYLPDNTEEGRIVAMTLAVALRQALAGVLGISAAELGYSVRPVRLEDGQSVLAVQLYDVISGGAGFASSAPVHIEAILQGMVKQLGCRHCETACSECLLDSQTRHDHDLLDRKAALAWLGDDFTYYIGLPDEETFSLPDARYCPGAIGDTIRRAINEGAEKLTLWMTGAPNEWDLYARQFRAAVQNYRLKDNVEVDLVIPTGVDDPDLLHELSQFTALGVRLCHVEQDLQLPIVAQVTFTDRVMTLASRSQQATIPGPEWHLNDELVVRSLGYKTVELNEFILPAKATNAVERVKDIQIHKQLNGPLSQFGQRFWDVLFNDHEEAQSLMNNTRITGVHYTDRYLQNPVALALLGSILRPLKTKLTDGAEVTLDTLFKDKDRPGNRPFHDWMSIADFQDFADQWFAAALGRPVELTVFDSPRDIPHHRKLTVTFEDGQVLKIRFDQGMGYWRINFSSQWHYFHFRDDVSFQLVKMAQACKEGNVANSEESWATDVLVEVIAS

SEQ ID NO: 25892 - protein, 894 aa, Escherichia coli KTE170
MADNLNSLVLTHNLINHKEPVQQLEKVHPTWRSEFPIPLDDETGTHFLNGLLCAASVEAKPRLQKNKSTRCQFYWSEKHPDELRVIVSLPDEVSFPVTSEPSTTRFELAICEDGEEVSGLGPAYASLENRQATVRLRKSEVRFGRQNPSAGLSLVARAGGMIVGSIKLDDSEIAIGEVPLTFIVDADQWLLQGQASCSVRSSDVLIVLPRDNSNVAGFDGQSRAVNVLGLKALPVKGCQDVTVTANETYRIRTGREQISIGRFALNGKRASWVCHPDETFIGVPKVISTLPDIQSIDVTRYLSGISIEQCHIQEMLGAQYLSIRNSKNETLLRRKIGILPADFSIEIKGGIHANEGTIVITTQHPCVAKLKDKTLEATRKRTEGRTEIQLKAEGVPPAFITLQVLPNLAADPIDIELPFPAKGCLALDVNGRPLDKNITLHDLLGSRAFLFSRNGEPTRYTLQLHLRSVSGLQAWHEWCYTALSDRPVELNLYSLREHIENLISLEAGIDQVVEMRITGAGVVMAWQIRRYKYSLRYDYEKELLLSQSVNHRAGQIPSPVIMLLSEPERKSIPLASRMSEGVPVGEYELSSIVNKNGPWLVVPKPGEEMAFRPCFIRGESSLPVEESNIRSLQKATQLFNPQAEVNTITLVLGQMANDPAHSGWQFMRSLYDQFGYLPLATFEVWRALVQHPQALAMSLFKFEMSAEYLSRIENEFPILWEFFPIFEIKAASERFKLFLSQKGAPEETQKLLVTNMFQRLGLVFPTYADEIEKWLSNGHFPPSIPESFVHVWYQELLREHSEAQWPEYGSKRLHSWMASQKNPVIGINPDANHRYSVALLPVFAAAVASGNASFESVFDRKPGAVFFLRQVRDFDSRWFKAIFQCSLLRYVAKK

SEQ ID NO: 25893 - protein, 2114 aa, Escherichia coli KTE181; identical to SEQ ID NO: 25257

SEQ ID NO: 25894 - protein, 1096 aa, Escherichia coli KTE181; identical to SEQ ID NO: 25332

SEQ ID NO: 25895 - protein, 2114 aa, Escherichia coli KTE2; identical to SEQ ID NO: 25257

SEQ ID NO: 25896 - protein, 1096 aa, Escherichia coli KTE2; identical to SEQ ID NO: 25332

SEQ ID NO: 25897 - protein, 2114 aa, Escherichia coli KTE200; identical to SEQ ID NO: 25257

SEQ ID NO: 25898 - protein, 1096 aa, Escherichia coli KTE200; identical to SEQ ID NO: 25332

SEQ ID NO: 25899 - protein, 2104 aa, Escherichia coli KTE202; identical to SEQ ID NO: 25345

SEQ ID NO: 25900 - protein, 1119 aa, Escherichia coli KTE202; identical to SEQ ID NO: 25418

SEQ ID NO: 25901 - protein, 2114 aa, Escherichia coli KTE204; identical to SEQ ID NO: 25257

SEQ ID NO: 25902 - protein, 1096 aa, Escherichia coli KTE204; identical to SEQ ID NO: 25332

SEQ ID NO: 25903 - protein, 2114 aa, Escherichia coli KTE208; identical to SEQ ID NO: 25257

SEQ ID NO: 25904 - protein, 1096 aa, Escherichia coli KTE208; identical to SEQ ID NO: 25332

SEQ ID NO: 25905 - protein, 2114 aa, Escherichia coli KTE222; identical to SEQ ID NO: 25217

SEQ ID NO: 25906 - protein, 1096 aa, Escherichia coli KTE222; identical to SEQ ID NO: 25890

SEQ ID NO: 25907 - protein, 2114 aa, Escherichia coli KTE225; identical to SEQ ID NO: 25891

SEQ ID NO: 25908 - protein, 894 aa, Escherichia coli KTE225; identical to SEQ ID NO: 25892

SEQ ID NO: 25909 - protein, 2114 aa, Escherichia coli KTE235; identical to SEQ ID NO: 25257

SEQ ID NO: 25910 - protein, 1096 aa, Escherichia coli KTE235; identical to SEQ ID NO: 25332

SEQ ID NO: 25911 - protein, 2114 aa, Escherichia coli KTE26; identical to SEQ ID NO: 25257

SEQ ID NO: 25912 - protein, 1096 aa, Escherichia coli KTE26; identical to SEQ ID NO: 25332

SEQ ID NO: 25913 - protein, 2114 aa, Escherichia coli KTE44
MTTRYFSSLIEQSLSRSTEATLSIMGVTNPQLREHLAQQMGADCGKPGSFLASPVFQQMFGWKESNHTMRSLTEGNALLSKAVVDSLDNQSNGRYRFGADWKPFTHQLASWKALLEKKHSVVVTSGTGSGKTECFMVPVLEDLYRELHENGNNPLVGVRALFLYPLNALINSQRERLDAWTRGFGTGIRYCLYNGNTENLHASVKSEQAKRPNEVLSREKMREEPAPILVTNGTMLEYMMVRQVDAPIIQQSKAQKSLRWIVLDEAHTYVGSQAAELALQLRRVMTAFGVTPDDVRFVATSATIAGSDAEKQLKKFLSELSGIPQERIDVLDGSRVIPELEPSKNVSLPLDEIEQIPDLDLRDKNDNKIKGISPERFYALTHSPEARYIREMLVKQPNPMKLDEITERLNALTKQHYSQQEVLRWIDVCSGTQPNAKDPAFLKVRAHIFQRNTQGIWACVDKDCRLKHSTPLEKGWPFGYVYVNQRQNCDCGSPVYEVAFCNDCNEPHLLARDKKGKLVQWENKGGDEFSLQDEVPVEHDATEEKVEKENSFQPPLIIAAGETSEAGYTLQRLDRQTRRIGVINNDSIPLIINDIEQVCSASGCGYRGMSGKQPFRRALLGGPFYVTNIVPTVLEYCQDFTSDEGKEGVGPDSLPGRGRRLITFTDSRQGTARMAVRMQQEAERSRLRGSVVEILRWHQRTQTSTAPNANADLEKLAARAKQAREQAEEYRSWGMPDQAKLSQAQAEQLEQAYQAATGGKAATILVSRTWTEMVNELKERADIRGPVLQYNHYLKPEVFNENGGPLKLSEMLLFREFMRRPKRTNSLETQGLVQVGYQGLEKIHKSPLHWQEKGLTLDDWRDFLKVTLDLYVRESNFTQLDDELKNWIGSRFSSKFVRNPESKDPEDNQNRRWPQIRNGNVSHRLAKLLMLGAGFKTVNTATIDIINTWLKEAWAQLTGPLAVLKPDGNRFYLPKEHMTFSLITDAWICPVTNKILDTAFKGLTPYLPTHISFEHLTQAQYDTFVAQKVTMPEIWKLDRSQEDYAEGLAKARDWVNNDPLIAQLRSENVWTDINDRVVEGGFYYRTAEHSAQQSSERLQSYEKMFKNGQLNVLNCSTTMEMGVDIGGITAVVMNNVPPHPANYLQRAGRAGRSKESRAISYTLCKGNPHDQQVFANPLWPFETMIPAPMVAMNSARLVQRHVNALLLSDFLCNVIGETDKEKTSLDSLWFFGEDDGQSKCERFKVWLERPVLDIDTALERLVKGTALHGARAEHLRDKTINAITFLQQRWLSVYRDLVTQERESQPQTPYRKRIELEKKRHCGEYLLRDLAARTFLPGYGFPTDVVTFDNFTMEDYIREKSQKSRDKKDREDNVSRYKGLPSRNLGVAIREYAPGAEIILDGRVFRSAGVSLHWHNINADTNEAQRLDCAWRCHKCGTIGYEEGMSSSGMLFCSNSACGEKITMDNRRQVLQPAGFVTDAHAPVTNNIETMKFVPVVPAWVFVKAEPVPLPNPLMGYMASGADGHVFQQSLGEGGHGYALCLSCGRAESMLNENDAPKSMEAHYPPRPGKADRDSQNHRLICPGSTALMKNVTLGALARTDVFEMVLRKPQNGEYLPDNTEEGRIVAMTLAVALRQALAGVLGISAAELGYSVRPVRLEDGQSVLAVQLYDVISGGAGFASSAPVHIEAILQGMVKQLGCRHCDTACSECLLDSQTRHDHDLLDRKVALAWLGDDFTYYIGLPDEETFSLPDARYCPGAIGDTIRRAINEGAEKLTLWMTGAPNEWDLYARQFRAAIQSYRLKDNVEVDLVIPAGVDDPDLLHELSQFTALGVRLCHVEQELQLPIVAQVTFADRVMTLASRSQQATIPGPEWHLNDELVVRSLGYQTVELNEFILPAKAANAVERVKDIQIHKQLNGPLSQFGQRFWDVLFNDHEEAQSLMKNTRITGVHYTDRYLQNPVALALLGSILKPLKTKLTDGAEVALDTLFKDKDRPGNRPFHDWMSIADFQDFADQWFAAALGRPIELTVFDSPRDIPHHRKLTVTFEDGQVLKIRFDQGMGYWRINFASQWHYFDFRDDVSFQLVKMAQACKEGNVANSEESWATDVLVEVIAS

SEQ ID NO: 25914 - protein, 1096 aa, Escherichia coli KTE44
MGQSEYISWVKCTSWLSNFVNLRGLRQPDGRPLYEYHATNDEYTQLTQLLRAVGQSQSNICNRDFAACFVLFCSEWYRRDYERQCGWTWDPIYKKIGISFTATELGTIVPKGMEDYWLRPIRFYESERRNFLGTLFSEGGLPFRLLKESDSRFLAVFSRILGQYEQAKQSGFSALSLARAVIEKSALPTVFSEDTSVELISHMADNLNSLVLTHNLINHKEPVQQLDKVHPTWRSEFPIPLDDETGTHFLNGLLCAASVEAKPRLQKNKSTRCQFYWSEKHPDELRAIVSLPDEVSFPVTSEPSTTRFELAICEDGEEVSGLGPAYASLENRQATVRLRKSEVRFGRQNPSAGLSLVARAGGMIVGSIKLDDSEIAIGEVPLTFIVDADQWLLQGQASCSVRSSDVLIVLPRDNSYVAGFDGQSSAVNVLGLKALPVKGCQVVTITANETYRIRTGREQISIGRFALNGKRASWVCHPDETFIGVPKVISTLPDIQSIDVTRYLSGISIEQCHIQEMLGAQYLSIRNSKNETLLRRKIGILPADFSIEIKGGIHANEGTIVITTQHPCVAKLKDKTLEATRKRTEGRTEIQLKAEGVPPAFITLQVLPNLAADPIDIELPFPAKGCLALDVNGRPLDKNITLHDLLGSRAFLFSRNGEPTKYTLQLYLRSVSGLQAWHEWCYTALSDRPVELNLYSLREHIENLISLEAGIDQVVEMRITGAGVVMAWQIRRYKYSLRYDYEKELLLSQSVNHRAGQIPSPVIMLLSEPERKSIPLASRMSEGVPVGEYELSSIVNKNGPWLVVPKPGEEMAFRPCFIRGEYSLPVEESNIRSLQKATQLFNPQAEVNTITLVLGQMANDPAHSGWQFMRSLYDQFGYLPLATFEVWRALVQHPQALAMSLFKFEMSAEYLSRIENEFPILWEFFPIFEIKAASERFKLFLSQKGAPEETQKLLVTNMFQRLGLVFPTYADEIEKWLSNGYLPPSIPESFVHVWYQELLREHSEAQWPEYGSKRLHSWMASQKNPVIGINPDANHRYSVALLPVFAAAVASGNASFESVFDRKPGAVFFLRQVRDFDSRWFKAIFQCSLLRYVAKK

SEQ ID NO: 25915 - protein, 2104 aa, Escherichia coli KTE50; identical to SEQ ID NO: 25345

SEQ ID NO: 25916 - protein, 1119 aa, Escherichia coli KTE50; identical to SEQ ID NO: 25418

SEQ ID NO: 25917 - protein, 1584 aa, Escherichia coli KTE51
MQDEVPVEHDTTEEKVEKENGFLPPLIIAAGETSETGYTLQRLDHQTRRIGVINNDSIPLIINDVEQVCSASGCGYRGMSGKQPFRRALLGGPFYVTNIVPTVLEYCQDFTSDEGKEGVGPDSLPGRGRRLITFTDSRQGTARMAVRMQQEAERSLLRGSVVEILSWHQRTQTSTAPNANADLEKLAARAKQAREQAEEYRSWGMPDQAKLSQAQAEQLEQAYQAATGGKAATTLVSRTWTEMVNELKDKADIRGPVLKYNHYLQPEVFNKNGGPLKLSEMLLFREFMRRPKRTNSLETQGLVQVGYQGLEKIHKSPLHWQEKGLTLDDWRDFLKVTLDLYVRESNFTQLDDELKNWIGSRFSSKFVRNPESKDPEDNQNRRWPQIRNGNVSHRLAKLLMLGAGFKTVNTATIDIINTWLKEAWAQLTGPLAVLKPDGNRFYLPKEHMTFSLITDAWICPVTNKILDTAFKGLTPYLPTHISFEHLTQAQYDTFVAQKVTMPEIWKLDRSQEDYAEGLAKARDWVNNDPLIAQLRSENVWTDINDRVVEGGFYYRTAEHSAQQSSERLQSYEKMFKNGQLNVLNCSTTMEMGVDIGGITAVVMNNVPPHPANYLQRAGRAGRSKESRAISYTLCKGNPHDQQVFANPLWPFETMIPAPMVAMNSARLVQRHVNALLLSDFLCNVIGETDKEKTSLDSLWFFGEDDGQSKCERFKVWLEHPVLDIDTALERLVKGTALHGARAEHLRDKTINAITFLQQRWLSVYRDLVTQERESQPQTPYRKRIELEKKRHCGEYLLRDLAARTFLPGYGFPTDVVTFDNFTMEDYIREKSQKSRDKKDREDNVSRYKGLPSRNLGVAIREYAPGAEIILDGRVFRSAGVSLHWHNINADTNEAQRLDCAWRCHKCGTIGYEEGMSSSGMLFCSNSACGEKITMDNRRQVLQPAGFVTDAHAPVTNNIETMKFVLVVPAWVFVKAEPVPLPNPLMGYMASGADGHVFQQSLGEGGHGYALCLSCGRAESMLNENDAPKSMEAHYPPRPGKADRDSQNHRLICPGSTALMKNVTLGALARTDVFEMVLRKPQNGEYLPDNTEEGRIVAMTLAVALRQALAGVLGISAAELGYSVRPVRLEDGQSVLAVQLYDVISGGAGFASSAPVHIEAILQGMVKQLGCRHCDTACSECLLDSQTRHDHDLLDRKVALAWLGDDFTYYIGLPDEETFSLPDARYCPGAIGDTIRRAINEGAEKLTLWMTGAPNEWDLYARQFRAAIQSYRLKDNVEVDLVIPAGVDDPDLLHELSQFTALGVRLCHVEQELQLPIVAQVTFAERVMTLASRSQQATIPGPEWHLNDELVVRSLGYQTVELNEFILPAKAANAVERVKDIQIHKQLNGPLSQFGQRFWDVLFNDHEEAQSLMKNTRITGVHYTDRYLQNPVALALLGSILKPLKTKLTDGAEVALDTLFKDKDRPGNRPFHDWMSIADFQDFADQWFAAALGRPIELTVFDSPRDIPHHRKLTVTFEDGQVLKIRFDQGMGYWRINFASQWHYFDFRDDVSFQLVKMAQACKEGNVANSEESWATDVLVEVIAS

SEQ ID NO: 25918 - protein, 221 aa, Escherichia coli KTE51
MGQSEYISWVKCTSWLSNFVNLRGLRQPDGRPLYEYHATNAEYNQLTQLLCAVGQSQSNICNRDFAACFVLFCSEWYRRDYERQCGWTWDPIYKKIGISFTATELGTIVPKGMEDYWLRPIRFYESERRNFLGTLFSEGGLPFRLLKESDSRFLAVFSRILGQYEQAKLNRPGFPGEYFICELRLPDHRFRWKHNKLFLLLPEEYGPAFPAIVDCYTSPPT

SEQ ID NO: 25919 - protein, 2114 aa, Escherichia coli KTE56; identical to SEQ ID NO: 25217

SEQ ID NO: 25920 - protein, 1096 aa, Escherichia coli KTE56; identical to SEQ ID NO: 25218

SEQ ID NO: 25921 - protein, 2114 aa, Escherichia coli KTE68; identical to SEQ ID NO: 25257

SEQ ID NO: 25922 - protein, 1096 aa, Escherichia coli KTE68; identical to SEQ ID NO: 25332

SEQ ID NO: 25923 - protein, 2114 aa, Escherichia coli KTE81
MTTRYFSSLIEQSLSRSTEATLSIMGVTNPQLREHLAQQMGADCGKPGSFLASPVFQQMFGWKESNHTMRSLTEGNALLSKAVVDSLDNQSNGRYRFGADWKPFTHQLASWKALLEKKHSVVVTSGTGSGKTECFMVPVLEDLYRELHENGNNPLVGVRALFLYPLNALINSQRERLDAWTRGFGTGIRYCLYNGNTENLHASVKSEQAKRPNEVLSREKMREEPAPILVTNGTMLEYMMVRQVDAPIIQQSKAQKSLRWIVLDEAHTYVGSQAAELALQLRRVMTAFGVTPDDVRFVATSATIAGSDAEKQLKKFLSELSGIPQERIDVLDGSRVIPELEPSKNVSLPLDEIEQIPDLDLRDKNDNKIKGISPERFYALTHSPEARYIREMLVKQPNPMKLDEITERLNALTKQHYSQQEVLRWIDVCSGTQPNAKDPAFLKVRAHIFQRNTQGIWACVDKDCRLKHSTPLEKGWPFGYVYVNQRQNCDCGSPVYEVAFCNDCNEPHLLARDKKGKLVQWENKGGDEFSLQDEVPVEHDATEEKVEKENSFQPPLIIAAGETSEAGYTLQRLDRQTRRIGVINNDSIPLIINDIEQVCSASGCGYRGMSGKQPFRRALLGGPFYVTNIVPTVLEYCQDFTSDEGKEGVGPDSLPGRGRRLITFTDSRQGTARMAVRMQQEAERSRLRGSVVEILSWHQRTQTSTAPNANADLEKLAARAKQAREQAEEYRSWGMPDQAKLSQAQAEQLEQAYQAATGGKAATILVSRTWTEMVNELKERADIRGPVLQYNHYLKPEVFNENGGPLKLSEMLLFREFMRRPKRTNSLETQGLVQVGYQGLEKIHKSPLHWQEKGLTLDDWRDFLKVTLDLYVRESNFTQLDDELKNWIGSRFSSKFVRNPESKDPEDNQNRRWPQIRNGNVSHRLAKLLMLGAGFKTVNTATIDIINTWLKEAWAQLTGPLAVLKPDGNRFYLPKEHMTFSLITDAWICPVTNKILDTAFKGLTPYLPTHISFEHLTQAQYDTFVAQKVTMPEIWKLDRSQEDYAEGLAKARDWVNNDPLIAQLRSENVWTDINDRVVEGGFYYRTAEHSAQQSSERLQSYEKMFKNGQLNVLNCSTTMEMGVDIGGITAVVMNNVPPHPANYLQRAGRAGRSKESRAISYTLCKGNPHDQQVFANPLWPFETMIPAPMVAMNSARLVQRHVNALLLSDFLCNVIGETDKEKTSLDSLWFFGEDDGQSKCERFKVWLERPVLDIDTALERLVKGTALHGARAEHLRDKTINAITFLQQRWLSVYRDLVTQERESQPQTPYRKRIELEKKRHGGEYLLRDLAARTFLPGYGFPTDVVTFDNFTMEDYIREKSQKSRDKKDREDNVSRYKGLPSRNLGVAIREYAPGAEIILDGRVFRSAGVSLHWHNINADTNEAQRLDCAWRCHKCGTIGYEEGMSSSGMLFCSNSACGEKITMDNRRQVLQPAGFVTDAHAPVTNNIETMKFVPVVPAWVFVKAEPVPLPNPLMGYMASGADGHVFQQSLGEGGHGYALCLSCGRAESMLNENDAPKSMEAHYPPRPGKADRDSQNHRLICPGSTALMKNVTLGALARTDVFEMVLRKPQNGEYLPDNTEEGRIVAMTLAVALRQALAGVLGISAAELGYSVRPVRLEDGQSVLAVQLYDVISGGAGFASSAPVHIEAILQGMVKQLGCRHCDTACSECLLDSQTRHDHDLLDRKVALAWLGDDFTYYIGLPDEETFSLPDARYCPGAIGDTIRRAINEGAEKLTLWMTGAPNEWDLYARQFRAAIQSYRLKDNVEVDLVIPAGVDDPDLLHELSQFTALGVRLCHVEQELQLPIVAQVTFADRVMTLASRSQQATIPGPEWHLNDELVVRSLGYQTVELNEFILPAKAANAVERVKDIQIHKQLNGPLSQFGQRFWDVLFNDHEEAQSLMKNTRITGVHYTDRYLQNPVALALLGSILKPLKTKLTDGAEVALDTLFKDKDRPGNRPFHDWMSIADFQDFADQWFAAALGRPIELTVFDSPRDIPHHRKLTVTFEDGQVLKIRFDQGMGYWRINFASQWHYFDFRDDVSFQLVKMAQACKEGNVANSEESWATDVLVEVIAS

SEQ ID NO: 25924 - protein, 1096 aa, Escherichia coli KTE81
MGQSEYISWVKCTSWLSNFVNLRGLRQPDGRPLYEYHATNDEYTQLTQLLRAVGQSQSNICNRDFAACFVLFCSEWYRRDYERQCGWTWDPIYKKIGISFTATELGTIVPKGMEDYWLRPIRFYESERRNFLGTLFSEGGLPFRLLKESDSRFLAVFSRILGQYEQAKQSGFSALSLARAVIEKSALPTVFSEDTSVELISHMADNLNSLVLTHNLINHKEPVQQLDKVHPTWRSEFPIPLDDETGTHFLNGLLCAASVEAKPRLQKNKSTRCQFYWSEKHPDELRAIVSLPDEVSFPVTSEPSTTRFELAICEDGEEVSGLGPAYASLENRQATVRLRKSEVRFGRQNPSAGLSLVARAGGMIVGSIILDDSEIAIGEVPLTFIVDADQWLLQGQASCSVRSSDVLIVLPRDNSYVAGFDGQSSAVNVLGLKALPVKGCQVVTITANETYRIRTGREQISIGRFALNGKRASWVCHPDETFIGVPKVISTLPDIQSIDVTRYLSGISIEQCHIQEMLGAQYLSIRNSKNETLLRRKIGILPADFSIEIKGGIHANEGTIVITTQHPCVAKLKDKTLEATRKRTEGRTEIQLKAEGVPPAFITLQVLPNLAADPIDIELPFPAKGCLALDVNGRPLDKNITLHDLLGSRAFLFSRNGEPTKYTLQLYLRSVSGLQAWHEWCYTALSDRPVELNLYSLREHIENLISLEAGIDQVVEMRITGAGVVMAWQIRRYKYSLRYDYEKELLLSQSVNHRAGQIPSPVIMLLSEPERKSIPLASRMSEGVPVGEYELSSIVNKNGPWLVVPKPGEEMAFRPCFIRGEYSLPVEESNIRSLQKATQLFNPQAEVNTITLVLGQMANDPAHSGWQFMRSLYDQFGYLPLATFEVWRALVQHPQALAMSLFKFEMSAEYLSRIENEFPILWEFFPIFEIKAASERFKLFLSQKGAPEETQKLLVTNMFQRLGLVFPTYADEIEKWLSNGYLPPSIPESFVHVWYQELLREHSEAQWPEYGSKRLHSWMASQKNPVIGINPDANHRYSVALLPVFAAAVASGNASFESVFDRKPGAVFFLRQVRDFDSRWFKAIFQCSLLRYVAKK

SEQ ID NO: 25925 - protein, 2114 aa, Escherichia coli KTE82; identical to SEQ ID NO: 25257

SEQ ID NO: 25926 - protein, 1096 aa, Escherichia coli KTE82; identical to SEQ ID NO: 25332

SEQ ID NO: 25927 - protein, 2114 aa, Escherichia coli KTE83; identical to SEQ ID NO: 25257

SEQ ID NO: 25928 - protein, 1096 aa, Escherichia coli KTE83; identical to SEQ ID NO: 25332

SEQ ID NO: 25929 - protein, 2114 aa, Escherichia coli M718; identical to SEQ ID NO: 25257

SEQ ID NO: 25930 - protein, 1112 aa, Escherichia coli M718; identical to SEQ ID NO: 25376

SEQ ID NO: 25931 - protein, 2104 aa, Escherichia coli M919; identical to SEQ ID NO: 25227

SEQ ID NO: 25932 - protein, 1119 aa, Escherichia coli M919
MLVKTPVNPLLQWLNMFFSRRSLSGADGRALYAYRCTDTEYESLAELLRTYAPRSYPRTIFISYSDVLFSIYAAEFIRRTHTVGHPKWDTILDSINWKVPYVHRQKLVNDGIRYWKRKIRNLGQASGYLHTLACEGGLPIRMIENESGYLITYFRRIYQALRGQSSQYPAAKIAQELGDTIPVTMQNELVYEIAGEFCETLCRLLSEHPPHSSDPVSALRKLSPDWHLQLPLVLPEANAAEIVRRLLSQSSEIRSASSLQVERIWVDVDDSWYCDARFRFPATMRTEQLTSLFECHIQPEQTRLIISGKWKNGGARLAMLSRYEQQDWRVELLPIAMQKLSGADAMAEISLSLHEGPILLGHTIPKGGYELTEELPWVFEAMNESESQLKLVGMGSVSSRLNALFISLPKNSHLDISGEGEFDIPRLLKNSERSLTKISGVFSVVLHDGAVCTIRTQQLYDSAIEYYIKSTEVELVKSDYPVHRAWPKIGWKKDLQYGIVPEKELFWRSIRSGNNAWYSVASEMPKGQIEVRRIVNDEVLFSGKVVVLPADFDINIIPESALQGIIMLSGITDTRIDKYSNNEKVTLKSDYSQNECAIYYNSSLMLENTVDLRVSWKDGSNLKLLLPKPVSGGRFVTNDGSVHFDGVASIAHLHGIDAELLTISCAGRGYLNIELLDENPVAEKFRYLHADLPLLSGRNDKLQQISLYENYNLLNAMLACAWNSNSTLCVDFYSDRFGKDKATLNIKRYDGSFIEHDQGLLVDIKNSVVFPANRIDELVVDAISLKNPGLHISLLKKDEFAYDLSALNVQDSPWLIVGKLDGTARIAPVIKWMLPVLQTNDLLLNALCEADPEQRKKNFNELIFEIDNNPLQNYCCLLTEYIKKYKMNNGLSLLDLDLFRGISSNYRVVVQLLISSCLSGDSDTIYDIQEELPFSWGWIPVSIWKDVFQKCWTYLEKQINDKTLALHILQPFIAFMNHRAHIDRRLAPIANMLLTYSESLPTGCDVLPTVSREQFNEAKQMLLRNPDSFGRISIFPKELWSSAITPELKSVFNKLWIEDKYHSRLEKRFNLMLVAALLTQKDNNLIHQLSALFEFHYQQAPQQLGVIYQYYFEQAGVCH

SEQ ID NO: 25933 - protein, 2114 aa, Escherichia coli MGH 58; identical to SEQ ID NO: 25257

SEQ ID NO: 25934 - protein, 380 aa, Escherichia coli MGH 58
MRITGAGVVMAWQIRRYKYSLRYDYEKELLLSQSVNHRAGQIPSPVIMLLSEPERKSIPLASRMSEGVPVGEYELSSIVNKNGPWLVVPKPGEEMAFRPCFIRGESSLPVEESNIRSLQKATQLFNPQAEVNTITLVLGQMANDPAHSGWQFMRSLYDQFGYLPLATFEVWRALVQHPQALAMSLFKFEMSAEYLSRIENEFPILWEFFPIFEIKAASERFKLFLSQKGAPEETQKLLVTNMFQRLGLVFPTYADEIEKWLSNGHLPPSIPESFVHVWYQELLREHSEAQWPEYGSKRLHSWMASQKNPVIGINPDANHRYSVALLPVFAAAVASGNASFESVFDRKPGAVFFLRQVRDFDSRWFKAIFQCSLLRYVAKK

SEQ ID NO: 25935 - protein, 2090 aa, Escherichia coli MS 146-1; identical to SEQ ID NO: 25375

SEQ ID NO: 25936 - protein, 1112 aa, Escherichia coli MS 146-1; identical to SEQ ID NO: 25376

SEQ ID NO: 25937 - protein, 2104 aa, Escherichia coli MS 187-1
MDVQQLHYAPLLNQLHQRAVRSVVSQLALRSKSLTHYLESQYFQPPGQEGSLLADPVFESTFGWMPADDTMEDLRDKLISSPLVDALSKAPVPFRHQLTAWRTILEDKKSLLVSSGTGSGKTECFMVPVLEDLIRQQKSTRQSLTGTQAIFLYPLNALINSQQERLREWTRGFKGKIRFALYNGETRHTKYEIQEDQLKVPEQALSREAIYEAPPSIMVTNTTMLEYMLIRRKDAPIIEKSQGMLKYIVLDEAHSYIGSQAAELALLLRRVMQAFNVGPGTDKPVQIIATSATIGEDSPEGNKELAKFVADLAGVTERDVKVVRGYRQIPRVSESLIRHEYPTSLTSLKSLSPQDLYQQLCHYRVAQQLRQALTHPGRQAVRLSELLNVARRTWPDINHRELLQLLDLMARSREGELAFTPLRMHGFIRTLAGLWACSNKQCSHKAHELNQSDWPFGQVWFEQRQYCDCGAPVFEVLRCSGCGSAYLSAKEEMRGDGTNWLVAQPAAAEVDEFALDVDVYSEDEDNDELDNNSQFDRLIASDGEKYIISLEETTAGKIDSEAQKHYEINLLRPESRGEGRNNSFACVCCGDTQRKNNPLFRPLRLGAPFFLNEIIPTLLEFSPLPQTREEQLGPFNGRRLLTFTDSRQGTARISARLQQDADKATLRALCYQELANITEPSAKLSPAHCALLEKVISQFSVLPLKNSIDALKKAMAANEELSPTDIQALKIIEPMVSSLSTEHAEAMQILQANSGNQQKKTMSWQTLSEQLVGSVDLADRMRGSFKELSGLDLTKQQFADFCLYSEFGRRPKNAWTLESLGLVAIHYPFIDKVTTCPQDWKTLLPDPDKQLAEWRNLLKITLDFFIRENSAVFYENEQYPRWMGARFPVKMLQGPDKKNKGQKRDQLWPQIRDRHYNRVIKLLIAVFPAIQPEQAHWKSLVNHLMIEVWDAIRPCLRQFESGYQLDIKQQAEFYSPKQVWRCPYTRRALDVTLLGYSPYLPGSKEIAPEKAVLIEMPELPVRHWRLSGGGEIAREERLEWLESNALIQHAREEGLWSTRSDRLALKDSWYRLEEHSAQRTPEQNQFNEKQFKSGKVNVLNCSTTMEMGVDIGGMSLVAMNNVPPAPANYLQRAGRAGRRGESASAAITLCKNTAHGMEVFKDPLWAFNTTASAPRVRFGSSSIVQRHVNALVLGLFLRAEVPDATKLSCKWFFEGDESQCLRFLHWLNHQADELADKLKRLTQGTVLMSLTATQLLTRTQAMMQQVDIRWRSQLAILLENIEALKADNSAWEETPAGKAIAYQLRDYRGAYLFSKLISEAFLPGHGFPVGVVNFNYLTADELEKRRAIKATQADPNEGGESFSRRIEKLPSRDLPTALREYAPGADVVLGGKVYRSSGIMLGKVLASGQELSGDHHIPWFWHCRKCGAGATSTTHPVECSHCKADIQQLDVKRYLQPVGFATDIRYQAHNDVSMPAQLPWKDPRVLVPSSVWVSLPDAGLGRYRLSHSGELFHFSEGEFGHGYAICLSCGRAESQTQPQRTPENLKNPERENTHYLLRGGSNDRQGSNKLCHGHVHKDLWLGYSSRTDMVELQLNDDNGLLIRDEVAARSLAVALREGLAHKLGIENTELGVTTQQARDINGYTGYSIFIYDNNAGGAGYAVQLIDHWADVFNYARKLLDCSCDKFCHHCLLSYDSQHYVNRLDRHHALTLLTNVRLQRLNLAPEYQYFGDGSRVETNPLSLRIAQCLNSEIYDSCSLVLAGPQEQWDFAQWPLFKELLQFASSGGNVELLVATPLENLTDSSRHQLSALAAMPGGRLQVKSIATAQLMQGKGRWLAQVTREGQSQQWAADDSATVAPGELWGQSASSPVVTLKGTSGKTFSGQTLSAEDLLPALPTGAVRINLCEQLDGPLEGFGSRFWSLVTQQHAGWKQAFTRHKEITHVEYSDRYLNSPFTARLLGEILTELVEQGMAERASLTVCVKKLDYNSRQHDALYNAWLNEEDRQQVVTTLLEEGYLGPAWPGAISWLTGDNQSTEHGRELTVTFSDGSQHYVLLDMGLSYWRCIEDTFFDFALRVPQQVERLANTRARAVAPGNDLRSYIIAG

SEQ ID NO: 25938 - protein, 978 aa, Escherichia coli MS 187-1
MIENESGYLITYFRRIYQALRGQSSQYPAAKIAQELGDTIPVTMQNELVYEIAGEFCETLCRLLSEHPPHSSDPVSALRKLSPDWHLQLPLVLPEANAAEIVRRLLSQSSEIRSASSLQVERIWVDVDDSWYCDARFRFPATMRTEQLTSLFECHIQPEQTRLIISGKWKNGGARLAMLSRYEQQDWRVELLPIAMQKLSGADAMAEISLSLHEGPILLGHTIPKGGYELTEELPWVFEAMNESESQLKLVGMGSVSSRLNALFISLPKNSHLDISGEGEFDIPRLLKNSERSLTKISGVFSVVLHDGAVCTIRTQQLYDSAIEYYIKSTEVELVKSDYPVHRAWPKIGWKKDLQYGIVPEKELFWRSIRSGNNAWYSVASEMPKGQIEVRRIVNDEVLFSGKVVVLPADFDINIIPESAQQGIIMLSGITDTRIDKYSNNEKVTLKSDYSQNECAIYYNSSLMLENTVDLRVSWKDGSNLKLLLPKPVSGGRFVTNDGSVHFDGVASIAHLHGIDAELLTISCAGRGYLNIELLDENPVAEKFRYLHADLPLLSGRNDKLQQISLYENYNLLNAMLACAWNSNSTLCVDFYSDRFGKDKATLNIKRYDGSFIEHDQGLLVDIKNSVVFPANRIDELVVDAISLKNPGLHISLLKKDEFAYDLSALNVQDSPWLIVGKLDGTARIAPVIKWMLPVLQTNDLLLNALCEADPEQRKKNFNELIFEIDNNPLQNYCCLLTEYIKKYKVNNGLSLLDLDLFRGISSNYRVVVQLLISSCLSGDSDTIYDIQEELPFSWGWIPVSIWKDVFQKCWTYLEKQINDKTLALHILQPFIAFMNHRAHIDRRLAPIANMLLTYSESLSTGCDVLPTVSREQFNEAKQMLLRNPDSFGRISIFPKELWSSAITPELKSVFNKLWIEDKYHSRLEKRFNLMLVAALLTQKDNNLIHQLSALFEFHYQQAPQQLGVIYQYYFEQAGVCH

SEQ ID NO: 25939 - protein, 2114 aa, Escherichia coli MS 196-1
MTTRYFSSLIEQSLSRSTEATLSIMGVTNPQLREHLAQQMGADCGKPGSFLASPVFQQMFGWKESNHTMRSLTEGNALLSKAVVDSLDDQSNGRYRFGADWKPFTHQLASWKALLEKKHSVVVTSGTGSGKTECFMVPVLEDLYRELHENGNNPLVGVRALFLYPLNALINSQRERLDAWTRGFGTGIRYCLYNGNTEELHAKMKTVQDNRPNEVLSREKMRLEPAPILVTNGTMLEYMMVRQVDAPIIQQSKAQKSLRWIVLDEAHTYVGSQAAELALQLRRVMTAFGVTPDDVRFVATSATIACSDAEKQLKKFLSELSGIPQERIDVLDGSRVIPELEPSKNVSVPLDEIEQIPDLDLKDKNDNKIKGISPERFYALTHSPEARYIREMLVSQPNPMKLDEMTQRLNALTKQHYSQQEVLRWIDVCSGTQPNAKDPAFLKVRAHIFQRNTQGIWACVDKDCRLKHGTPLEKGWPFGYVYVNQRQNCDCGSPVYEVAFCNDCNEPHLLAQDKKGKLVQWENKGGDEFSLQDEVPVEHDTTEEKVEKENGFLPPLIIAAGETSETGYTLQRLDHQTRRIGVINNDSIPLIINDVEQVCSASGCGYRGMSGKQPFRRALLGGPFYVTNIVPTVLEYCQDFTSDEGKEGVGPDSLPGRGRRLITFTDSRQGTARMAVRMQQEAERSLLRGSVVEILSWHQRTQTSTAPNANADLEKLAARAKQAREQAEEYRSWGMPDQAKLSQAQAEQLEQAYQAATGGKAATTLVSRTWTEMVNELKDKADIRGPVLKYNHYLQPEVFNKNGGPLKLSEMLLFREFMRRPKRTNSLETQGLVQVGYQGLEKIHKSPLHWQEKGLTLDDWRDFLKVTLDLYVRESNFTQLDDELKNWIGSRFSSKFVRNPESKDPEDNQNRRWPQIRNGNVSHRLAKLLMLGAGFKTVNTATIDIINTWLKEAWAQLTGPLAVLKPDGNRFYLPKEHMTFSLITDAWIFPVTNKILDTAFKGLTPYLPTHISFEHLTQAQYDTFVAQKVTMPEIWKLDRSQEDYAEGLAKARDWVNNDPLIAQLRSENVWTDINDRVVEGGFYYRTAEHSAQQSSERLQSYEKMFKNGQLNVLNCSTTMEMGVDIGGITAVVMNNVPPHPANYLQRAGRAGRSKESRAISYTLCKGNPHDQQVFANPLWPFETMIPAPMVAMNSARLVQRHVNALLLSDFLCNVIGETDKEKTSLDSLWFFGEDDGQSKCERFKVWLERPVLDIDTALERLVKGTALHGARAEHLRDKTINAITFLQQRWLSVYRDLVTQERESQPQTPYRKRIELEKKRHCGEYLLRDLAARTFLPGYGFPTDVVTFDNFTMEDYIREKSQKSRDKKDREDNVSRYKGLPSRNLGVAIREYAPGAEIILDGRVFRSAGVSLHWHNINADTNEAQRLDCAWRCHKCGTIGYEEGMSSSGMLFCSNSACGEKITMDNRRQVLQPAGFVTDAHAPVTNNIETMKFVPVVPAWVFVKAEPVPLPNPLMGYMASGADGHVFQQSLGEGGHGYALCLSCGRAESMLNENDAPKSMEAHYPPRPGKADRDSQNHRLICPGSTALMKNVTLGALARTDVFEMVLRKPQNGEYLPDNTEEGRIVAMTLAVALRQALAGVLGISAAELGYSVRPVRLEDGQSVLAVQLYDVISGGAGFASSAPVHIEAILQGMVKQLGCRHCDTACSECLLDSQTRHDHDLLDRKVALAWLGDDFTYYIGLPDEETFSLPDARYCPGAIGDTIRRAINEGAEKLTLWMTGAPNEWDLYARQFRAAIQSYRLKDNVEVDLVIPAGVDDPDLLHELSQFTALGVRLCHVEQELQLPIVAQVTFADRVMTLASRSQQATIPGPEWHLNDELVVRSLGYQTVELNEFILPAKAANAVERVKDIQIHKQLNGPLSQFGQRFWDVLFNDHEEAQSLMKNTRITGVHYTDRYLQNPVALALLGSILKPLKTKLTDGAEVALDTLFKDKDRPGNRPFHDWMSIADFQDFADQWFAAALGRPIELTVFDSPRDIPHHRKLTVTFEDGQVLKIRFDQGMGYWRINFASQWHYFDFRDDVSFQLVKMAQACKEGNVANSEESWATDVLVEVIAS

SEQ ID NO: 25940 - protein, 295 aa, Escherichia coli MS 196-1
MVVPKPGEEMAFRPCFIRGESSLPVEESNIRSLQKATQLFNPQAEVNTITRVLGQMANDPAHSGWQFMRSLYDQFGYLPLATFEVWRALVQHPQALAMSLFKFEMSAEYLSRIENEFPILWEFFPIFEIKAASERFKLFLSQKGAPEETQKLLVTNMFQRLGLVFPTYADEIEKWLSNGYLPPSIPESCVHGWYQELLREHSEARWPEYGCKRLYKWMMSQKNPVIGINPDANHRYSVAWLPVFAAAVASGNASFESVFDRKPGAVFFLRQVRDFDSRWFKAIFQFSLLRYVAKK

SEQ ID NO: 25941 - protein, 2090 aa, Escherichia coli MS 198-1; identical to SEQ ID NO: 25375

SEQ ID NO: 25942 - protein, 1112 aa, Escherichia coli MS 198-1; identical to SEQ ID NO: 25376

SEQ ID NO: 25943 - protein, 2104 aa, Escherichia coli NE037; identical to SEQ ID NO: 25235

SEQ ID NO: 25944 - protein, 978 aa, Escherichia coli NE037; identical to SEQ ID NO: 25216

SEQ ID NO: 25945 - protein, 2104 aa, Escherichia coli NE098; identical to SEQ ID NO: 25235

SEQ ID NO: 25946 - protein, 978 aa, Escherichia coli NE098; identical to SEQ ID NO: 25216

SEQ ID NO: 25947 - protein, 2104 aa, Escherichia coli O127:H27 str. C43/90; identical to SEQ ID NO: 25227

SEQ ID NO: 25948 - protein, 1119 aa, Escherichia coli O127:H27 str. C43/90; identical to SEQ ID NO: 25584

SEQ ID NO: 25949 - protein, 2104 aa, Escherichia coli O145:H28 str. 4865/96; identical to SEQ ID NO: 25215

SEQ ID NO: 25950 - protein, 978 aa, Escherichia coli O145:H28 str. 4865/96; identical to SEQ ID NO: 25216

SEQ ID NO: 25951 - protein, 2104 aa, Escherichia coli O145:H28 str. RM12581; identical to SEQ ID NO: 25215

SEQ ID NO: 25952 - protein, 1119 aa, Escherichia coli O145:H28 str. RM12581; identical to SEQ ID NO: 25584

SEQ ID NO: 25953 - protein, 2104 aa, Escherichia coli O145:H28 str. RM13514; identical to SEQ ID NO: 25215

SEQ ID NO: 25954 - protein, 1119 aa, Escherichia coli O145:H28 str. RM13514; identical to SEQ ID NO: 25584

SEQ ID NO: 25955 - protein, 2104 aa, Escherichia coli O145:NM str. 06-3484; identical to SEQ ID NO: 25215

SEQ ID NO: 25956 - protein, 978 aa, Escherichia coli O145:NM str. 06-3484; identical to SEQ ID NO: 25216

SEQ ID NO: 25957 - protein, 2104 aa, Escherichia coli O145:NM str. 08-4270; identical to SEQ ID NO: 25253

SEQ ID NO: 25958 - protein, 978 aa, Escherichia coli O145:NM str. 08-4270; identical to SEQ ID NO: 25216

SEQ ID NO: 25959 - protein, 2104 aa, Escherichia coli O145:NM str. 2010C-3507; identical to SEQ ID NO: 25215

SEQ ID NO: 25960 - protein, 978 aa, Escherichia coli O145:NM str. 2010C-3507; identical to SEQ ID NO: 25216

SEQ ID NO: 25961 - protein, 2104 aa, Escherichia coli O145:NM str. 2010C-3508; identical to SEQ ID NO: 25215

SEQ ID NO: 25962 - protein, 978 aa, Escherichia coli O145:NM str. 2010C-3508; identical to SEQ ID NO: 25216

SEQ ID NO: 25963 - protein, 2104 aa, Escherichia coli O145:NM str. 2010C-3510; identical to SEQ ID NO: 25215

SEQ ID NO: 25964 - protein, 978 aa, Escherichia coli O145:NM str. 2010C-3510; identical to SEQ ID NO: 25216

SEQ ID NO: 25965 - protein, 2104 aa, Escherichia coli O145:NM str. 2010C-3511; identical to SEQ ID NO: 25215

SEQ ID NO: 25966 - protein, 978 aa, Escherichia coli O145:NM str. 2010C-3511; identical to SEQ ID NO: 25216

SEQ ID NO: 25967 - protein, 2104 aa, Escherichia coli O145:NM str. 2010C-3516; identical to SEQ ID NO: 25215

SEQ ID NO: 25968 - protein, 978 aa, Escherichia coli O145:NM str. 2010C-3516; identical to SEQ ID NO: 25216

SEQ ID NO: 25969 - protein, 2104 aa, Escherichia coli O145:NM str. 2010C-3517; identical to SEQ ID NO: 25215

SEQ ID NO: 25970 - protein, 978 aa, Escherichia coli O145:NM str. 2010C-3517; identical to SEQ ID NO: 25216

SEQ ID NO: 25971 - protein, 2104 aa, Escherichia coli O145:NM str. 2010C-3518; identical to SEQ ID NO: 25215

SEQ ID NO: 25972 - protein, 978 aa, Escherichia coli O145:NM str. 2010C-3518; identical to SEQ ID NO: 25216

SEQ ID NO: 25973 - protein, 2104 aa, Escherichia coli O145:NM str. 2010C-3521; identical to SEQ ID NO: 25215

SEQ ID NO: 25974 - protein, 978 aa, Escherichia coli O145:NM str. 2010C-3521; identical to SEQ ID NO: 25216

SEQ ID NO: 25975 - protein, 2104 aa, Escherichia coli O145:NM str. 2010C-3526; identical to SEQ ID NO: 25215

SEQ ID NO: 25976 - protein, 978 aa, Escherichia coli O145:NM str. 2010C-3526; identical to SEQ ID NO: 25216

SEQ ID NO: 25977 - protein, 2104 aa, Escherichia coli O145:NM str. 2010C-4557C2; identical to SEQ ID NO: 25215

SEQ ID NO: 25978 - protein, 978 aa, Escherichia coli O145:NM str. 2010C-4557C2; identical to SEQ ID NO: 25216

SEQ ID NO: 25979 - protein, 2104 aa, Escherichia coli O157: str. 2010EL-2044; identical to SEQ ID NO: 25235

SEQ ID NO: 25980 - protein, 978 aa, Escherichia coli O157: str. 2010EL-2044; identical to SEQ ID NO: 25216

SEQ ID NO: 25981 - protein, 2104 aa, Escherichia coli O157: str. 2010EL-2045; identical to SEQ ID NO: 25235

SEQ ID NO: 25982 - protein, 978 aa, Escherichia coli O157: str. 2010EL-2045; identical to SEQ ID NO: 25216

SEQ ID NO: 25983 - protein, 2104 aa, Escherichia coli O157:H- str. 493-89; identical to SEQ ID NO: 25235

SEQ ID NO: 25984 - protein, 978 aa, Escherichia coli O157:H- str. 493-89; identical to SEQ ID NO: 25216

SEQ ID NO: 25985 - protein, 2104 aa, Escherichia coli O157:H- str. H 2687; identical to SEQ ID NO: 25235

SEQ ID NO: 25986 - protein, 978 aa, Escherichia coli O157:H- str. H 2687; identical to SEQ ID NO: 25216

SEQ ID NO: 25987 - protein, 2104 aa, Escherichia coli O157:H7; identical to SEQ ID NO: 25265

SEQ ID NO: 25988 - protein, 978 aa, Escherichia coli O157:H7; identical to SEQ ID NO: 25216

SEQ ID NO: 25989 - protein, 2104 aa, Escherichia coli O157:H7; identical to SEQ ID NO: 25311

SEQ ID NO: 25990 - protein, 978 aa, Escherichia coli O157:H7; identical to SEQ ID NO: 25216

SEQ ID NO: 25991 - protein, 2104 aa, Escherichia coli O157:H7; identical to SEQ ID NO: 25235

SEQ ID NO: 25992 - protein, 978 aa, Escherichia coli O157:H7
MIENESGYLITYFRRIYQALRGQSSQYPAAKIAQELGDTIPVTMQNELVYEIAGEFCETLCRLLSEHPPHSSDPVSALRKLSPDWHLQLPLVLPEANAAEIVRRLLSQSSEIRSASSLQVERIWVDVDDSWYCDARFRFPATMSTEQLTSLFECHIQPEQTRLIISGKWKNGGARLAMLSRYEQQDWRVELLPIAMQKLSGADAMAEISLSLHEGPILLGHTIPKGGYELTEELPWVFEAMNESESQLKLVGMGSVSSRLNALFISLPKNSHLDISGEGEFDIPRLLKNSERSLTKISGVFSVVLHDGAVCTIRTQQLYDSAIEYYIKSTEVELVKSDYPVHRAWPKIGWKKDLQYGIVPEKELFWRSIRSGNNAWYSVASEMPKGQIEVRRIVNDEVLFSGKVVVLPADFDINIIPESAQQGIIMLSGITDTRIDKYSNNEKVTLKSDYSQNECAIYYNSSLMLENTVDLRVSWKDGSNLKLLLPKPVSGGRFVTNDGSVHFDGVASIAHLHGIDAELLTISCAGRGYLNIELLDENPVAEKFRYLHADLPLLSGRNDKLQQISLYENYNLLNAMLACAWNSNSTLCVDFYSDRFGKDKATLNIKRYDGSFIEHDQGLLVDIKNSVVFPANRIDELVVDAISLKNPGLHISLLKKDEFAYDLSALNVQDSPWLIVGKLDGTARIAPVIKWMLPVLQTNDLLLNALCEADPEQRKKNFNELIFEIDNNPLQNYCCLLTEYIKKYKMNNGLSLLDLDLFRGISSNYRVVVQLLISSCLSGDSDTIYDIQEELPFSWGWIPVSIWKDVFQKCWTYLEKQINDKTLALHILQPFIAFMNHRAHIDRRLAPIANMLLTYSESLPTGCDVLPTVSREQFNEAKQMLLRNPDSFGRISIFPKELWSSAITPELKSVFNKLWIEDKYHSRLEKRFNLMLVAALLTQKDNNLIHQLSALFEFHYQQAPQQLGVIYQYYFEQAGVCH

SEQ ID NO: 25993 - protein, 2104 aa, Escherichia coli O157:H7; identical to SEQ ID NO: 25235

SEQ ID NO: 25994 - protein, 978 aa, Escherichia coli O157:H7; identical to SEQ ID NO: 25216

SEQ ID NO: 25995 - protein, 2104 aa, Escherichia coli O157:H7; identical to SEQ ID NO: 25235

SEQ ID NO: 25996 - protein, 978 aa, Escherichia coli O157:H7; identical to SEQ ID NO: 25216

SEQ ID NO: 25997 - protein, 2104 aa, Escherichia coli O157:H7 str. 06-3745; identical to SEQ ID NO: 25311

SEQ ID NO: 25998 - protein, 978 aa, Escherichia coli O157:H7 str. 06-3745; identical to SEQ ID NO: 25216

SEQ ID NO: 25999 - protein, 2104 aa, Escherichia coli O157:H7 str. 06-4039; identical to SEQ ID NO: 25235

SEQ ID NO: 26000 - protein, 978 aa, Escherichia coli O157:H7 str. 06-4039; identical to SEQ ID NO: 25216

SEQ ID NO: 26001 - protein, 2104 aa, Escherichia coli O157:H7 str. 07-3091; identical to SEQ ID NO: 25235

SEQ ID NO: 26002 - protein, 978 aa, Escherichia coli O157:H7 str. 07-3091; identical to SEQ ID NO: 25216

SEQ ID NO: 26003 - protein, 2104 aa, Escherichia coli O157:H7 str. 07-3391; identical to SEQ ID NO: 25407

SEQ ID NO: 26004 - protein, 978 aa, Escherichia coli O157:H7 str. 07-3391; identical to SEQ ID NO: 25216

SEQ ID NO: 26005 - protein, 2104 aa, Escherichia coli O157:H7 str. 08-3037; identical to SEQ ID NO: 25235

SEQ ID NO: 26006 - protein, 978 aa, Escherichia coli O157:H7 str. 08-3037; identical to SEQ ID NO: 25216

SEQ ID NO: 26007 - protein, 2104 aa, Escherichia coli O157:H7 str. 08-3527; identical to SEQ ID NO: 25235

SEQ ID NO: 26008 - protein, 978 aa, Escherichia coli O157:H7 str. 08-3527; identical to SEQ ID NO: 25216

SEQ ID NO: 26009 - protein, 2104 aa, Escherichia coli O157:H7 str. 08-4169; identical to SEQ ID NO: 25235

SEQ ID NO: 26010 - protein, 978 aa, Escherichia coli O157:H7 str. 08-4169; identical to SEQ ID NO: 25216

SEQ ID NO: 26011 - protein, 2104 aa, Escherichia coli O157:H7 str. 08-4529; identical to SEQ ID NO: 25407

SEQ ID NO: 26012 - protein, 978 aa, Escherichia coli O157:H7 str. 08-4529; identical to SEQ ID NO: 25216

SEQ ID NO: 26013 - protein, 2104 aa, Escherichia coli O157:H7 str. 2009EL1449; identical to SEQ ID NO: 25235

SEQ ID NO: 26014 - protein, 978 aa, Escherichia coli O157:H7 str. 2009EL1449; identical to SEQ ID NO: 25216

SEQ ID NO: 26015 - protein, 2104 aa, Escherichia coli O157:H7 str. 2009EL1705; identical to SEQ ID NO: 25235

SEQ ID NO: 26016 - protein, 978 aa, Escherichia coli O157:H7 str. 2009EL1705; identical to SEQ ID NO: 25216

SEQ ID NO: 26017 - protein, 2104 aa, Escherichia coli O157:H7 str. 2009EL1913; identical to SEQ ID NO: 25407

SEQ ID NO: 26018 - protein, 978 aa, Escherichia coli O157:H7 str. 2009EL1913; identical to SEQ ID NO: 25216

SEQ ID NO: 26019 - protein, 2104 aa, Escherichia coli O157:H7 str. 2009EL2109; identical to SEQ ID NO: 25235

SEQ ID NO: 26020 - protein, 978 aa, Escherichia coli O157:H7 str. 2009EL2109; identical to SEQ ID NO: 25216

SEQ ID NO: 26021 - protein, 2104 aa, Escherichia coli O157:H7 str. 2011EL-1107; identical to SEQ ID NO: 25407

SEQ ID NO: 26022 - protein, 978 aa, Escherichia coli O157:H7 str. 2011EL-1107; identical to SEQ ID NO: 25216

SEQ ID NO: 26023 - protein, 2104 aa, Escherichia coli O157:H7 str. 2011EL-2090; identical to SEQ ID NO: 25235

SEQ ID NO: 26024 - protein, 978 aa, Escherichia coli O157:H7 str. 2011EL-2090; identical to SEQ ID NO: 25216

SEQ ID NO: 26025 - protein, 2104 aa, Escherichia coli O157:H7 str. 2011EL-2091; identical to SEQ ID NO: 25235

SEQ ID NO: 26026 - protein, 978 aa, Escherichia coli O157:H7 str. 2011EL-2091; identical to SEQ ID NO: 25216

SEQ ID NO: 26027 - protein, 2104 aa, Escherichia coli O157:H7 str. 2011EL-2092; identical to SEQ ID NO: 25235

SEQ ID NO: 26028 - protein, 978 aa, Escherichia coli O157:H7 str. 2011EL-2092; identical to SEQ ID NO: 25216

SEQ ID NO: 26029 - protein, 2104 aa, Escherichia coli O157:H7 str. 2011EL-2093; identical to SEQ ID NO: 25235

SEQ ID NO: 26030 - protein, 978 aa, Escherichia coli O157:H7 str. 2011EL-2093; identical to SEQ ID NO: 25216

SEQ ID NO: 26031 - protein, 2104 aa, Escherichia coli O157:H7 str. 2011EL-2094; identical to SEQ ID NO: 25235

SEQ ID NO: 26032 - protein, 978 aa, Escherichia coli O157:H7 str. 2011EL-2094; identical to SEQ ID NO: 25216

SEQ ID NO: 26033 - protein, 2104 aa, Escherichia coli O157:H7 str. 2011EL-2096; identical to SEQ ID NO: 25235

SEQ ID NO: 26034 - protein, 978 aa, Escherichia coli O157:H7 str. 2011EL-2096; identical to SEQ ID NO: 25216

SEQ ID NO: 26035 - protein, 2104 aa, Escherichia coli O157:H7 str. 2011EL-2097; identical to SEQ ID NO: 25235

SEQ ID NO: 26036 - protein, 978 aa, Escherichia coli O157:H7 str. 2011EL-2097; identical to SEQ ID NO: 25216

SEQ ID NO: 26037 - protein, 2104 aa, Escherichia coli O157:H7 str. 2011EL-2098; identical to SEQ ID NO: 25235

SEQ ID NO: 26038 - protein, 978 aa, Escherichia coli O157:H7 str. 2011EL-2098; identical to SEQ ID NO: 25216

SEQ ID NO: 26039 - protein, 2104 aa, Escherichia coli O157:H7 str. 2011EL-2099; identical to SEQ ID NO: 25235

SEQ ID NO: 26040 - protein, 978 aa, Escherichia coli O157:H7 str. 2011EL-2099; identical to SEQ ID NO: 25216

SEQ ID NO: 26041 - protein, 2104 aa, Escherichia coli O157:H7 str. 2011EL-2101; identical to SEQ ID NO: 25235

SEQ ID NO: 26042 - protein, 978 aa, Escherichia coli O157:H7 str. 2011EL-2101; identical to SEQ ID NO: 25216

SEQ ID NO: 26043 - protein, 2104 aa, Escherichia coli O157:H7 str. 2011EL-2103; identical to SEQ ID NO: 25235

SEQ ID NO: 26044 - protein, 978 aa, Escherichia coli O157:H7 str. 2011EL-2103; identical to SEQ ID NO: 25216

SEQ ID NO: 26045 - protein, 2104 aa, Escherichia coli O157:H7 str. 2011EL-2104; identical to SEQ ID NO: 25235

SEQ ID NO: 26046 - protein, 978 aa, Escherichia coli O157:H7 str. 2011EL-2104; identical to SEQ ID NO: 25216

SEQ ID NO: 26047 - protein, 2104 aa, Escherichia coli O157:H7 str. 2011EL-2105; identical to SEQ ID NO: 25235

SEQ ID NO: 26048 - protein, 978 aa, Escherichia coli O157:H7 str. 2011EL-2105; identical to SEQ ID NO: 25216

SEQ ID NO: 26049 - protein, 2104 aa, Escherichia coli O157:H7 str. 2011EL-2106; identical to SEQ ID NO: 25235

SEQ ID NO: 26050 - protein, 978 aa, Escherichia coli O157:H7 str. 2011EL-2106; identical to SEQ ID NO: 25216

SEQ ID NO: 26051 - protein, 2104 aa, Escherichia coli O157:H7 str. 2011EL-2107; identical to SEQ ID NO: 25235

SEQ ID NO: 26052 - protein, 978 aa, Escherichia coli O157:H7 str. 2011EL-2107; identical to SEQ ID NO: 25216

SEQ ID NO: 26053 - protein, 2104 aa, Escherichia coli O157:H7 str. 2011EL-2108; identical to SEQ ID NO: 25235

SEQ ID NO: 26054 - protein, 978 aa, Escherichia coli O157:H7 str. 2011EL-2108; identical to SEQ ID NO: 25216

SEQ ID NO: 26055 - protein, 2104 aa, Escherichia coli O157:H7 str. 2011EL-2109; identical to SEQ ID NO: 25235

SEQ ID NO: 26056 - protein, 978 aa, Escherichia coli O157:H7 str. 2011EL-2109; identical to SEQ ID NO: 25216

SEQ ID NO: 26057 - protein, 2104 aa, Escherichia coli O157:H7 str. 2011EL-2111; identical to SEQ ID NO: 25235

SEQ ID NO: 26058 - protein, 978 aa, Escherichia coli O157:H7 str. 2011EL-2111; identical to SEQ ID NO: 25216

SEQ ID NO: 26059 - protein, 2104 aa, Escherichia coli O157:H7 str. 2011EL-2112; identical to SEQ ID NO: 25235

SEQ ID NO: 26060 - protein, 978 aa, Escherichia coli O157:H7 str. 2011EL-2112; identical to SEQ ID NO: 25216

SEQ ID NO: 26061 - protein, 2104 aa, Escherichia coli O157:H7 str. 2011EL-2113; identical to SEQ ID NO: 25235

SEQ ID NO: 26062 - protein, 978 aa, Escherichia coli O157:H7 str. 2011EL-2113; identical to SEQ ID NO: 25216

SEQ ID NO: 26063 - protein, 2104 aa, Escherichia coli O157:H7 str. 2011EL-2114; identical to SEQ ID NO: 25235

SEQ ID NO: 26064 - protein, 978 aa, Escherichia coli O157:H7 str. 2011EL-2114; identical to SEQ ID NO: 25216

SEQ ID NO: 26065 - protein, 2104 aa, Escherichia coli O157:H7 str. 2011EL-2286; identical to SEQ ID NO: 25407

SEQ ID NO: 26066 - protein, 978 aa, Escherichia coli O157:H7 str. 2011EL-2286
MIENESGYLITYFRRIYQALRGQSSQYPAAKIAQELGDTIPVTMQNELVYEIAGEFCETLCRLLSEHPPHSSDPVSALRKLSPDWHLQLPLVLPEANAAEIVRRLLSQSSEIRSASSLQVERIWVDVDDSWYCDARFRFPATMRTEQLTSLFECHIQPEQTRLIISGKWKNGGARLAMLSRYEQQDWRVELLPIAMQKLSGADAMAEISLSLHEGPILLGHTIPKGGYELTEELPWVFEAMNESESQLKLVGMGSVSSRLNALFISLPKNSHLDISGEGEFDIPRLLKNSERSLTKISGVFSVVLHDGAVCTIRTQQLYDSAIEYYIKSTEVELVKSDYPVHRAWPKIGWKKDLQYGIVPEKELFWRSIRSGNNAWYSVASEMPKGQIEVRRIVNDEVLFSGKVVVLPADFDINIIPESAQQGIIMLSGITDTRIDKYSNNEKVTLKSDYSQNECAIYYNSSLMLENTVDLRVSWKDGSNLKLLLPKPVSGGRFVTNDGSVHFDGVASIAHLHGIDAELLTISCAGRGYLNIELLDENPVAEKFRYLHADLPLLSGRNDKLQQISLYENYNLLNAMLACAWNSNSTLCVDFYSDRFGKDKATLNIKRYDGSFIEHDQGLLVDMKNSVVFPANRIDELVVDAISLKNPGLHISLLKKDEFAYDLSALNVQDSPWLIVGKLDGTARIAPVIKWMLPVLQTNDLLLNALCEADPEQRKKNFNELIFEIDNNPLQNYCCLLTEYIKKYKMNNGLSLLDLDLFRGISSNYRVVVQLLISSCLSGDSDTIYDIQEELPFSWGWIPVSIWKDVFQKCWTYLEKQINDKTLALHILQPFIAFMNHRAHIDRRLAPIANMLLTYSESLPTGCDVLPTVSREQFNEAKQMLLRNPDSFGRISIFPKELWSSAITPELKSVFNKLWIEDKYHSRLEKRFNLMLVAALLTQKDNNLIHQLSALFEFHYQQAPQQLGVIYQYYFEQAGVCH

SEQ ID NO: 26067 - protein, 2104 aa, Escherichia coli O157:H7 str. 2011EL-2287; identical to SEQ ID NO: 25407

SEQ ID NO: 26068 - protein, 978 aa, Escherichia coli O157:H7 str. 2011EL-2287; identical to SEQ ID NO: 25216

SEQ ID NO: 26069 - protein, 2104 aa, Escherichia coli O157:H7 str. 2011EL-2288; identical to SEQ ID NO: 25407

SEQ ID NO: 26070 - protein, 978 aa, Escherichia coli O157:H7 str. 2011EL-2288; identical to SEQ ID NO: 25216

SEQ ID NO: 26071 - protein, 2104 aa, Escherichia coli O157:H7 str. 2011EL-2289
MDVQQLHYAPLLNQLHQRAVRSVVSQLALRSKSLTHYLESQYFQPPGQEGSLLADPVFESTFGWMPADETMEDLRDKLISSPLVDALSKAPVPFRHQLTAWRTILEDKKSLLVSSGTGSGKTECFMVPVLEDLIRQQKSTRQSLTGTQAIFLYPLNALINSQQERLREWTRGFKGKIRFALYNGETRHTKYEIQEDQLKVPEQALSREAIYEEPPSIMVTNTTMLEYMLIRRKDAPIIEKSQGMLKYIVLDEAHSYIGSQAAELALLLRRVMQAFNVGPGTDKPVQIIATSATIGEDSPEGNKELAKFVADLAGVTERDVKVVRGYRQIPRVSESLIRHEYPTSLTSLKSLSPQDLYQQLCHYRVAQQLRQALTHPGRQAVRLSELLNVVRRTWPDINHRELLQLLDLMARSREGELAFTPLRMHGFIRTLAGLWACSNKQCSHKAHELNQSDWPFGQVWFEQRQYCDCGAPVFEVLRCSGCGSAYLSAKEEMRGDGTNWLVAQPATAEVDEFALDVDVYSEDEDNDELDNNSQFDRLIASDGEKYIISLEETTAGKIDSEAQKHYEINLLRPESRGEGRNNSFACVCCGDTQRKNNPLFRPLRLGAPFFLNEIIPTLLEFSPLPQTREEQLGPFNGRRLLTFTDSRQGTARISARLQQDADKATLRALCYQELANITEPSAKLSPAHCALLEKVISQFSVLPLKNSIDALKKAMAANEELSPTDIQALKIIEPMVSSLSTEHAEAMQILQANSGNQQKKTMSWQTLSEQLVGSVDLADRMRGSFKELSGLDLTKQQFADFCLYSEFGRRPKNAWTLESLGLVAIHYPFIDKVTTCPQDWKTLLPDPDKQLAEWRNLLKITLDFFIRENSAVFYENEQYPRWMGARFPVKMLQGPDKKNKGQKRDQLWPQIRDRHYNRVIKLLIAVFPAIQPEQAHWKSLVNHLMIEVWDAIRPCLRQFESGYQLDIKQQAEFYSPKQVWRCPYTRRALDVTLLGYSPYLPGSKEIAPEKAVLIEMPELPVRHWRLSGGGEIAREERLEWLESNALIQHAREEGLWSTRSDRLALKDSWYRLEEHSAQRTPEQNQFNEKQFKSGKVNVLNCSTTMEMGVDIGGMSLVAMNNVPPAPANYLQRAGRAGRRGESASAAITLCKNTAHGMEVFKDPLWAFNTTASAPRVRFGSSSIVQRHVNALVLGLFLRAEVPDATKLSCKWFFEGDESQCLRFLHWLNHQADQLADKLKRLTQGTVLMSLTATQLLTRTQAMMQQVDIRWRSQLAILLENIEALKADNSAWEETPAGKAIAYQLRDYRGAYLFSKLISEAFLPGHGFPVGVVNFNYLTADELEKRRAIKATQADPNEGGESFSRRIEKLPSRDLPTALREYAPGADVVLGGKVYRSSGIMLGKVLASGQELSGDHHIPWFWHCRKCGAGATSTTHPVECSHCKADIQQLDVKRYLQPVGFATDIRYQAHNDVSMPAQLPWKDPRVLVPSSVWVSLPDAGLGRYRFSHSGELFHFSEGEFGHGYAICLSCGRAESQTQPQRTPENLKNPERENTHYLLRGGSNDRQGSNKLCHGHVHKDLWLGYSSRTDMVELQLNDDNGLLIRDEVAARSLAVALREGLAHKLGIENTELGVTTQQARDINGYTGYSIFIYDNNAGGAGYAVQLIDHWADVFNYARKLLDCSCDKFCHHCLLSYDSQHYVNRLDRHHALTLLTNVRLQRLNLAPEYQYFGDGSRVETNPLSLRIAQCLNSEIYDSCSLVLAGPQEQWDFAQWPLFKELLQFASSGGNVELLVATPLANLTDSSRHQLSALAAMPGGRLQVKSIATAQLMQGKGRWLAQVTREGQSQQWAADDSATVAPGELWGQSASSPVVTLKGTSGKTFSGQTLSAEDLLPALPTGAVRINLCEQLDGPLEGFGSRFWSLVTQQHAGWKQAFTRHKEITHVEYSDRYLNSPFTARLLGEILTELVEQGMAERASLTVCVKKLDYNSRQHDALYNAWLNEEDRQQVVTTLLEEGYLGPAWPGAISWLTGDNQSTEHGRELTVTFSDGSQHYVLLDMGLSYWRCIEDTFFDFALRVPQQVERLANTRARAVAPGNDLRSYIIAG

SEQ ID NO: 26072 - protein, 978 aa, Escherichia coli O157:H7 str. 2011EL-2289; identical to SEQ ID NO: 25216

SEQ ID NO: 26073 - protein, 2104 aa, Escherichia coli O157:H7 str. 2011EL-2290; identical to SEQ ID NO: 25407

SEQ ID NO: 26074 - protein, 978 aa, Escherichia coli O157:H7 str. 2011EL-2290; identical to SEQ ID NO: 25216

SEQ ID NO: 26075 - protein, 2104 aa, Escherichia coli O157:H7 str. 2011EL-2312; identical to SEQ ID NO: 25311

SEQ ID NO: 26076 - protein, 978 aa, Escherichia coli O157:H7 str. 2011EL-2312; identical to SEQ ID NO: 25216

SEQ ID NO: 26077 - protein, 2104 aa, Escherichia coli O157:H7 str. 2011EL-2313; identical to SEQ ID NO: 25311

SEQ ID NO: 26078 - protein, 978 aa, Escherichia coli O157:H7 str. 2011EL-2313; identical to SEQ ID NO: 25216

SEQ ID NO: 26079 - protein, 2104 aa, Escherichia coli O157:H7 str. EC4042; identical to SEQ ID NO: 25407

SEQ ID NO: 26080 - protein, 978 aa, Escherichia coli O157:H7 str. EC4042; identical to SEQ ID NO: 25216

SEQ ID NO: 26081 - protein, 2104 aa, Escherichia coli O157:H7 str. EC4045; identical to SEQ ID NO: 25407

SEQ ID NO: 26082 - protein, 978 aa, Escherichia coli O157:H7 str. EC4045; identical to SEQ ID NO: 25216

SEQ ID NO: 26083 - protein, 2104 aa, Escherichia coli O157:H7 str. EC4076; identical to SEQ ID NO: 25407

SEQ ID NO: 26084 - protein, 978 aa, Escherichia coli O157:H7 str. EC4076; identical to SEQ ID NO: 25216

SEQ ID NO: 26085 - protein, 2104 aa, Escherichia coli O157:H7 str. EC4113; identical to SEQ ID NO: 25407

SEQ ID NO: 26086 - protein, 978 aa, Escherichia coli O157:H7 str. EC4113; identical to SEQ ID NO: 25216

SEQ ID NO: 26087 - protein, 2104 aa, Escherichia coli O157:H7 str. EC4115; identical to SEQ ID NO: 25407

SEQ ID NO: 26088 - protein, 978 aa, Escherichia coli O157:H7 str. EC4115; identical to SEQ ID NO: 25216

SEQ ID NO: 26089 - protein, 2104 aa, Escherichia coli O157:H7 str. EC4196; identical to SEQ ID NO: 25407

SEQ ID NO: 26090 - protein, 978 aa, Escherichia coli O157:H7 str. EC4196; identical to SEQ ID NO: 25216

SEQ ID NO: 26091 - protein, 2104 aa, Escherichia coli O157:H7 str. EC4206; identical to SEQ ID NO: 25407

SEQ ID NO: 26092 - protein, 978 aa, Escherichia coli O157:H7 str. EC4206; identical to SEQ ID NO: 25216

SEQ ID NO: 26093 - protein, 2104 aa, Escherichia coli O157:H7 str. EC4401; identical to SEQ ID NO: 25407

SEQ ID NO: 26094 - protein, 978 aa, Escherichia coli O157:H7 str. EC4401; identical to SEQ ID NO: 25216

SEQ ID NO: 26095 - protein, 2104 aa, Escherichia coli O157:H7 str. EC4486; identical to SEQ ID NO: 25407

SEQ ID NO: 26096 - protein, 978 aa, Escherichia coli O157:H7 str. EC4486; identical to SEQ ID NO: 25216

SEQ ID NO: 26097 - protein, 2104 aa, Escherichia coli O157:H7 str. EC4501; identical to SEQ ID NO: 25235

SEQ ID NO: 26098 - protein, 978 aa, Escherichia coli O157:H7 str. EC4501; identical to SEQ ID NO: 25216

SEQ ID NO: 26099 - protein, 2104 aa, Escherichia coli O157:H7 str. EC508; identical to SEQ ID NO: 25311

SEQ ID NO: 26100 - protein, 978 aa, Escherichia coli O157:H7 str. EC508; identical to SEQ ID NO: 25216

SEQ ID NO: 26101 - protein, 2104 aa, Escherichia coli O157:H7 str. EDL933; identical to SEQ ID NO: 25235

SEQ ID NO: 26102 - protein, 1117 aa, Escherichia coli O157:H7 str. EDL933; identical to SEQ ID NO: 25564

SEQ ID NO: 26103 - protein, 2104 aa, Escherichia coli O157:H7 str. EDL933; identical to SEQ ID NO: 25235

SEQ ID NO: 26104 - protein, 978 aa, Escherichia coli O157:H7 str. EDL933; identical to SEQ ID NO: 25216

SEQ ID NO: 26105 - protein, 2104 aa, Escherichia coli O157:H7 str. F6142; identical to SEQ ID NO: 25311

SEQ ID NO: 26106 - protein, 978 aa, Escherichia coli O157:H7 str. F6142; identical to SEQ ID NO: 25216

SEQ ID NO: 26107 - protein, 2104 aa, Escherichia coli O157:H7 str. F6749; identical to SEQ ID NO: 25235

SEQ ID NO: 26108 - protein, 978 aa, Escherichia coli O157:H7 str. F6749; identical to SEQ ID NO: 25216

SEQ ID NO: 26109 - protein, 2104 aa, Escherichia coli O157:H7 str. F6750; identical to SEQ ID NO: 25235

SEQ ID NO: 26110 - protein, 978 aa, Escherichia coli O157:H7 str. F6750; identical to SEQ ID NO: 25216

SEQ ID NO: 26111 - protein, 2104 aa, Escherichia coli O157:H7 str. F6751; identical to SEQ ID NO: 25235

SEQ ID NO: 26112 - protein, 978 aa, Escherichia coli O157:H7 str. F6751; identical to SEQ ID NO: 25216

SEQ ID NO: 26113 - protein, 2104 aa, Escherichia coli O157:H7 str. F7350; identical to SEQ ID NO: 25235

SEQ ID NO: 26114 - protein, 978 aa, Escherichia coli O157:H7 str. F7350; identical to SEQ ID NO: 25216

SEQ ID NO: 26115 - protein, 2104 aa, Escherichia coli O157:H7 str. F7377; identical to SEQ ID NO: 25235

SEQ ID NO: 26116 - protein, 978 aa, Escherichia coli O157:H7 str. F7377; identical to SEQ ID NO: 25216

SEQ ID NO: 26117 - protein, 2104 aa, Escherichia coli O157:H7 str. F7384; identical to SEQ ID NO: 25407

SEQ ID NO: 26118 - protein, 978 aa, Escherichia coli O157:H7 str. F7384; identical to SEQ ID NO: 25216

SEQ ID NO: 26119 - protein, 2104 aa, Escherichia coli O157:H7 str. F7410; identical to SEQ ID NO: 25407

SEQ ID NO: 26120 - protein, 978 aa, Escherichia coli O157:H7 str. F7410; identical to SEQ ID NO: 25216

SEQ ID NO: 26121 - protein, 2104 aa, Escherichia coli O157:H7 str. G5101; identical to SEQ ID NO: 25235

SEQ ID NO: 26122 - protein, 978 aa, Escherichia coli O157:H7 str. G5101; identical to SEQ ID NO: 25216

SEQ ID NO: 26123 - protein, 2104 aa, Escherichia coli O157:H7 str. G5303; identical to SEQ ID NO: 25235

SEQ ID NO: 26124 - protein, 978 aa, Escherichia coli O157:H7 str. G5303; identical to SEQ ID NO: 25216

SEQ ID NO: 26125 - protein, 2104 aa, Escherichia coli O157:H7 str. H2495; identical to SEQ ID NO: 25235

SEQ ID NO: 26126 - protein, 978 aa, Escherichia coli O157:H7 str. H2495; identical to SEQ ID NO: 25216

SEQ ID NO: 26127 - protein, 2104 aa, Escherichia coli O157:H7 str. H2498; identical to SEQ ID NO: 25235

SEQ ID NO: 26128 - protein, 978 aa, Escherichia coli O157:H7 str. H2498; identical to SEQ ID NO: 25216

SEQ ID NO: 26129 - protein, 2104 aa, Escherichia coli O157:H7 str. K1420; identical to SEQ ID NO: 25311

SEQ ID NO: 26130 - protein, 978 aa, Escherichia coli O157:H7 str. K1420; identical to SEQ ID NO: 25216

SEQ ID NO: 26131 - protein, 2104 aa, Escherichia coli O157:H7 str. K1792; identical to SEQ ID NO: 25235

SEQ ID NO: 26132 - protein, 488 aa, Escherichia coli O157:H7 str. K1792
GGRFVTNDGSVHFDGVASIAHLHGIDAELLTISCAGRGYLNIELLDENPVAEKFRYLHADLPLLSGRNDKLQQISLYENYNLLNAMLACAWNSNSTLCVDFYSDRFGKDKATLNIKRYDGSFIEHDQGLLVDIKNSVVFPANRIDELVVDAISLKNPGLHISLLKKDEFAYDLSALNVQDSPWLIVGKLDGTARIAPVIKWMLPVLQTNDLLLNALCEADPEQRKKNFNELIFEIDNNPLQNYCCLLTEYIKKYKMNNGLSLLDLDLFRGISSNYRVVVQLLISSCLSGDSDTIYDIQEELPFSWGWIPVSIWKDVFQKCWTYLEKQINDKTLALHILQPFIAFMNHRAHIDRRLAPIANMLLTYSESLPTGCDVLPTVSREQFNEAKQMLLRNPDSFGRISIFPKELWSSAITPELKSVFNKLWIEDKYHSRLEKRFNLMLVAALLTQKDNNLIHQLSALFEFHYQQAPQQLGVIYQYYFEQAGVCH

SEQ ID NO: 26133 - protein, 2104 aa, Escherichia coli O157:H7 str. K1793; identical to SEQ ID NO: 25235

SEQ ID NO: 26134 - protein, 714 aa, Escherichia coli O157:H7 str. K1793
ISLPKNSHLDISGEGEFDIPRLLKNSERSLTKISGVFSVVLHDGAVCTIRTQQLYDSAIEYYIKSTEVELVKSDYPVHRAWPKIGWKKDLQYGIVPEKELFWRSIRSGNNAWYSVASEMPKGQIEVRRIVNDEVLFSGKVVVLPADFDINIIPESAQQGIIMLSGITDTRIDKYSNNEKVTLKSDYSQNECAIYYNSSLMLENTVDLRVSWKDGSNLKLLLPKPVSGGRFVTNDGSVHFDGVASIAHLHGIDAELLTISCAGRGYLNIELLDENPVAEKFRYLHADLPLLSGRNDKLQQISLYENYNLLNAMLACAWNSNSTLCVDFYSDRFGKDKATLNIKRYDGSFIEHDQGLLVDIKNSVVFPANRIDELVVDAISLKNPGLHISLLKKDEFAYDLSALNVQDSPWLIVGKLDGTARIAPVIKWMLPVLQTNDLLLNALCEADPEQRKKNFNELIFEIDNNPLQNYCCLLTEYIKKYKMNNGLSLLDLDLFRGISSNYRVVVQLLISSCLSGDSDTIYDIQEELPFSWGWIPVSIWKDVFQKCWTYLEKQINDKTLALHILQPFIAFMNHRAHIDRRLAPIANMLLTYSESLPTGCDVLPTVSREQFNEAKQMLLRNPDSFGRISIFPKELWSSAITPELKSVFNKLWIEDKYHSRLEKRFNLMLVAALLTQKDNNLIHQLSALFEFHYQQAPQQLGVIYQYYFEQAGVCH

SEQ ID NO: 26135 - protein, 2104 aa, Escherichia coli O157:H7 str. K1796; identical to SEQ ID NO: 25235

SEQ ID NO: 26136 - protein, 978 aa, Escherichia coli O157:H7 str. K1796; identical to SEQ ID NO: 25216

SEQ ID NO: 26137 - protein, 2104 aa, Escherichia coli O157:H7 str. K1845; identical to SEQ ID NO: 25235

SEQ ID NO: 26138 - protein, 978 aa, Escherichia coli O157:H7 str. K1845; identical to SEQ ID NO: 25216

SEQ ID NO: 26139 - protein, 2104 aa, Escherichia coli O157:H7 str. K1921; identical to SEQ ID NO: 25311

SEQ ID NO: 26140 - protein, 978 aa, Escherichia coli O157:H7 str. K1921; identical to SEQ ID NO: 25216

SEQ ID NO: 26141 - protein, 2104 aa, Escherichia coli O157:H7 str. K1927; identical to SEQ ID NO: 25311

SEQ ID NO: 26142 - protein, 978 aa, Escherichia coli O157:H7 str. K1927; identical to SEQ ID NO: 25216

SEQ ID NO: 26143 - protein, 2104 aa, Escherichia coli O157:H7 str. K2188; identical to SEQ ID NO: 25235

SEQ ID NO: 26144 - protein, 978 aa, Escherichia coli O157:H7 str. K2188; identical to SEQ ID NO: 25216

SEQ ID NO: 26145 - protein, 2104 aa, Escherichia coli O157:H7 str. K2324; identical to SEQ ID NO: 25235

SEQ ID NO: 26146 - protein, 978 aa, Escherichia coli O157:H7 str. K2324; identical to SEQ ID NO: 25216

SEQ ID NO: 26147 - protein, 2104 aa, Escherichia coli O157:H7 str. K2581; identical to SEQ ID NO: 25235

SEQ ID NO: 26148 - protein, 596 aa, Escherichia coli O157:H7 str. K2581
MPKGQIEVRRIVNDEVLFSGKVVVLPADFDINIIPESAQQGIIMLSGITDTRIDKYSNNEKVTLKSDYSQNECAIYYNSSLMLENTVDLRVSWKDGSNLKLLLPKPVSGGRFVTNDGSVHFDGVASIAHLHGIDAELLTISCAGRGYLNIELLDENPVAEKFRYLHADLPLLSGRNDKLQQISLYENYNLLNAMLACAWNSNSTLCVDFYSDRFGKDKATLNIKRYDGSFIEHDQGLLVDIKNSVVFPANRIDELVVDAISLKNPGLHISLLKKDEFAYDLSALNVQDSPWLIVGKLDGTARIAPVIKWMLPVLQTNDLLLNALCEADPEQRKKNFNELIFEIDNNPLQNYCCLLTEYIKKYKMNNGLSLLDLDLFRGISSNYRVVVQLLISSCLSGDSDTIYDIQEELPFSWGWIPVSIWKDVFQKCWTYLEKQINDKTLALHILQPFIAFMNHRAHIDRRLAPIANMLLTYSESLPTGCDVLPTVSREQFNEAKQMLLRNPDSFGRISIFPKELWSSAITPELKSVFNKLWIEDKYHSRLEKRFNLMLVAALLTQKDNNLIHQLSALFEFHYQQAPQQLGVIYQYYFEQAGVCH

SEQ ID NO: 26149 - protein, 2104 aa, Escherichia coli O157:H7 str. K4396; identical to SEQ ID NO: 25235

SEQ ID NO: 26150 - protein, 978 aa, Escherichia coli O157:H7 str. K4396; identical to SEQ ID NO: 25216

SEQ ID NO: 26151 - protein, 2104 aa, Escherichia coli O157:H7 str. K4405; identical to SEQ ID NO: 25407

SEQ ID NO: 26152 - protein, 978 aa, Escherichia coli O157:H7 str. K4405; identical to SEQ ID NO: 25216

SEQ ID NO: 26153 - protein, 2104 aa, Escherichia coli O157:H7 str. K4406; identical to SEQ ID NO: 25407

SEQ ID NO: 26154 - protein, 978 aa, Escherichia coli O157:H7 str. K4406; identical to SEQ ID NO: 25216

SEQ ID NO: 26155 - protein, 2104 aa, Escherichia coli O157:H7 str. K4527; identical to SEQ ID NO: 25407

SEQ ID NO: 26156 - protein, 978 aa, Escherichia coli O157:H7 str. K4527; identical to SEQ ID NO: 25216

SEQ ID NO: 26157 - protein, 2104 aa, Escherichia coli O157:H7 str. K5418; identical to SEQ ID NO: 25407

SEQ ID NO: 26158 - protein, 978 aa, Escherichia coli O157:H7 str. K5418; identical to SEQ ID NO: 25216

SEQ ID NO: 26159 - protein, 2104 aa, Escherichia coli O157:H7 str. K5448; identical to SEQ ID NO: 25235

SEQ ID NO: 26160 - protein, 978 aa, Escherichia coli O157:H7 str. K5448; identical to SEQ ID NO: 25216

SEQ ID NO: 26161 - protein, 2104 aa, Escherichia coli O157:H7 str. K5449; identical to SEQ ID NO: 25235

SEQ ID NO: 26162 - protein, 978 aa, Escherichia coli O157:H7 str. K5449; identical to SEQ ID NO: 25216

SEQ ID NO: 26163 - protein, 2104 aa, Escherichia coli O157:H7 str. K5453; identical to SEQ ID NO: 25235

SEQ ID NO: 26164 - protein, 978 aa, Escherichia coli O157:H7 str. K5453; identical to SEQ ID NO: 25216

SEQ ID NO: 26165 - protein, 2104 aa, Escherichia coli O157:H7 str. K5460; identical to SEQ ID NO: 25235

SEQ ID NO: 26166 - protein, 978 aa, Escherichia coli O157:H7 str. K5460; identical to SEQ ID NO: 25216

SEQ ID NO: 26167 - protein, 2104 aa, Escherichia coli O157:H7 str. K5467; identical to SEQ ID NO: 25235

SEQ ID NO: 26168 - protein, 978 aa, Escherichia coli O157:H7 str. K5467; identical to SEQ ID NO: 25216

SEQ ID NO: 26169 - protein, 2104 aa, Escherichia coli O157:H7 str. K5602; identical to SEQ ID NO: 25235

SEQ ID NO: 26170 - protein, 978 aa, Escherichia coli O157:H7 str. K5602; identical to SEQ ID NO: 25216

SEQ ID NO: 26171 - protein, 2104 aa, Escherichia coli O157:H7 str. K5607; identical to SEQ ID NO: 25235

SEQ ID NO: 26172 - protein, 978 aa, Escherichia coli O157:H7 str. K5607; identical to SEQ ID NO: 25216

SEQ ID NO: 26173 - protein, 2104 aa, Escherichia coli O157:H7 str. K5609; identical to SEQ ID NO: 25235

SEQ ID NO: 26174 - protein, 978 aa, Escherichia coli O157:H7 str. K5609; identical to SEQ ID NO: 25216

SEQ ID NO: 26175 - protein, 2104 aa, Escherichia coli O157:H7 str. K5806; identical to SEQ ID NO: 25235

SEQ ID NO: 26176 - protein, 978 aa, Escherichia coli O157:H7 str. K5806; identical to SEQ ID NO: 25216

SEQ ID NO: 26177 - protein, 2104 aa, Escherichia coli O157:H7 str. K5852; identical to SEQ ID NO: 25235

SEQ ID NO: 26178 - protein, 978 aa, Escherichia coli O157:H7 str. K5852; identical to SEQ ID NO: 25216

SEQ ID NO: 26179 - protein, 2104 aa, Escherichia coli O157:H7 str. K6590; identical to SEQ ID NO: 25235

SEQ ID NO: 26180 - protein, 978 aa, Escherichia coli O157:H7 str. K6590; identical to SEQ ID NO: 25216

SEQ ID NO: 26181 - protein, 2104 aa, Escherichia coli O157:H7 str. K6676; identical to SEQ ID NO: 25407

SEQ ID NO: 26182 - protein, 978 aa, Escherichia coli O157:H7 str. K6676; identical to SEQ ID NO: 25216

SEQ ID NO: 26183 - protein, 2104 aa, Escherichia coli O157:H7 str. K6687; identical to SEQ ID NO: 25407

SEQ ID NO: 26184 - protein, 978 aa, Escherichia coli O157:H7 str. K6687; identical to SEQ ID NO: 25216

SEQ ID NO: 26185 - protein, 2104 aa, Escherichia coli O157:H7 str. K7140
MDVQQLHYAPLLNQLHQRAVRSVVSQLALRSKSLTHYLESQYFQPPGQEGSLLADPVFESTFGWMPADETMEDLRDKLISSPLVDALSKAPVPFRHQLTAWRTILEDKKSLLVSSGTGSGKTECFMVPVLEDLIRQQKSTRQSLTGTQAIFLYPLNALINSQQERLREWTRGFKGKIRFALYNGETRHTKYEIQEDQLKVPEQALSREAIYEAPPSIMVTNTTMLEYMLIRRKDAPIIEKSQGMLKYIVLDEAHSYIGSQAAELALLLRRVMQAFNVGPGTDKPVQIIATSATIGEDSPEGNKELAKFVADLAGVTERDVKVVRGYRQIPRVSESLIRHEYPTSLTSLKSLSPQDLYQQLCHYRVAQQLRQALTHPGRQAVRLSELLNVARRTWPDINHRELLQLLDLMARSREGELAFTPLRMHGFIRTLAGLWACSNKQCSHKAHELNQSDWPFGQVWFEQRQYCDCGAPVFEVLRCSGCGSAYLSAKEEMRGDGTNWLVAQPAAAEVDEFALDVDVYSEDEDNDELDNNSQFDRLIASDGEKYIISLEETTAGKIDSEAQKHYEINLLRPESRGEGRNNSFACVCCGDTQRKNNPLFRPLRLGAPFFLNEIIPTLLEFSPLPQTREEQLGPFNGRRLLTFTDSRQGTARISARLQQDADKATLRALCYQELANITEPSAKLSPAHCALLEKVISQFSVLPLKNSIDALKKAMAANEELSPTDIQALKIIEPMVSSLSTEHAEAMQILQANSGNQQKKTMSWQTLSEQLVGSVDLADRMRGSFKELSGLDLTKQQFADFCLYSEFGRRPKNAWTLESLGLVAIHYPFIDKVTTCPQDWKTLLPDPDKQLAEWRNLLKITLDFFIRENSAVFYENEQYPRWMGARFPVKMLQGPDKKNKGQKRDQLWPQIRDRHYNRVIKLLIAVFPAIQPEQAHWKSLVNHLMIEVWDAIRPCLRQFESGYQLDIKQQAEFYSPKQVWRCPYTRRALDVTLLGYSPYLPGSKEIAPEKAVLIEMPELPVRHWRLSGGGEIAREERLEWLESNALIQHAREEGLWSTRSDRLALKDSWYRLEEHSAQRTPEQNQFNEKQFKSGKVNVLNCSTTMEMGVDIGGMSLVAMNNVPPAPANYLQRAGRAGRRGESASAAITLCKNTAHGMEVFKDPLWAFNTTASAPRVRFGSSSIVQRHVNALVLGLFLRAEVPDATKLSCKWFFEGDESQCLRFLHWLNHQADQLADKLKRLTQGTVLMSLTATQLLTRTQAMMQQVDIRWRSQLAILLENIEALKADNSAWEETPAGKAIAYQLRDYRGAYLFSKLISEAFLPGHGFPVGVVNFNYLTADELEKRRAIKATQADPNEGGESFSRRIEKLPSRDLPTALREYAPGADVVLGGKVYRSSGIMLGKVLASGQELSGDHHIPWFWHCRKCGAGATSTTHPVECSHCKADIQQLDVKRYLQPVGFATDIRYQAHNDVSMPAQLPWKDPRVLVPSSVWVSLPDAGLGRYRFSHSGELFHFSEGEFGHGYAICLSCGRAESQTQPQRTPENLKNPERENTHYLLRGGSNDRQGSNKLCHGHVHKDLWLGYSSRTDMVELQLNDDNGLLIRDEVAARSLAVALREGLAHKLGIENTELGVTTQQARDINGYTGYSIFIYDNNAGGAGYAVQLIDHWADVFNYARKLLDCSCDKFCHHCLLSYDSQHYVNRLDRHHALTLLTNVRLQRLNLAPEYQYFGDGSRVETNPLSLRIAQCLNSEIYDSCSLVLAGPQEQWDFAQWPLFKELLQFASSGGNVELLVATPLANLTDSSRHQLSALAAMPGGRLQVKSIATAQLMQGKGRWLAQVTREGQSQQWAADDSATVAPGELWGQSASSPVVTLKGTSGKTFSGQTLSAEDLLPALPTGAVRINLCEQLDGPLEGFGSRFWSLVTQQHAGWKQAFTRHKEITHVEYSDRYLNSPFTARLLGEILTELVEQGMAERASLTVCVKKLDYNSRQYDALYNAWLNEEDRQQVVTTLLEEGYLGPAWPGAISWLTGDNQSTEHGRELTVTFSDGSQHYVLLDMGLSYWRCIEDTFFDFALRVPQQVERLANTRARAVAPGNDLRSYIIAG

SEQ ID NO: 26186 - protein, 978 aa, Escherichia coli O157:H7 str. K7140; identical to SEQ ID NO: 25216

SEQ ID NO: 26187 - protein, 2104 aa, Escherichia coli O157:H7 str. Sakai; identical to SEQ ID NO: 25235

SEQ ID NO: 26188 - protein, 1117 aa, Escherichia coli O157:H7 str. Sakai; identical to SEQ ID NO: 25564

SEQ ID NO: 26189 - protein, 2104 aa, Escherichia coli O157:H7 str. SS17; identical to SEQ ID NO: 25407

SEQ ID NO: 26190 - protein, 1117 aa, Escherichia coli O157:H7 str. SS17; identical to SEQ ID NO: 25564

SEQ ID NO: 26191 - protein, 2104 aa, Escherichia coli O157:H7 str. SS52; identical to SEQ ID NO: 25407

SEQ ID NO: 26192 - protein, 1117 aa, Escherichia coli O157:H7 str. SS52; identical to SEQ ID NO: 25564

SEQ ID NO: 26193 - protein, 2104 aa, Escherichia coli O157:H7 str. TW14359; identical to SEQ ID NO: 25407

SEQ ID NO: 26194 - protein, 1117 aa, Escherichia coli O157:H7 str. TW14359; identical to SEQ ID NO: 25564

SEQ ID NO: 26195 - protein, 2104 aa, Escherichia coli O157:H7 str. TW14588; identical to SEQ ID NO: 25235

SEQ ID NO: 26196 - protein, 978 aa, Escherichia coli O157:H7 str. TW14588; identical to SEQ ID NO: 25216

SEQ ID NO: 26197 - protein, 2104 aa, Escherichia coli O55:H7 str. 06-3555; identical to SEQ ID NO: 25699

SEQ ID NO: 26198 - protein, 978 aa, Escherichia coli O55:H7 str. 06-3555; identical to SEQ ID NO: 25216

SEQ ID NO: 26199 - protein, 2104 aa, Escherichia coli O55:H7 str. 3256-97; identical to SEQ ID NO: 25235

SEQ ID NO: 26200 - protein, 280 aa, Escherichia coli O55:H7 str. 3256-97
NDLLLNALCEADPEQRKKNFNELIFEIDNNPLQNYCCLLTEYIKKYKMNNGLSLLDLDLFRGISSNYRVVVQLLISSCLSGDSDTIYDIQEELPFSWGWIPVSIWKDVFQKCWTYLEKQINDKTLALHILQPFIAFMNHRAHIDRRLAPIANMLLTYSESLPTGCDVLPTVSREQFNEAKQMLLRNPDSFGRISIFPKELWSSAITPELKSVFNKLWIEDKYHSRLEKRFNLMLVAALLTQKDNNLIHQLSALFEFHYQQAPQQLGVIYQYYFEQAGVCH

SEQ ID NO: 26201 - protein, 2104 aa, Escherichia coli O55:H7 str. CB9615; identical to SEQ ID NO: 25699

SEQ ID NO: 26202 - protein, 1119 aa, Escherichia coli O55:H7 str. CB9615; identical to SEQ ID NO: 25584

SEQ ID NO: 26203 - protein, 2114 aa, Escherichia coli P02997067.6; identical to SEQ ID NO: 25217

SEQ ID NO: 26204 - protein, 1096 aa, Escherichia coli P02997067.6
MGQSEYISWVKCTSWLSNFVNLRGLRQPDGRPLYEYHATNAEYNQLTQLLCAVGQSQSNICNRDFAACFVLFCSEWYRRDYERQCGWTWDPIYKKIGISFTATELGTIVPKGMEDYWLRPIRFYESERRNFLGTLFSEGGLPFRLLKESDSRFLAVFSRILGQYEQAKQSGFSALSLARAVIEKSALPTVFSEDTSVELISHMADNLNSLVLTHNLTNHKEPVQQLDKVHPTWRSEFPIPLDDETGTHFLNGLLCAASVEAKPRLQKNKSTRCQFYWSEKHPDELRVIVSLPDEVSFPVTSEPSTTRFELAIYEDGEEVSGLGPAYASLENRQATVRLRKSEVRFVRQNPSAGLSLVAPAGGRIVGGIKLDDSEIAIGEVPLTFIVDADQWLLQGQASCSVRSSDVLIVLPRDNSTVAGFDGQSSAVNVLGLKALPVKGCQDVTVTANETYRIRTGREQISIGRFALNGKRASWVCHPDETFIGVPKVISTLPDIQSIDVTRYLSGISIEQCHIQEMLGAQYLSIRNSNNETLLRRKIGILPADFSIEIKGGMHANEGTIVITTQHPCVATLKDKTLEATRKRTEGRTEIQLKAEGGPPAFITLQVLPNLAADTIDIELPFPAKGCLALDVNGRPLDKNITLHDLLGSRAFLFSRNGEPTKYTLQLHLRSISGLQAWHEWSYTALSERPVELNLYSLREHIENLISLEAGIDQVVEMRITGAGVVMAWQIRRYKYSLRYDYEKELLLSQSVNHRAGQIPSPVIMLLSEPERKSIPLASRMSEGVPVGEYELSSIVNKNGPWLVVPKPGEEMAFRPCFIRGESSLPVEESNIRSLQKATQLFNPQAEVNTITRVLGQMANDPAHSGWQFMRSLYDQFGYLPLATFEVWRALVQHPQALAMSLFKFEMSAEYLSRIENEFPILWEFFPIFEIKAASERFKLFLSQKGAPEETQKLLVTNMFQRLGLVFPTYADEIEKWLSNGYLPPSIPESCVHGWYQELLREHSEARWPEYGCKRLYKWMMSQKNPVIGINPDANHRYSVAWLPVFAAAVASGNASFESVFDRKPGAVFFLRQVRDFDSRWFKAIFQFSLLRYVAKK

SEQ ID NO: 26205 - protein, 2114 aa, Escherichia coli P0299917.1; identical to SEQ ID NO: 25217

SEQ ID NO: 26206 - protein, 1096 aa, Escherichia coli P0299917.1; identical to SEQ ID NO: 25218

SEQ ID NO: 26207 - protein, 2114 aa, Escherichia coli p0305293.1; identical to SEQ ID NO: 25453

SEQ ID NO: 26208 - protein, 630 aa, Escherichia coli p0305293.1
MILSGLSLWEKGSPLHKSTQQVRTQGPIRHADCRQRKLADFLCTGGIIQEMLGAQYLSIRNSNNETLLRRKIGILPADFSIEIKGGMHANEGTIVITTQHPCVAKLKDKTLEATRKRTEGRTEIQLKAEGVPPAFITLQVLPNLAADPIDIELPFPAKGCLALDVNGRPLDKNITLHDLLGSRAFLFSRNGEPTKYTLQLYLRSVSGLQAWHEWCYTALSDRPVELNLYSLREHIENLISLEAGIDQVVEMRITGAGVVMAWQIRRYKYSLRYDYEKELLLSQSVNHRAGQIPSPVIMLLSEPERKSIPLASRMSEGVPVGEYELSSIVNKNGPWLVVPKPGEEMAFRPCFIRGESSLPVEESNIRSLQKATQLFNPQAEVNTITRVLGQMANDPAHSGWQFMRSLYDQFGYLPLATFEVWRALVQHPQALAMSLFKFEMSAEYLSRIENEFPILWEFFPIFEIKAASERFKLFLSQKGAPEETQKLLVTNMFQRLGLVFPTYADEIEKWLSNGYLPPSIPESCVHGWYQELLREHSEARWPEYGCKRLYEWMMSQKNPVIGINPDADYRYSVAWLPVFAAAVASGNASFESVFDRKPGAVFFLRQVRDFDSRWFKAIFQCSLLRYVAKK

SEQ ID NO: 26209 - protein, 2114 aa, Escherichia coli p0305293.10
MTTRYFSSLIEQSLSRSTEATLSIMGVTNPQLREHLAQQMGADCGKPGSFLASPVFQQMFGWKESNHTMRSLTEGNALLSKAVVDSLDNQSNGRYRFGADWKPFTHQLASWKALLEKKHSVVVTSGTGSGKTECFMVPVLEDLYRELHENGNNPLVGVRALFLYPLNALINSQRERLDAWTRGFGTGIRYCLYNGNTEELHAKMKTVQDNRPNEVLSREKMRLEPAPILVTNGTMLEYMMVRQVDAPIIQQSKAQKSLRWIVLDEAHTYVGSQAAELALQLRRVMTAFGVTPDDVRFVATSATIAGSDAEKQLKKFLSELSGIPQERIDVLDGSRVIPELEPSKNVSVPLDEIEQIPDLDLKDKNDNKIKGISPERFYALTHSPEARYIREMLVKHPNPMKLDEMTERLNILTKQHHSQHEVLRWIDVCSGTQPNAKDPAFLKVRAHIFQRNTQGIWACVDKDCRLKHGTPLEKGWPFGYVYVNQRQNCDCGSPVYEVAFCNDCNEPHLLARDKKGKLVQWENKGGDEFSLQDEVPVEHDATAEKVEKENSFQPPLIIAAGETSEAGYTLQRLDRQTRRIGVINNDSIPLIINDVEQVCSASGCGYRGMSGKQPFRRALLGGPFYVTNIVPTVLEYCQDFTSDEGKEGVGPDSLPGRGRRLITFTDSRQGTARMAVRMQQEAERSRLRGSVVEILSWHQRTQTSTAPNANADLEKLATRAKQAREQAEEYRSWGMPDQAKLSQAQAEQLEQAYQFAIGGKAATTLVSRTWTEMVNELKDKADIRGPVLKYNYYLKPEVFNENGGPLKLSEMLLFREFMRRPKRTNSLETQGLVQVGYLGLEKIHKLPMHWQERELTLDDWRDFLKVTLDHYVRESNFTQLDDELKNWIGSRFSSKFVRNPESKDPEDNQNRRWPQIRNGNVSHRLAKLLMLGAGFKTVNTATIDIINTWLKEAWAQLTGPLAVLKPDGNRFYLPKEHMTFSLITDAWICPVTNKILDTAFKGLTPYLPTHISFEHLTQAQYDTFVAQKVTMPEIWKLDRSQEDYAEGLAKARDWVSNDPLIAQLRSENVWTDINDRVVEGGFYYRTAEHSAQQSSERLQSYEKMFKNGQLNVLNCSTTMEMGVDIGGITAVVMNNVPPHPANYLQRAGRAGRSKESRAISYTLCKGNPHDQQVFANPLWPFETMIPAPMVAMNSARLVQRHVNALLLSDFLCNVIGETDKEKTSLDSLWFFGEDDGQSKCERFKIWLERPVLDIDTALERLVKGTALHGARAEHLRDKTISAITFLQQRWLSVYRDLVTQERESQPQTPYRKRIELEKKRHCGEYLLRDLAARTFLPGYGFPTDVVTFDNFTMEDYIREKLQKSRDKKDREDNVSRYKGLPSRNLGVAIREYAPGAEIILDGRVFRSAGVSLHWHNINADTNEAQRLDCAWRCHKCGTIGYEEGMSSSGMLFCSNSACGEKIIMDNRRQVLQPAGFVTDAHAPVTNNIETMKFVPVVPAWVFVKAEPVPLPNPLMGYMASGADGHVFQQSLGEGGHGYALCLSCGRAESMLNENDAPKSMEAHYPPRPGKADRDSQNHRLICPGSTALMKNVPLGALARTDVFEMVLRKPQKGEYLPDNTEEGRIVAMTLAVALRQALAGVLGISGAELGYSVRPVRLEDGQSVLAVQLYDVISGGAGFASSAPVHIEAILQGMVKQLGCRHCDTACSECLLDSQTRHDHDLLDRKAALAWLGDDFTYYIGLPDEETFSLPDARYCPGAIGDTIRRAINEGAEKLTLWMTGAPNEWDLYARQFRAAVQSYRLKDNVEVDLVIPAGVDDPDLLYELSQFTALGVRLCHVEQDLQLPIVAQVTFADRVMTLASRSQQATIPGPEGHLNDELVVRSLGYKTVELNEFILPAKAANAVERVKDIQIHKQLNGPLSQFGQRFWDVLFNDHEEAQSLMNNTRITGVHYTDRYLQNPVALALLGSILRPLKTKLTDVAEVALDTLFKDKDRPGNRPFHDWMSIADFQDFADQWFAAALGRPIELTVFDSPRDIPHHRKLTVTFEDGQVLKIRFDQGMGYWRINFASQWHYFDFRDDVSFQLVKMAQACNEGNVANSEESWATDVLVEVSAS

SEQ ID NO: 26210 - protein, 580 aa, Escherichia coli p0305293.10; identical to SEQ ID NO: 25454

SEQ ID NO: 26211 - protein, 2114 aa, Escherichia coli p0305293.11; identical to SEQ ID NO: 25453

SEQ ID NO: 26212 - protein, 580 aa, Escherichia coli p0305293.11; identical to SEQ ID NO: 25454

SEQ ID NO: 26213 - protein, 2090 aa, Escherichia coli p0305293.12
MGVTNPQLREHLAQQMGADCGKPGSFLASPVFQQMFGWKESNHTMRSLTEGNALLSKAVVDSLDNQSNGRYRFGADWKPFTHQLASWKALLEKKHSVVVTSGTGSGKTECFMVPVLEDLYRELHENGNNPLVGVRALFLYPLNALINSQRERLDAWTRGFGTGIRYCLYNGNTEELHAKMKTVQDNRPNEVLSREKMRLEPAPILVTNGTMLEYMMVRQVDAPIIQQSKAQKSLRWIVLDEAHTYVGSQAAELALQLRRVMTAFGVTPDDVRFVATSATIAGSDAEKQLKKFLSELSGIPQERIDVLDGSRVIPELEPSKNVSVPLDEIEQIPDLDLKDKNDNKIKGISPERFYALTHSPEARYIREMLVKHPNPMKLDEMTERLNILTKQHHSQHEVLRWIDVCSGTQPNAKDPAFLKVRAHIFQRNTQGIWACVDKDCRLKHGTPLEKGWPFGYVYVNQRQNCDCGSPVYEVAFCNDCNEPHLLARDKKGKLVQWENKGGDEFSLQDEVPVEHDATAEKVEKENSFQPPLIIAAGETSEAGYTLQRLDRQTRRIGVINNDSIPLIINDVEQVCSASGCGYRGMSGKQPFRRALLGGPFYVTNIVPTVLEYCQDFTSDEGKEGVGPDSLPGRGRRLITFTDSRQGTARMAVRMQQEAERSRLRGSVVEILSWHQRTQTSTAPNANADLEKLATRAKQAREQAEEYRSWGMPDQAKLSQAQAEQLEQAYQFAIGGKAATTLVSRTWTEMVNELKDKADIRGPVLKYNYYLKPEVFNENGGPLKLSEMLLFREFMRRPKRTNSLETQGLVQVGYLGLEKIHKLPMHWQGRELTLDDWRDFLKVTLDHYVRESNFTQLDDELKNWIGSRFSSKFVRNPESKDPEDNQNRRWPQIRNGNVSHRLAKLLMLGAGFKTVNTATIDIINTWLKEAWAQLTGPLAVLKPDGNRFYLPKEHMTFSLITDAWICPVTNKILDTAFKGLTPYLPTHISFEHLPQAQYDTFVAQKVTMPEIWKLDRSQEDYAEGLAKARDWVSNDPLIAQLRSENVWTDINDRVVEGGFYYRTAEHSAQQSSERLQSYEKMFKNGQLNVLNCSTTMEMGVDIGGITAVVMNNVPPHPANYLQRAGRAGRSKESRAISYTLCKGNPHDQQVFANPLWPFETMIPAPMVAMNSARLVQRHVNALLLSDFLCNVIGETDKEKTSLDSLWFFGEDDGQSKCERFKIWLERPVLDIDTALERLVKGTALHGARAEHLRDKTISAITFLQQRWLSVYRDLVTQERESQPQTPYRKRIELEKKRHCGEYLLRDLAARTFLPGYGFPTDVVTFDNFTMEDYIREKLQKSRDKKDREDNVSRYKGLPSRNLGVAIREYAPGAEIILDGRVFRSAGVSLHWHNINADTNEAQRLDCAWRCHKCGTIGYEEGMSSSGMLFCSNSACGEKIIMDNRRQVLQPAGFVTDAHAPVTNNIETMKFVPVVPAWVFVKAEPVPLPNPLMGYMASGADGHVFQQSLGEGGHGYALCLSCGRAESMLNENDAPKSMEAHYPPRPGKADRDSQNHRLICPGSTALMKNVPLGALARTDVFEMVLRKPQKGEYLPDNTEEGRIVAMTLAVALRQALAGVLGISGAELGYSVRPVRLEDGQSVLAVQLYDVISGGAGFASSAPVHIEAILQGMVKQLGCRHCDTACSECLLDSQTRHDHDLLDRKAALAWLGDDFTYYIGLPDEETFSLPDARYCPGAIGDTIRRAINEGAEKLTLWMTGAPNEWDLYARQFRAAVQSYRLKDNVEVDLVIPAGVDDPDLLYELSQFTALGVRLCHVEQDLQLPIVAQVTFADRVMTLASRSQQATIPGPEWHLNDELVVRSLGYKTVELNEFILPAKAANAVERVKDIQIHKQLNGPLSQFGQRFWDVLFNDHEEAQSLMNNTRITGVHYTDRYLQNPVALALLGSILRPLKTKLTDVAEVALDTLFKDKDRPGNRPFHDWMSIADFQDFADQWFAAALGRPIELTVFDSPRDIPHHRKLTVTFEDGQVLKIRFDQGMGYWRINFASQWHYFDFRDDVSFQLVKMAQACNEGNVANSEESWATDVLVEVSAS

SEQ ID NO: 26214 - protein, 580 aa, Escherichia coli p0305293.12; identical to SEQ ID NO: 25454

SEQ ID NO: 26215 - protein, 2090 aa, Escherichia coli p0305293.13
MGVTNPQLREHLAQQMGADCGKPGSFLASPVFQQMFGWKESNHTMRSLTEGNALLSKAVVDSLDNQSNGRYRFGADWKPFTHQLASWKALLEKKHSVVVTSGTGSGKTECFMVPVLEDLYRELHENGNNPLVGVRALFLYPLNALINSQRERLDAWTRGFGTGIRYCLYNGNTEELHAKMKTVQDNRPNEVLSREKMRLEPAPILVTNGTMLEYMMVRQVDAPIIQQSKAQKSLRWIVLDEAHTYVGSQAAELALQLRRVMTAFGVTPDDVRFVATSATIAGSDAEKQLKKFLSELSGIPQERIDVLDGSRVIPELEPSKNVSVPLDEIEQIPDLDLKDKNDNKIKGISPERFYALTHSPEARYIREMLVKHPNPMKLDEMTERLNILTKQHHSQHEVLRWIDVCSGTQPNAKDPAFLKVRAHIFQRNTQGIWACVDKDCRLKHGTPLEKGWPFGYVYVNQRQNCDCGSPVYEVAFCNDCNEPHLLARDKKGKLVQWENKGGDEFSLQDEVPVEHDATAEKVEKENSFQPPLIIAAGETSEAGYTLQRLDRQTRRIGVINNDSIPLIINDVEQVCSASGCGYRGMSGKQPFRRALLGGPFYVTNIVPTVLEYCQDFTSDEGKEGVGPDSLPGRGRRLITFTDSRQGTARMAVRMQQEAERSRLRGSVVEILSWHQRTQTSTAPNANADLEKLATRAKQAREQAEEYRSWGMPDQAKLSQAQAEQLEQAYQFAIGGKAATTLVSRTWTEMVNELKDKADIRGPVLKYNYYLKPEVFNENGGPLKLSEMLLFREFMRRPKRTNSLETQGLVQVGYLGLEKIHKLPMHWQERELTLDDWRDFLKVTLDHYVRESNFTQLDDELKNWIGSRFSSKFVRNPESKDPEDNQNRRWPQIRNGNVSHRLAKLLMLGAGFKTVNTATIDIINTWLKEAWAQLTGPLAVLKPDGNRFYLPKEHMTFSLITDAWICPVTNKILDTAFKGLTPYLPTHISFEHLTQAQYDTFVAQKVTMPEIWKLDRSQEDYAEGLAKARDWVSNDPLIAQLRSENVWTDINDRVVEGGFYYRTAEHSAQQSSERLQSYEKMFKNGQLNVLNCSTTMEMGVDIGGITAVVMNNVPPHPANYLQRAGRAGRSKESRAISYTLCKGNPHDQQVFANPLWPFETMIPAPMVAMNSARLVQRHVNALLLSDFLCNVIGETDKEKTSLDSLWFFGEDDGQSKCERFKIWLERPVLDIDTALERLVKGTALHGARAEHLRDKTISAITFLQQRWLSVYRDLVTQERESQPQTPYRKRIELEKKRHCGEYLLRDLAARTFLPGYGFPTDVVTFDNFTMEDYIREKLQKSRDKKDREDNVSRYKGLPSRNLGVAIREYAPGAEIILDGRVFRSAGVSLHWHNINADTNEAQRLDCAWRCHKCGTIGYEEGMSSSGMLFCSNSACGEKIIMDNRRQVLQPAGFVTDAHAPVTNNIETMKFVPVVPAWVFVKAEPVPLPNPLMGYMASGADGHVFQQSLGEGGHGYALCLSCGRAESMLNENDAPKSMEAHYPPRPGKADRDSQNHRLICPGSTALMKNVTLGALARTDVFEMVLRKPQKGEYLPDNTEEGRIVAMTLAVALRQALAGVLGISGAELGYSVRPVRLEDGQSVLAVQLYDVISGGAGFASSAPVHIEAILQGMVKQLGCRHCDTACSECLLDSQTRHDHDLLDRKAALAWLGDDFTYYIGLPDEETFSLPDARYCPGAIGDTIRRAINEGAEKLTLWMTGAPNEWDLYARQFRAAVQSYRLKDNVEVDLVIPAGVDDPDLLYELSQFTALGVRLCHVEQDLQLPIVAQVTFADRVMTLASRSQQATIPGPEWHLNDELVVRSLGYKTVELNEFILPAKAANAVERVKDIQIHKQLNGPLSQFGQRFWDVLFNDHEEAQSLMNNTRITGVHYTDRYLQNPVALALLGSILRPLKTKLTDVAEGALDTLFKDKDRPGNRPFHDWMSIADFQDFADQWFAAALGRPIELTVFDSPRDIPHHRKLTVTFEDGQVLKIRFDQGMGYWRINFASQWHYFDFRDDVSFQLVKMAQACNEGNVANSEESWATDVLVEVSAS

SEQ ID NO: 26216 - protein, 580 aa, Escherichia coli p0305293.13; identical to SEQ ID NO: 25454

SEQ ID NO: 26217 - protein, 2114 aa, Escherichia coli p0305293.14
MTTRYFSSLIEQSLSRSTEATLSIMGVTNPQLREHLAQQMGADCGKPGSFLASPVFQQMFGWKESNHTMRSLTEGNALLSKAVVDSLDNQSNGRYRFGADWKPFTHQLASWKALLEKKHSVVVTSGTGSGKTECFMVPVLEDLYRELHENGNNPLVGVRALFLYPLNALINSQRERLDAWTRGFGTGIRYCLYNGNTEELHAKMKTVQDNRPNEVLSREKMRLEPAPILVTNGTMLEYMMVRQVDAPIIQQSKAQKSLRWIVLDEAHTYVGSQAAELALQLRRVMTAFGVTPDDVRFVATSATIAGSDAEKQLKKFLSELSGIPQERIDVLDGSRVIPELEPSKNVSVPLDEIEQIPDLDLKDKNDNKIKGISPERFYALTHSPEARYIREMLVKHPNPMKLDEMTERLNILTKQHHSQHEVLRWIDVCSGTQPNAKDPAFLKVRAHIFQRNTQGIWACVDKDCRLKHGTPLEKGWPFGYVYVNQRQNCDCGSPVYEVAFCNDCNEPHLLARDKKGKLVQWENKGGDEFSLQDEVPVEHDATAEKVEKENSFQPPLIIAAGETSEAGYTLQRLDRQTRRIGVINNDSIPLIINDVEQVCSASGCGYRGMSGKQPFRRALLGGPFYVTNIVPTVLEYCQDFTSDEGKEGVGPDSLPGRGRRLITFTDSRQGTARMAVRMQQEAERSRLRGSVVEILSWHQRTQTSTAPNANADLEKLATRAKQAREQAEEYRSWGMPDQAKLSQAQAEQLEQAYQFAIGGKAATTLVSRTWTEMVNELKDKADIRGPVLKYNYYLKPEVFNENGGPLKLSEMLLFREFMRRPKRTNSLETQGLVQVGYLGLEKIHKLPMHWQERELTLDDWRDFLKVTLDHYVRESNFTQLDDELKNWIGSRFSSKFVRNPESKDPEDNQNRRWPQIRNGNVSHRLAKLLMLGAGFKTVNTATIDIINTWLKEAWAQLTGPLAVLKPDGNRFYLPKEHMTFSLITDAWICPVTNKILDTAFKGLTPYLPTHISFEHLTQAQYDTFVAQKVTMPEIWKLDRSQEDYAEGLAKARDWVSNDPLIAQLRSENVWTDINDRVVEGGFYYRTAEHSAQQSSERLQSYEKMFKNGQLNVLNCSTTMEMGVDIGGITAVVMNNVPPHPANYLQRAGRAGRSKESRAISYTLCKGNPHDQQVFANPLWPFETMIPAPMVAMNSARLVQRHVNALLLSDFLCNVIGETDKEKTSLDSLWFFGEDDGQSKCERFKIWLERPVLDIDTALERLGKGTALHGARAEHLRDKTISAITFLQQRWLSVYRDLVTQERESQPQTPYRKRIELEKKRHCGEYLLRDLAARTFLPGYGFPTDVVTFDNFTMEDYIREKLQKSRDKKDREDNVSRYKGLPSRNLGVAIREYAPGAEIILDGRVFRSAGVSLHWHNINADTNEAQRLDCAWRCHKCGTIGYEEGMSSSGMLFCSNSACGEKIIMDNRRQVLQPAGFVTDAHAPVTNNIETMKFVPVVPAWVFVKAEPVPLPNPLMGYMASGADGHVFQQSLGEGGHGYALCLSCGRAESMLNENDAPKSMEAHYPPRPGKADRDSQNHRLICPGSTALMKNVTLGALARTDVFEMVLRKPQKGEYLPDNTEEGRIVAMTLAVALRQALAGVLGISGAELGYSVRPVRLEDGQSVLAVQLYDVISGGAGFASSAPVHIEAILQGMVKQLGCRHCDTACSECLLDSQTRHDHDLLDRKAALAWLGDDFTYYIGLPDEETFSLPDARYCPGAIGDTIRRAINEGAEKLTLWMTGAPNEWDLYARQFRAAVQSYRLKDNVEVDLVIPAGVDDPDLLYELSQFTALGVRLCHVEQDLQLPIVAQVTFADRVMTLASRSQQATIPGPEWHLNDELVVRSLGYKTVELNEFILPAKAANAVERVKDIQIHKQLNGPLSQFGQRFWDVLFNDHEEAQSLMNNTRITGVHYTDRYLQNPVALALLGSILRPLKTKLTDVAEVALDTLFKDKDRPGNRPFHDWMSIADFQDFADQWFAAALGRPIELTVFDSPRDIPHHRKLTVTFEDGQVLKIRFDQGMGYWRINFASQWHYFDFRDDVSFQLVKMAQACNEGNVANSEESWATDVLVEVSAS

SEQ ID NO: 26218 - protein, 580 aa, Escherichia coli p0305293.14; identical to SEQ ID NO: 25454

SEQ ID NO: 26219 - protein, 2090 aa, Escherichia coli p0305293.15
MGVTNPQLREHLAQQMGADCGKPGSFLASPVFQQMFGWKESNHTMRSLTEGNALLSKAVVDSLDNQSNGRYRFGADWKPFTHQLASWKALLEKKHSVVVTSGTGSGKTECFMVPVLEDLYRELHENGNNPLVGVRALFLYPLNALINSQRERLDAWTRGFGTGIRYCLYNGNTEELHAKMKTVQDNRPNEVLSREKMRLEPAPILVTNGTMLEYMMVRQVDAPIIQQSKAQKSLRWIVLDEAHTYVGSQAAELALQLRRVMTAFGVTPDDVRFVATSATIAGSDAEKQLKKFLSELSGIPQERIDVLDGSRVIPELEPSKNVSVPLDEIEQIPDLDLKDKNDNKIKGISPERFYALTHSPEARYIREMLVKHPNPMKLDEMTERLNILTKQHHSQHEVLRWIDVCSGTQPNAKDPAFLKVRAHIFQRNTQGIWACVDKDCRLKHGTPLEKGWPFGYVYVNQRQNCDCGSPVYEVAFCNDCNEPHLLARDKKGKLVQWENKGGDEFSLQDEVPVEHDATAEKVEKENSFQPPLIIAAGETSEAGYTLQRLDRQTRRIGVINNDSIPLIINDVEQVCSASGCGYRGMSGKQPFRRALLGGPFYVTNIVPTVLEYCQDFTSDEGKEGVGPDSLPGRGRRLITFTDSRQGTARMAVRMQQEAERSRLRGSVVEILSWHQRTQTSTAPNANADLEKLATRAKQAREQAEEYRSWGMPDQAKLSQAQAEQLEQAYQFAIGGKAATTLVSRTWTEMVNELKDKADIRGPVLKYNYYLKPEVFNENGGPLKLSEMLLFREFMRRPKRTNSLETQGLVQVGYLGLEKIHKLPMHWQERELTLDDWRDFLKVTLDHYVRESNFTQLDDELKNWIGSRFSSKFVRNPESKDPEDNQNRRWPQIRNGNVSHRLAKLLMLGAGFKTVNTATIDIINTWLKEAWAQLTGPLAVLKPDGNRFYLPKEHMTFSLITDAWICPVTNKILDTAFKGLTPYLPTHISFEHLTQAQYDTFVAQKVTMPEIWKLDRSQEDYAEGLAKARDWVSNDPLIAQLRSENVWTDINDRVVEGGFYYRTAEHSAQQSSERLQSYEKMFKNGQLNVLNCSTTMEMGVDIGGITAVVMNNVPPHPANYLQRAGRAGRSKESRAISYTLCKGNPHDQQVFANPLWPFETMIPAPMVAMNSARLVQRHVNALLLSDFLCNVIGETDKEKTSLDSLWFFGEDDGQSKCERFKIWLERPVLDIDTALERLVKGTALHGARAEHLRDKTISAIPFLQQRWLSVYRDLVTQERESQPQTPYRKRIELEKKRHCGEYLLRDLAARTFLPGYGFPTDVVTFDNFTMEDYIREKLQKSRDKKDREDNVSRYKGLPSRNLGVAIREYAPGAEIILDGRVFRSAGVSLHWHNINADTNEAQRLDCAWRCHKCGTIGYEEGMSSSGMLFCSNSACGEKIIMDNRRQVLQPAGFVTDAHAPVTNNIETMKFVPVVPAWVFVKAEPVPLPNPLMGYMASGADGHVFQQSLGEGGHGYALCLSCGRAESMLNENDAPKSMEAHYPPRPGKADRDSQNHRLICPGSTALMKNVTLGALARTDVFEMVLRKPQKGEYLPDNTEEGRIVAMTLAVALRQALAGVLGISGAELGYSVRPVRLEDGQSVLAVQLYDVISGGAGFASSAPVHIEAILQGMVKQLGCRHCDTACSECLLDSQTRHDHDLLDRKAALAWLGDDFTYYIGLPDEETFSLPDARYCPGAIGDTIRRAINEGAEKLTLWMTGAPNEWDLYARQFRAAVQSYRLKDNVEVDLVIPAGVDDPDLLYELSQFTALGVRLCHVEQDLQLPIVAQVTFADRVMTLASRSQQATIPGPEWHLNDELVVRSLGYKTVELNEFILPAKAANAVERVKDIQIHKQLNGPLSQFGQRFWDVLFNDHEEAQSLMNNTRITGVHYTDRYLQNPVALALLGSILRPLKTKLTDVAEVALDTLFKDKDRPGNRPFHDWMSIADFQDFADQWFAAALGRPIELTVFDSPRDIPHHRKLTVTFEDGQVLKIRFDQGMGYWRINFASQWHYFDFRDDVSFQLVKMAQACNEGNVANSEESWATDVLVEVSAS

SEQ ID NO: 26220 - protein, 648 aa, Escherichia coli p0305293.15; identical to SEQ ID NO: 25496

SEQ ID NO: 26221 - protein, 2114 aa, Escherichia coli p0305293.2
MTTRYFSSLIEQSLSRSTEATLSIMGVTNPQLREHLAQQMGADCGKPGSFLASPVFQQMFGWKESNHTMRSLTEGNALLSKAVVDSLDNQSNGRYRFGADWKPFTHQLASWKALLEKKHSVVVTSGTGSGKTECFMVPVLEDLYRELHENGNNPLVGVRALFLYPLNALINSQRERLDAWTRGFGTGIRYCLYNGNTEELHAKMKTVQDNRPNEVLSREKMRLEPAPILVTNGTMLEYMMVRQVDAPIIQQSKAQKSLRWIVLDEAHTYVGSQAAELALQLRRVMTAFGVTPDDVRFVATSATIAGSDAEKQLKKFLSELSGIPQERIDVLDGSRVIPELEPSKNVSVPLDEIEQIPDLDLKDKNDNKIKGISPERFYALTHSPEARYIREMLVKHPNPMKLDEMTERLNILTKQHHSQHEVLRWIDVCSGTQPNAKDPAFLKVRAHIFQRNTQGIWACVDKDCRLKHGTPLEKGWPFGYVYVNQRQNCDCGSPVYEVAFCNDCNEPHLLARDKKGKLVQWENKGGDEFSLQDEVPVEHDATAEKVEKENSFQPPLIIAAGETSEAGYTLQRLDRQTRRIGVINNDSIPLIINDVEQVCSASGCGYRGMSGKQPFRRALLGGPFYVTNIVPTVLEYCQDFTSDEGKEGVGPDSLPGRGRRLITFTDSRQGTARMAVRMQQEAERSRLRGSVVEILSWHQRTQTSTAPNANADLEKLATRAKQAREQAEEYRSWGMPDQAKLSQAQAEQLEQAYQFAIGGKAATTLVSRTWTEMVNELKDKADIRGPVLKYNYYLKPEVFNENGGPLKLSEMLLFREFMRRPKRTNSLETQGLVQVGYLGLEKIHKLPMHWQERELTLDDWRDFLKVTLDHYVRESNFTQLDDELKNWIGSRFSSKFVRNPESKDPEDNQNRRWPQIRNGNVSHRLAKLLMLGAGFKTVNTATIDIINTWLKEAWAQLTGPLAVLKPDGNRFYLPKEHMTFSLITDAWICPVTNKILDTAFKGLTPYLPTHISFEHLTQAQYDTFVAQKVTMPEIWKLDRSQEDYAEGLAKARDWVSNDPLIAQLRSENVWTDINDRVVEGGFYYRTAEHSAQQSSERLQSYEKMFKNGQLNVLNCSTTMEMGVDIGGITAVVMNNVPPHPANYLQRAGRAGRSKESRAISYTLCKGNPHDQQVFANPLWPFETMIPAPMVAMNSARLVQRHVNALLLSDFLCNVIGETDKEKTSLDSLWFFGEDDGQSKCERFKIWLERPVLDIDTALERLVKGTALHGARAEHLRDKTISAITFLQQRWLSVYRDLVTQERESQPQTPYRKRIELEKKRHCGEYLLRDLAARTFLPGYGFPTDVVTFDNFTMEDYIREKLQKSRDKKDREDNVSRYKGLPSRNLGVAIREYAPGAEIILDGRVFRSAGVSLHWHNINADTNEAQRLDCAWRCHKCGTIGYEEGMSSSGMLFCSNSACGEKIIMDNRRQVLQPAGFVTDAHAPVTNNIETMKFVPVVPAWVFVKAEPVPLPNPLMGYMASGADGHVFQQSLGEGGHGYALCLSCGRAESMLNENDAPKSMEAHYPPRPGKADRDSQNHRLICPGSTALMKNVTLGALARTDVFEMVLRKPQKGEYLPDNTEEGRIVAMTLAVALRQALAGVLGISGAELGYSVRPVRLEDGQSVLAVQLYDVISGGAGFASSAPVHIEAILQGMVKQLGCRHCDTACSECLLDSQTRHDHDLLDRKAALAWLGDDFTYYIGLPDEETFSLPDARYCPGAIGDTIRRAINEGAEKLTLWMTGAPNEWDLYARQFRAAVQSYRLKDNVEVDLVIPAGVDDPDLLYELSQFTALGVRLCHVEQDLQLPIVAQVTFADRVMTLASRSQQATIPGPEGHLNDELVVRSLGYKTVELNEFILPAKAANAVERVKDIQIHKQLNGPLSQFGQRFWDVLFNDHEEAQSLMNNTRITGVHYTDRYLQNPVALALLGSILRPLKTKLTDVAEVALDTLFKDKDRPGNRPFHDWMSIADFQDFADQWFAAALGRPIELTVFDSPRDIPHHRKLTVTFEDGQVLKIRFDQGMGYWRINFASQWHYFDFRDDVSFQLVKMAQACNEGNVANSEESWATDVLVEVSAS

SEQ ID NO: 26222 - protein, 580 aa, Escherichia coli p0305293.2
MLGAQYLSIRNSNNETLLRRKIGILPADFSIEIKGGMHANEGTIVITTQHPCVAKLKDKTLEATRKRTEGRTEIQLKAEGVPPAFITLQVLPNLAAAPIDIELPFPAKGCLALDVNGRPLDKNITLHDLLGSRAFLFSRNGEPTKYTLQLYLRSVSGLQAWHEWCYTALSDRPVELNLYSLREHIENLISLEAGIDQVVEMRITGAGVVMAWQIRRYKYSLRYDYEKELLLSQSVNHRAGQIPSPVIMLLSEPERKSIPLASRMSEGVPVGEYELSSIVNKNGPWLVVPKPGEEMAFRPCFIRGESSLPVEESNIRSLQKATQLFNPQAEVNTITRVLGQMANDPAHSGWQFMRSLYDQFGYLPLATFEVWRALVQHPQALAMSLFKFEMSAEYLSRIENEFPILWEFFPIFEIKAASERFKLFLSQKGAPEETQKLLVTNMFQRLGLVFPTYADEIEKWLSNGYLPPSIPESCVHGWYQELLREHSEARWPEYGCKRLYEWMMSQKNPVIGINPDADYRYSVAWLPVFAAAVASGNASFESVFDRKPGAVFFLRQVRDFDSRWFKAIFQCSLLRYVAKK

SEQ ID NO: 26223 - protein, 2114 aa, Escherichia coli p0305293.3
MTTRYFSSLIEQSLSRSTEATLSIMGVTNPQLREHLAQQMGADCGKPGSFLASPVFQQMFGWKESNHTMRSLTEGNALLSKAVVDSLDNQSNGRYRFGADWKPFTHQLASWKALLEKKHSVVVTSGTGSGKTECFMVPVLEDLYRELHENGNNPLVGVRALFLYPLNALINSQRERLDAWTRGFGTGIRYCLYNGNTEELHAKMKTVQDNRPNEVLSREKMRLEPAPILVTNGTMLEYMMVRQVDAPIIQQSKAQKSLRWIVLDEAHTYVGSQAAELALQLRRVMTAFGVTPDDVRFVATSATIAGSDAEKQLKKFLSELSGIPQERIDVLDGSRVIPELEPSKNVSVPLDEIEQIPDLDLKDKNDNKIKGISPERFYALTHSPEARYIREMLVKHPNPMKLDEMTERLNILTKQHHSQHEVLRWIDVCSGTQPNAKDPAFLKVRAHIFQRNTQGIWACVDKDCRLKHGTPLEKGWPFGYVYVNQRQNCDCGSPVYEVAFCNDCNEPHLLARDKKGKLVQWENKGGDEFSLQDEVPVEHDATAEKVEKENSFQPPLIIAAGETSEAGYTLQRLDRQTRRIGVINNDSIPLIINDVEQVCSASGCGYRGMRGKQPFRRALLGGPFYVTNIVPTVLEYCQDFTSDEGKEGVGPDSLPGRGRRLITFTDSRQGTARMAVRMQQEAERSRLRGSVVEILSWHQRTQTSTAPNANADLEKLATRAKQAREQAEEYRSWGMPDQAKLSQAQAEQLEQAYQFAIGGKAATTLVSRTWTEMVNELKDKADIRGPVLKYNYYLKPEVFNENGGPLKLSEMLLFREFMRRPKRTNSLETQGLVQVGYLGLEKIHKLPMHWQERELTLDDWRDFLKVTLDHYVRESNFTQLDDELKNWIGSRFSSKFVRNPESKDPEDNQNRRWPQIRNGNVSHRLAKLLMLGAGFKTVNTATIDIINTWLKEAWAQLTGPLAVLKPDGNRFYLPKEHMTFSLITDAWICPVTNKILDTAFKGLTPYLPTHISFEHLTQAQYDTFVAQKVTMPEIWKLDRSQEDYAEGLAKARDWVSNDPLIAQLRSENVWTDINDRVVEGGFYYRTAEHSAQQSSERLQSYEKMFKNGQLNVLNCSTTMEMGVDIGGITAVVMNNVPPHPANYLQRAGRAGRSKESRAISYTLCKGNPHDQQVFANPLWPFETMIPAPMVAMNSARLVQRHVNALLLSDFLCNVIGETDKEKTSLDSLWFFGEDDGQSKCERFKIWLERPVLDIDTALERLVKGTALHGARAEHLRDKTISAITFLQQRWLSVYRDLVTQERESQPQTPYRKRIELEKKRHCGEYLLRDLAARTFLPGYGFPTDVVTFDNFTMEDYIREKLQKSRDKKDREDNVSRYKGLPSRNLGVAIREYAPGAEIILDGRVFRSAGVSLHWHNINADTNEAQRLDCAWRCHKCGTIGYEEGMSSSGMLFCSNSACGEKIIMDNRRQVLQPAGFVTDAHAPVTNNIETMKFVPVVPAWVFVKAEPVPLPNPLMGYMASGADGHVFQQSLGEGGHGYALCLSCGRAESMLNENDAPKSMEAHYPPRPGKADRDSQNHRLICPGSTALMKNVTLGALARTDVFEMVLRKPQKGEYLPDNTEEGRIVAMTLAVALRQALAGVLGISGAELGYSVRPVRLEDGQSVLAVQLYDVISGGAGFASSAPVHIEAILQGMVKQLGCRHCDTACSECLLDSQTRHDHDLLDRKAALAWLGDDFTYYIGLPDEETFSLPDARYCPGAIGDTIRRAINEGAEKLTLWMTGAPNEWDLYARQFRAAVQSYRLKDNVEVDLVIPAGVDDPDLLYELSQFTALGVRLCHVEQDLQLPIVAQVTFADRVMTLASRSQQATIPGPEWHLNDELVVRSLGYKTVELNEFILPAKAANAVERVKDIQIHKQLNGPLSQFGQRFWDVLFNDHEEAQSLMNNTRITGVHYTDRYLQNPVALALLGSILRPLKTKLTDVAEVALDTLFKDKDRPGNRPFHDWMSIADFQDFADQWFAAALGRPIELTVFDSPRDIPHHRKLTVTFEDGQVLKIRFDQGMGYWRINFASQWHYFDFRDDVSFQLVKMAQACNEGNVANSEESWATDVLVEVSAS

SEQ ID NO: 26224 - protein, 580 aa, Escherichia coli p0305293.3; identical to SEQ ID NO: 25454

SEQ ID NO: 26225 - protein, 2090 aa, Escherichia coli p0305293.4
MGVTNPQLREHLAQQMGADCGKPGSFLASPVFQQMFGWKESNHTMRSLTEGNALLSKAVVDSLDNQSNGRYRFGADWKPFTHQLASWKALLEKKHSVVVTSGTGSGKTECFMVPVLEDLYRELHENGNNPLVGVRALFLYPLNALINSQRERLDAWTRGFGTGIRYCLYNGNTEELHAKMKTVQDNRPNEVLSREKMRLEPAPILVTNGTMLEYMMVRQVDAPIIQQSKAQKSLRWIVLDEAHTYVGSQAAELALQLRRVMTAFGVTPDDVRFVATSATIAGSDAEKQLKKFLSELSGIPQERIDVLDGSRVIPELEPSKNVSVPLDEIEQIPDLDLKDKNDNKIKGISPERFYALTHSPEARYIREMLVKHPNPMKLDEMTERLNILTKQHHSQHEVLRWIDVCSGTQPNAKDPAFLKVRAHIFQRNTQGIWACVDKDCRLKHGTPLEKGWPFGYVYVNQRQNCDCGSPVYEVAFCNDCNEPHLLARDKKGKLVQWENKGGDEFSLQDEVPVEHDATAEKVEKENSFQPPLIIAAGETSEAGYTLQRLDRQTRRIGVINNDSIPLIINDVEQVCSASGCGYRGMSGKQPFRRALLGGPFYVTNIVPTVLEYCQDFTSDEGKEGVGPDSLPGRGRRLITFTDSRQGTARMAVRMQQEAERSRLRGSVVEILSWHQRTQTSTAPNANADLEKLATRAKQAREQAEEYRSWGMPDQAKLSQAQAEQLEQAYQFAIGGKAATTLVSRTWTEMVNELKDKADIRGPVLKYNYYLKPEVFNENGGPLKLSEMLLFREFMRRPKRTNSLETQGLVQVGYLGLEKIHKLPMHWQERELTLDDWRDFLKVTLDHYVRESNFTQLDDELKNWIGSRFSSKFVRNPESKDPEDNQNRRWPQIRNGNVSHRLAKLLMLGAGFKTVNTATIDIINTWLKEAWAQLTGPLAVLKPDGNRFYLPKEHMTFSLITDAWICPVTNKILDTAFKGLTPYLPTHISFEHLTQAQYDTFVAQKVTMPEIWKLDRSQEDYAEGLAKARDWVSNDPLIAQLRSENVWTDINDRVVEGGFYYRTAEHSAQQSSERLQSYEKMFKNGQLNVLNCSTTMEMGVDIGGITAVVMNNVPPHPANYLQRAGRAGRSKESRAISYTLCKGNPHDQQVFANPLWPFETMIPAPMVAMNSARLVQRHVNALLLSDFLCNVIGETDKEKPSLDSLWFFGEDDGQSKCERFKIWLERPVLDIDTALERLVKGTALHGARAEHLRDKTISAITFLQQRWLSVYRDLVTQERESQPQTPYRKRIELEKKRHCGEYLLRDLAARTFLPGYGFPTDVVTFDNFTMEDYIREKLQKSRDKKDREDNVSRYKGLPSRNLGVAIREYAPGAEIILDGRVFRSAGVSLHWHNINADTNEAQRLDCAWRCHKCGTIGYEEGMSSSGMLFCSNSACGEKIIMDNRRQVLQPAGFVTDAHAPVTNNIETMKFVPVVPAWVFVKAEPVPLPNPLMGYMASGADGHVFQQSLGEGGHGYALCLSCGRAESMLNENDAPKSMEAHYPPRPGKADRDSQNHRLICPGSTALMKNVTLGALARTDVFEMVLRKPQKGEYLPDNTEEGRIVAMTLAVALRQALAGVLGISGAELGYSVRPVRLEDGQSVLAVQLYDVISGGAGFASSAPVHIEAILQGMVKQLGCRHCDTACSECLLDSQTRHDHDLLDRKAALAWLGDDFTYYIGLPDEETFSLPDARYCPGAIGDTIRRAINEGAEKLTLWMTGAPNEWDLYARQFRAAVQSYRLKDNVEVDLVIPAGVDDPDLLYELSQFTALGVRLCHVEQDLQLPIVAQVTFADRVMTLASRSQQATIPGPEWHLNDELVVRSLGYKTVELTEFILPAKAANAVERVKDIQIHKQLNGPLSQFGQRFWDVLFNDHEEAQSLMNNTRITGVHYTDRYLQNPVALALLGSILRPLKTKLTDVAEVALDTLFKDKDRPGNRPFHDWMSIADFQDFADQWFAAALGRPIELTVFDSPRDIPHHRKLTVTFEDGQVLKIRFDQGMGYWRINFASQWHYFDFRDDVSFQLVKMAQACNEGNVANSEESWATDVLVEVSAS

SEQ ID NO: 26226 - protein, 580 aa, Escherichia coli p0305293.4; identical to SEQ ID NO: 25454

SEQ ID NO: 26227 - protein, 2090 aa, Escherichia coli p0305293.5; identical to SEQ ID NO: 25463

SEQ ID NO: 26228 - protein, 580 aa, Escherichia coli p0305293.5; identical to SEQ ID NO: 25454

SEQ ID NO: 26229 - protein, 2114 aa, Escherichia coli p0305293.8; identical to SEQ ID NO: 25453

SEQ ID NO: 26230 - protein, 580 aa, Escherichia coli p0305293.8; identical to SEQ ID NO: 25454

SEQ ID NO: 26231 - protein, 2114 aa, Escherichia coli p0305293.9; identical to SEQ ID NO: 25453

SEQ ID NO: 26232 - protein, 648 aa, Escherichia coli p0305293.9; identical to SEQ ID NO: 25496

SEQ ID NO: 26233 - protein, 2104 aa, Escherichia coli P4-96; identical to SEQ ID NO: 25937

SEQ ID NO: 26234 - protein, 978 aa, Escherichia coli P4-96; identical to SEQ ID NO: 25938

SEQ ID NO: 26235 - protein, 2104 aa, Escherichia coli P4-NR; identical to SEQ ID NO: 25937

SEQ ID NO: 26236 - protein, 978 aa, Escherichia coli P4-NR; identical to SEQ ID NO: 25938

SEQ ID NO: 26237 - protein, 2104 aa, Escherichia coli PA10; identical to SEQ ID NO: 25235

SEQ ID NO: 26238 - protein, 515 aa, Escherichia coli PA10
MLENTVDLRVSWKDGSNLKLLLPKPVSGGRFVTNDGSVHFDGVASIAHLHGIDAELLTISCAGRGYLNIELLDENPVAEKFRYLHADLPLLSGRNDKLQQISLYENYNLLNAMLACAWNSNSTLCVDFYSDRFGKDKATLNIKRYDGSFIEHDQGLLVDIKNSVVFPANRIDELVVDAISLKNPGLHISLLKKDEFAYDLSALNVQDSPWLIVGKLDGTARIAPVIKWMLPVLQTNDLLLNALCEADPEQRKKNFNELIFEIDNNPLQNYCCLLTEYIKKYKMNNGLSLLDLDLFRGISSNYRVVVQLLISSCLSGDSDTIYDIQEELPFSWGWIPVSIWKDVFQKCWTYLEKQINDKTLALHILQPFIAFMNHRAHIDRRLAPIANMLLTYSESLPTGCDVLPTVSREQFNEAKQMLLRNPDSFGRISIFPKELWSSAITPELKSVFNKLWIEDKYHSRLEKRFNLMLVAALLTQKDNNLIHQLSALFEFHYQQAPQQLGVIYQYYFEQAGVCH

SEQ ID NO: 26239 - protein, 2104 aa, Escherichia coli PA11; identical to SEQ ID NO: 25235

SEQ ID NO: 26240 - protein, 978 aa, Escherichia coli PA11; identical to SEQ ID NO: 25216

SEQ ID NO: 26241 - protein, 2104 aa, Escherichia coli PA13; identical to SEQ ID NO: 25311

SEQ ID NO: 26242 - protein, 1119 aa, Escherichia coli PA13; identical to SEQ ID NO: 25584

SEQ ID NO: 26243 - protein, 2104 aa, Escherichia coli PA14; identical to SEQ ID NO: 25235

SEQ ID NO: 26244 - protein, 978 aa, Escherichia coli PA14; identical to SEQ ID NO: 25216

SEQ ID NO: 26245 - protein, 2104 aa, Escherichia coli PA15; identical to SEQ ID NO: 25235

SEQ ID NO: 26246 - protein, 978 aa, Escherichia coli PA15; identical to SEQ ID NO: 25216

SEQ ID NO: 26247 - protein, 2104 aa, Escherichia coli PA19; identical to SEQ ID NO: 25407

SEQ ID NO: 26248 - protein, 978 aa, Escherichia coli PA19; identical to SEQ ID NO: 25216

SEQ ID NO: 26249 - protein, 2104 aa, Escherichia coli PA2; identical to SEQ ID NO: 25311

SEQ ID NO: 26250 - protein, 1119 aa, Escherichia coli PA2; identical to SEQ ID NO: 25584

SEQ ID NO: 26251 - protein, 2104 aa, Escherichia coli PA22; identical to SEQ ID NO: 25265

SEQ ID NO: 26252 - protein, 982 aa, Escherichia coli PA22; identical to SEQ ID NO: 25416

SEQ ID NO: 26253 - protein, 2104 aa, Escherichia coli PA23; identical to SEQ ID NO: 25235

SEQ ID NO: 26254 - protein, 978 aa, Escherichia coli PA23; identical to SEQ ID NO: 25216

SEQ ID NO: 26255 - protein, 2104 aa, Escherichia coli PA24; identical to SEQ ID NO: 25407

SEQ ID NO: 26256 - protein, 978 aa, Escherichia coli PA24; identical to SEQ ID NO: 25216

SEQ ID NO: 26257 - protein, 2104 aa, Escherichia coli PA25; identical to SEQ ID NO: 25407

SEQ ID NO: 26258 - protein, 978 aa, Escherichia coli PA25; identical to SEQ ID NO: 25216

SEQ ID NO: 26259 - protein, 2104 aa, Escherichia coli PA28; identical to SEQ ID NO: 25311

SEQ ID NO: 26260 - protein, 978 aa, Escherichia coli PA28; identical to SEQ ID NO: 25216

SEQ ID NO: 26261 - protein, 2104 aa, Escherichia coli PA3; identical to SEQ ID NO: 25407

SEQ ID NO: 26262 - protein, 978 aa, Escherichia coli PA3; identical to SEQ ID NO: 25216

SEQ ID NO: 26263 - protein, 2104 aa, Escherichia coli PA31; identical to SEQ ID NO: 25235

SEQ ID NO: 26264 - protein, 978 aa, Escherichia coli PA31; identical to SEQ ID NO: 25216

SEQ ID NO: 26265 - protein, 2104 aa, Escherichia coli PA32; identical to SEQ ID NO: 25235

SEQ ID NO: 26266 - protein, 978 aa, Escherichia coli PA32; identical to SEQ ID NO: 25216

SEQ ID NO: 26267 - protein, 2104 aa, Escherichia coli PA33; identical to SEQ ID NO: 25235

SEQ ID NO: 26268 - protein, 978 aa, Escherichia coli PA33; identical to SEQ ID NO: 25216

SEQ ID NO: 26269 - protein, 2104 aa, Escherichia coli PA34; identical to SEQ ID NO: 25311

SEQ ID NO: 26270 - protein, 978 aa, Escherichia coli PA34; identical to SEQ ID NO: 25216

SEQ ID NO: 26271 - protein, 2104 aa, Escherichia coli PA35; identical to SEQ ID NO: 25407

SEQ ID NO: 26272 - protein, 978 aa, Escherichia coli PA35; identical to SEQ ID NO: 25216

SEQ ID NO: 26273 - protein, 2104 aa, Escherichia coli PA38; identical to SEQ ID NO: 25235

SEQ ID NO: 26274 - protein, 1119 aa, Escherichia coli PA38; identical to SEQ ID NO: 25584

SEQ ID NO: 26275 - protein, 2104 aa, Escherichia coli PA39; identical to SEQ ID NO: 25311

SEQ ID NO: 26276 - protein, 233 aa, Escherichia coli PA39; identical to SEQ ID NO: 25548

SEQ ID NO: 26277 - protein, 2104 aa, Escherichia coli PA4; identical to SEQ ID NO: 25235

SEQ ID NO: 26278 - protein, 978 aa, Escherichia coli PA4; identical to SEQ ID NO: 25216

SEQ ID NO: 26279 - protein, 2104 aa, Escherichia coli PA42; identical to SEQ ID NO: 25235

SEQ ID NO: 26280 - protein, 978 aa, Escherichia coli PA42; identical to SEQ ID NO: 25216

SEQ ID NO: 26281 - protein, 2104 aa, Escherichia coli PA45; identical to SEQ ID NO: 25235

SEQ ID NO: 26282 - protein, 978 aa, Escherichia coli PA45; identical to SEQ ID NO: 25216

SEQ ID NO: 26283 - protein, 2104 aa, Escherichia coli PA47; identical to SEQ ID NO: 25407

SEQ ID NO: 26284 - protein, 978 aa, Escherichia coli PA47; identical to SEQ ID NO: 25216

SEQ ID NO: 26285 - protein, 2104 aa, Escherichia coli PA48; identical to SEQ ID NO: 25235

SEQ ID NO: 26286 - protein, 978 aa, Escherichia coli PA48; identical to SEQ ID NO: 25216

SEQ ID NO: 26287 - protein, 2104 aa, Escherichia coli PA49; identical to SEQ ID NO: 25235

SEQ ID NO: 26288 - protein, 978 aa, Escherichia coli PA49; identical to SEQ ID NO: 25216

SEQ ID NO: 26289 - protein, 2104 aa, Escherichia coli PA5; identical to SEQ ID NO: 25235

SEQ ID NO: 26290 - protein, 978 aa, Escherichia coli PA5; identical to SEQ ID NO: 25216

SEQ ID NO: 26291 - protein, 2104 aa, Escherichia coli PA7; identical to SEQ ID NO: 25235

SEQ ID NO: 26292 - protein, 978 aa, Escherichia coli PA7; identical to SEQ ID NO: 25216

SEQ ID NO: 26293 - protein, 2104 aa, Escherichia coli PA8; identical to SEQ ID NO: 25311

SEQ ID NO: 26294 - protein, 978 aa, Escherichia coli PA8; identical to SEQ ID NO: 25216

SEQ ID NO: 26295 - protein, 2104 aa, Escherichia coli PA9; identical to SEQ ID NO: 25311

SEQ ID NO: 26296 - protein, 978 aa, Escherichia coli PA9; identical to SEQ ID NO: 25216

SEQ ID NO: 26297 - protein, 2104 aa, Escherichia coli SMS-3-5; identical to SEQ ID NO: 25343

SEQ ID NO: 26298 - protein, 1119 aa, Escherichia coli SMS-3-5
MLVKTPVNPLLQWLNMFFSRRSLSGADGRALYAYRCTDTEYESLAELLRTYAPRSYPRTIFISYSDVLFSIYAAEFIRRTHTVGHPKWDTILDSIDWKVPYVHRQKLVNDGIRYWKRKIRNLGQASGYLHTLACEGGLPIRMIENESGYLITYFRRIYQALRGQASQYPAAKIAQELGDTIPVTMQNELVYEIAGEFCETLCRLLSEHPPQSSDPVSALRKLSPDWHLQLPLVLPEANAAEIVRRLLSQSSEIRSASSLQVERIWVDVDDSWYCDARFRFPATMRTEQLTSLFECNIQPEQTRLIISGKWRNGGARLAMLSRYEQQDWRVELLPIAMQKLSGADAMAEISLSLHEGPILLGHTIPKGGYELTEELPWVFEAMNESESQLKLVGMGSVSSRLNALFISLPKNSHLDISGEGEFDIPRLLKNSERSLTKISGVFSVVLHDGAVCTIRTQQLYDSAIEYYIKSTEVELVKSDYPVHRAWPKIGWKKDLQYGIVPEKELFWRSIRSGNNAWYSVASKMPKGQIEVRRIVNDEVLFSGKVVVLPADFDINIIPESAQQGIIMLSGITDTRIDKYSNNEKVTLKSDYSQNECAIYYNSSEMLENTVDLRVSWKDGSNLKLLLPKPVSGGRFVTHDGSVHFDGVASIAHLHGIDAELLTISCAGRGYLNIELLDENPVAEKFRYLHADLPLLSGCNDKLKQISLYENYNLLNAMLACAWSSNSTLCVDFYSDRFGKDKATLSIKRYDGSFIEHDQGLLVDIKNSVVFPANRIDELVVDAISLKDPGLHISLLKKDEFAYDLSALNVQDSPWLIVGKLDGTARIAPVIKWGLPVLQTNDLLLNALCEADSEQRKKYFNELIFEIDNNPLQNYCCLLTEYIKKYKMNNGLSLLDLDLFRGISSNYRVVVQLLISSCLSGDSDTIYDIQEELPFSWGWIPVSIWKDVFQKCWAYLEKQINDKTLALHILQPFIAFMNHRAHIDRRLAPIANMLLTYSKLLPAGCNVLPTVSREQFNEAKQMLLRNPDSFGRISIFPKELWSSAITPELKSVFNKLWIKNKYHSRLEKRFNLMLVAALLTQKDNNLIHQLSALFEFHYQQAPQQLGVIYQYYFEQAGVCH

SEQ ID NO: 26299 - protein, 2104 aa, Escherichia coli T1282_01
MDVQQLHYAPLLNQLHQRAVRSVVSQLALRSKSLTHYLESQYFQPPGQEGSLLADPVFESTFGWMPADETMEDLRDKLISSPLVDALSKAPVPFRHQLTAWRTILEDKKSLLVSSGTGSGKTECFMVPVLEDLIRQQKSTRQSLTGTQAIFLYPLNALINSQQERLREWTRGFKGKIRFALYNGETRHTKYEIQEDQLKVPEQALSREAIYEAPPSIMVTNTTMLEYMLIRRKDAPIIEKSQGMLKYIVLDEAHSYIGSQAAELALLLRRVMQAFNVGPGTDKPVQIIATSATIGEDSPEGNKELAKFVADLAGVTERDVKVVRGYRQIPRVSESLIRHEYPTSLTSLKSLSPQDLYQQLCHYRVAQQLRQALTHPGRQAVRLSELLNVARRTWPDINHRELLQLLDLMARSREGELAFTPLRMHGFIRTLAGLWACSNKQCSHKAHELNQSDWPFGQVWFEQRQYCDCGAPVFEVLRCSGCGSAYLSAKEEMRGDGTNWLVAQPAAAEVDEFALDVDVYSEDEDNDELDNNSQFDRLIASDGEKYIISLEETTAGKIDSEAQKHYEINLLRPESRGEGRNNSFACVCCGDTQRKNNPLFRPLRLGAPFFLNEIIPTLLEFSPLPQTREEQLGPFNGRRLLTFTDSRQGTARISARLQQDADKATLRALCYQELANITEPSAKLSPAHCALLEKVISQFSVLPLKNSIDALKKAMAANEELSPTDIQALKIIEPMVSSLSTEHAEAMQILQANSGNQQKKTMSWQTLSEQLVGSVDLADRMRGSFKELSGLDLTKQQFADFCLYSEFGRRPKNAWTLESLGLVAIHYPFIDKVTTCPQDWKTLLPDPDKQLAEWRNLLKITLDFFIRENSAVFYENEQYPRWMGARFPVKMLQGPDKKNKGQKRDQLWPQIRDRHYNRVIKLLIAVFPAIQPEQAHWKSLVNHLMIEVWDAIRPCLRQFESGYQLDIKQQAEFYSPKQVWRCPYTRRALDVTLLGYSPYLPGSKEIAPEKAVLIEMPELPVRHWRLSGGGEIAREERLEWLESNALIQHAREEGLWSTRSDRLALKDSWYRLEEHSAQRTPEQNQFNEKQFKSGKVNVLNCSTTMEMGVDIGGMSLVAMNNVPPAPANYLQRAGRAGRRGESASAAITLCKNTAHGMEVFKDPLWAFNTTASAPRVRFGSSSIVQRHVNALVLGLFLRAEVPDATKLSCKWFFEGDESQCLRFLHWLNHQADQLADKLKRLTQGTVLMSLTATQLLTRTQAMMQQVDIRWRSQLAILLENIEALKADNSAWEETPAGKAIAYQLRDYRGAYLFSKLISEAFLPGHGFPVGVVNFNYLTADELEKRRAIKATQADPNEGGESFSRRIEKLPSRDLPTALREYAPGADVVLGGKVYRSSGIMLGKVLASGQELSGDHHIPWFWHCRKCGAGATSTTHPVECSHCKADIQQLDVKRYLQPVGFATDIRYQAHNDVSMPAQLPWKDPRVLVPSSVWVSLPDAGLGRYRFSHSGELFHFSEGEFGHGYAICLSCGRAESQTQPQRTPENLKNPERENTHYLLRGGSNDRQGSNKLCHGHVHKDLWLGYSSRTDMVELQLNDDNGLLIRDEVAARSLAVALREGLAHKLGIENTELGVTTQQARDINGYTGYSIFIYDNNAGGAGYAVQLIDHWADVFNYARKLLDCSCDKFCHHCLLSYDSQHYVNRLDRHHALTLLTNVRLQRLNLAPEYQYFGDGSRVETNPLSLRIAQCLNSDIYDSCSLVLAGPQEQWDFAQWPLFKELLQFASSGGNVELLVATPLANLTDSSRHQLSALAAMPGGRLQVKSIATAQLMQGKGRWLAQVTREGQSQQWAADDSATVAPGELWGQSASSPVVTLKGTSGKTFSGQTLSAEDLLPALPTGAVRINLCEQLDGPLEGFGSRFWSLVTQQHAGWKQAFTRHKEITHVEYSDRYLNSPFTARLLGEILTELVEQGMAERASLTVCVKKLDYNSRQHDALYNAWLNEEDRQQVVTTLLEEGYLGPAWPGAISWLTGDNQSTEHGRELTVTFSDGSQHYVLLDMGLSYWRCIEDTFFDFALRVPQQVERLANTRARAVAPGNDLRSYIIAG

SEQ ID NO: 26300 - protein, 978 aa, Escherichia coli T1282_01; identical to SEQ ID NO: 25216

SEQ ID NO: 26301 - protein, 2104 aa, Escherichia coli T1840_97; identical to SEQ ID NO: 25407

SEQ ID NO: 26302 - protein, 978 aa, Escherichia coli T1840_97; identical to SEQ ID NO: 25216

SEQ ID NO: 26303 - protein, 2104 aa, Escherichia coli T234_00; identical to SEQ ID NO: 25235

SEQ ID NO: 26304 - protein, 287 aa, Escherichia coli T234_00; identical to SEQ ID NO: 25594

SEQ ID NO: 26305 - protein, 2104 aa, Escherichia coli T924_01; identical to SEQ ID NO: 25235

SEQ ID NO: 26306 - protein, 978 aa, Escherichia coli T924_01; identical to SEQ ID NO: 25216

SEQ ID NO: 26307 - protein, 2104 aa, Escherichia coli TA143; identical to SEQ ID NO: 25377

SEQ ID NO: 26308 - protein, 1119 aa, Escherichia coli TA143
MLVKTPVNPLLQWLNMFFSRRSLSGADGRALYAYRCTDTEYESLAELLRTYAPRSYPRTIFISYSDVLFSIYAAEFIRRTHTVGHPKWDTILDSIDWKVPYVHRQKLVNDGIRYWKRKIRNLGQASGYLHTLACEGGLPIRMIENESGYLITYFRRIYQALRGQASQYPAAKIAQELGDTIPVTMQNELVYEIAGEFCETLCRLLSEHPPQSSDPVSALRKLSPDWHLQLPLVLPEANAAEIVRRLLSQSSEIRSASSLQVERIWVDVDDSWYCDARFRFPATMRTEQLTSLFECNIQPEQTRLIISGKWRNGGARLAMLSRYEQQDWRVELLPIAMQKLSGADAMAEISLSLHEGPILLGHTIPKGGYELTEELPWVFEAMNESESQLKLVGMGSVSSRLNALFISLPKNSHLDISGEGEFDIPRLLKNSERSLTKISGVFSVVLHDGAVCTIRTQQLYDSAIEYYIKSTEVELVKSDYPVHRAWPKIGWKKDLQYGIVPEKELFWRSIRSGNNAWYSVSSEMPKGQIEVRRIVNDEVLFSGKVVVLPADFDINIIPESAQQGIIMLSGITDTRIDKYSNNEKVTLKSDYSQNECAIYYNSSEMLENTVDLRVSWKDGSNLKLLLPKPVSGGRFVTHDGSVHFDGVASIAHLHGIDAELLTISCAGRGYLNIELLDENPVAEKFRYLHADLPLLSGCNDKLKQISLYENYNLINAMLACAWNSNSTLSVDFYSDRFGKDKATLSIKRYDGSFIEHDQGLLVDIKNSVVFPANRIDELVVDAISLKDPGLHISLLKKDEFAYELSALNVQDSPWLIVGKLDGIARIAPVIKWVLPVLQTNDLLLNALCEADSEQRKKYFNELIFEIDNNPLQNYCCLLTEYIKKYKMNNGLSLLDLDLFRGISSNYRVVVQLLISSCLSGDSDTIYDIQEELPFSWGWIPVSIWKDVFQKCWTYLEKQINDKTLALHILQPFIAFMNHRAHIDRRLAPIANMLLTYSELLPAGCNVLPTVSREQFNEAKQMLLRNPDSFGRISIFPKELWSSAITPELKSVFNKLWIEDKYHSRLEKRFNLMLVAALLTQKDNNLIHQLSALFEFHYQQAPQQLGVIYQYYFEQAGVCH

SEQ ID NO: 26309 - protein, 2104 aa, Escherichia coli TT12B; identical to SEQ ID NO: 26185

SEQ ID NO: 26310 - protein, 978 aa, Escherichia coli TT12B; identical to SEQ ID NO: 25216

SEQ ID NO: 26311 - protein, 2104 aa, Escherichia coli TW06591; identical to SEQ ID NO: 25235

SEQ ID NO: 26312 - protein, 978 aa, Escherichia coli TW06591; identical to SEQ ID NO: 25216

SEQ ID NO: 26313 - protein, 2104 aa, Escherichia coli TW07945; identical to SEQ ID NO: 25311

SEQ ID NO: 26314 - protein, 978 aa, Escherichia coli TW07945; identical to SEQ ID NO: 25216

SEQ ID NO: 26315 - protein, 2106 aa, Escherichia coli TW09098
MDVQQLHYAPLLNQLHQRAVRSVVSQLALRSKSLTHYLESQYFQPPGQEGSLLADPVFESTFGWMPADETMEDLRDKLISSPLVDALSKAPVPFRHQLTAWRTILEDKKSLLVSSGTGSGKTECFMVPVLEDLIRQQKSTRQSLTGTQAIFLYPLNALINSQQERLREWTRGFKGKIRFALYNGETRHTKYEIQEDQLKVPEQALSREAIYEEPPSIMVTNTTMLEYMLIRRKDAPIIEKSQGMLKYIVLDEAHSYIGSQAAELALLLRRVMQAFNVGPGTDKPVQIIATSATIGEDSPEGNKELAKFVADLAGVTERDVKVVRGYRQIPRVSESLIRHEYPTSLTSLKSLSPQDLYQQLCHYRVAQQLRQALTHPGRQAVRLSELLNVARRTWPDINHRELLQLLDLMARSREGELAFTPLRMHGFIRTLAGLWACSNKQCSHKAHELNQSDWPFGQVWFEQRQYCDCGAPVFEVLRCSGCGSAYLSAKEEMRGDGTNWLVAQPAAAEVDEFALDVDVYSEDEDNDELDNNSQFDRLIASDGEKYIISLEETTAGKIDSEAQKHYEINLLRPESRGEGRNNSFACVCCGDTQRKNNPLFRPLRLGAPFFLNEIIPTLLEFSPLPQTREEQLGPFNGRRLLTFTDSRQGTARISARLQQDADKATLRALCYQELANITEPSAKLSPAHCALLEKVISQFSVLPLKNSIDALKKAMAANEELSPTDIQALKIIEPMVSSLSTEHAEAMQILQANSGNQQKKTMSWQTLSEQLVGSVDLADRMRGSFKELSGLDLTKQQFADFCLYSEFGRRPKNAWTLESLGLVAIHYPFIDKVTTCPQDWKTLLPDPDKQLAEWRNLLKITLDFFIRENSAVFYENEQYPRWMGARFPVKMLQGPDKKNKGQKRDQLWPQIRDRHYNRVIKLLIAVFPAIQPEQAHWKSLVNHLMIEVWDAIRPCLRQFESGYQLDIKQQAEFYSPKQVWRCPYTRRALDVTLLGYSPYLPGSKEIAPEKAVLIEMPELPVRHWRLSGGGEIAREERLEWLESNALIQHAREEGLWSTRSDRLALKDSWYRLEEHSAQRTPEQNQFNEKQFKSGKVNVLNCSTTMEMEMGVDIGGMSLVAMNNVPPAPANYLQRAGRAGRRGESASAAITLCKNTAHGMEVFKDPLWAFNTTASAPRVRFGSSSIVQRHVNALVLGLFLRAEVPDATKLSCKWFFEGDESQCLRFLHWLNHQADQLADKLKRLTQGTVLMSLTATQLLTRTQAMMQQVDIRWRSQLAILLENIEALKADNSAWEETPAGKAIAYQLRDYRGAYLFSKLISEAFLPGHGFPVGVVNFNYLTADELEKRRAIKATQADPNEGGESFSRRIEKLPSRDLPTALREYAPGADVVLGGKVYRSSGIMLGKVLASGQELSGDHHIPWFWHCRKCGAGATSTTHPVECSHCKADIQQLDVKRYLQPVGFATDIRYQAHNDVSMPAQLPWKDPRVLVPSSVWVSLPDAGLGRYRFSHSGELFHFSEGEFGHGYAICLSCGRAESQTQPQRTPENLKNPERENTHYLLRGGSNDRQGSNKLCHGHVHKDLWLGYSSRTDMVELQLNDDNGLLIRDEVAARSLAVALREGLAHKLGIENTELGVTTQQARDINGYTGYSIFIYDNNAGGAGYAVQLIDHWADVFNYARKLLDCSCDKFCHHCLLSYDSQHYVNRLDRHHALTLLTNVRLQRLNLAPEYQYFGDGSRVETNPLSLRIAQCLNSEIYDSCSLVLAGPQEQWDFAQWPLFKELLQFASSGGNVELLVATPLANLTDSSRHQLSALAAMPGGRLQVKSIATAQLMQGKGRWLAQVTREGQSQQWAADDSATVAPGELWGQSASSPVVTLKGTSGKTFSGQTLSAEDLLPALPTGAVRINLCEQLDGPLEGFGSRFWSLVTQQHAGWKQAFTRHKEITHVEYSDRYLNSPFTARLLGEILTELVEQGMAERASLTVCVKKLDYNSRQHDALYNAWLNEEDRQQVVTTLLEEGYLGPAWPGAISWLTGDNQSTEHGRELTVTFSDGSQHYVLLDMGLSYWRCIEDTFFDFALRVPQQVERLANTRARAVAPGNDLRSYIIAG

SEQ ID NO: 26316 - protein, 978 aa, Escherichia coli TW09098; identical to SEQ ID NO: 25216

SEQ ID NO: 26317 - protein, 2104 aa, Escherichia coli TW09109; identical to SEQ ID NO: 25235

SEQ ID NO: 26318 - protein, 982 aa, Escherichia coli TW09109; identical to SEQ ID NO: 25416

SEQ ID NO: 26319 - protein, 2104 aa, Escherichia coli TW10246; identical to SEQ ID NO: 25235

SEQ ID NO: 26320 - protein, 978 aa, Escherichia coli TW10246; identical to SEQ ID NO: 25216

SEQ ID NO: 26321 - protein, 2104 aa, Escherichia coli TW11039; identical to SEQ ID NO: 25235

SEQ ID NO: 26322 - protein, 978 aa, Escherichia coli TW11039; identical to SEQ ID NO: 25216

SEQ ID NO: 26323 - protein, 2104 aa, Escherichia coli TW14301; identical to SEQ ID NO: 25503

SEQ ID NO: 26324 - protein, 978 aa, Escherichia coli TW14301; identical to SEQ ID NO: 25504

SEQ ID NO: 26325 - protein, 2104 aa, Escherichia coli TW14313; identical to SEQ ID NO: 25311

SEQ ID NO: 26326 - protein, 375 aa, Escherichia coli TW14313
NIKRYDGSFIEHDQGLLVDIKNSVVFPANRIDELVVDAISLKNPGLHISLLKKDEFAYDLSALNVQDSPWLIVGKLDGTARIAPVIKWMLPVLQTNDLLLNALCEADPEQRKKNFNELIFEIDNNPLQNYCCLLTEYIKKYKMNNGLSLLDLDLFRGISSNYRVVVQLLISSCLSGDSDTIYDIQEELPFSWGWIPVSIWKDVFQKCWTYLEKQINDKTLALHILQPFIAFMNHRAHIDRRLAPIANMLLTYSESLPTGCDVLPTVSREQFNEAKQMLLRNPDSFGRISIFPKELWSSAITPELKSVFNKLWIEDKYHSRLEKRFNLMLVAALLTQKDNNLIHQLSALFEFHYQQAPQQLGVIYQYYFEQAGVCH

SEQ ID NO: 26327 - protein, 2104 aa, Escherichia coli Tx1686; identical to SEQ ID NO: 25503

SEQ ID NO: 26328 - protein, 978 aa, Escherichia coli Tx1686; identical to SEQ ID NO: 25504

SEQ ID NO: 26329 - protein, 2104 aa, Escherichia coli Tx3800; identical to SEQ ID NO: 25407

SEQ ID NO: 26330 - protein, 978 aa, Escherichia coli Tx3800; identical to SEQ ID NO: 25216

SEQ ID NO: 26331 - protein, 2114 aa, Escherichia coli UCI 57
MTTRYFSSLIEQSLSRSTEATLSIMGVTNPQLREHLAQQMGTDCGKPGSFLASPVFQQMFGWKESNHTMRSLTEGKALLSKAVVDSLDDQSNGRYRFGADWRPFTHQLASWKALLEKKHSVVVTSGTGSGKTECFMVPVLEDLYRELHENGNNPLVGVRALFLYPLNALINSQRERLDAWTRGFGTGIRYCLYNGNTENLHASVKSEQAKRPNEVLSREKMREEPAPILVTNGTMLEYMMVRQVDAPIIQQSKAQKSLRWIVLDEAHTYVGSQAAELALQLRRVMTAFGVTPDDVRFVATSATIAGSDAEKQLKKFLSELSGIPQERIDVLDGSRVIPELEPSKNVSLPLDEIEQIPDLDLRDKNDNKIKGISPDRFYALTHSPEARYIREMLVKQPNPMKLDEMMQRLNALTKKHYSQQEVLRWIDVCSGTQPNAKDPAFLKVRAHIFQRNTQGIWACVDKDCRLKHGTPLEKGWPFGYVYVNQRQNCDCGSPVYEVAFCNDCNEPHLLARDKKGKLVQWENKGGDEFSLQDEVPVEHDATEEKVEKENSFQPPLIIAAGESSEAGYTLQRLDRQTRRIGVINNDSIPLIINDIEQVCSASGCGYRGMSGKQPFRRALLGGPFYVTNIVPTVLEYCQDFTSDEGKEGVGPDSLPGRGRRLITFTDSRQGTARMAVRMQQEAERSRLRGSVVEILSWHQRTQTSTAPNANADLEKLATRAKQAREQAEEYRSWGLPDQAKLSQAQAEQLEQAYQAATGGKAATILVSRTWTEMVNELKERADIRGPVLQYNHYLKPEVFNENGGPLKLSEMLLFREFMRRPKRTNSLETQGLVQVGYLGLEKIHKIPLHWQEKGLTLDDWRDFLKVTLDHYVRESNFTQLDDELKNWIGSRFSSKFVRNPESKDPEDNQNRRWPQIRNGNITHRLAKLLMLGAGFKTVNTATIDIINTWLKEAWAQLTGPLAVLKPDGNRFYLPKEHMTFSLITDAWICPVTNKILDTAFKGLTPYLPTHISFEHLTQAQYDSFVAQKVTMPEIWKLDRSQEDYAEGLAKVRDWVSNQPLIAQLRSENVWTDINDRVVEGGFYYRTAEHSAQQSSERLQSYEKMFKNGQLNVLNCSTTMEMGVDIGGITAVVMNNVPPHPANYLQRAGRAGRSKESRAISYTLCKGNPHDQQVFANPLWPFETMIPAPMVAMNSARLVQRHVNALLLSDFLCNVIGETDKEKTSLDSLWFFGEDDGQSKCERFKIWLERPVLDIDTALERLVKGTALHGARAEYLRDKTINAITFLQQRWLSVYRDLVTQERESQPQTPYRKRIELEKKRHCGEYLLRDLAARTFLPGYGFPTDVVTFDNFTMEDYIREKSQKSRDKKDREDNVSRYKGLPSRNLGVAIREYAPGAEIILDGRVFRSAGVSLHWHNINADTNEAQRLDCAWRCHKCGTIGYEEGMSSSGMLFCSNSACGEKIIMDNRRQVLQPAGFVTDAHAPVTNNIETMKFVPVVPAWVFVKAEPVPLPNPLMGYMASGADGHVFQQSLGEGGHGYALCLSCGRAESMLNENDAPKSMEAHYPPRPGKADRDSQNHRLICPGSTALMKNVTLGALARTDVFEMVLRKPQNGEYLPDNTEEGRIVAMTLAVALRQALAGVLGISAAELGYSVRPVRLEDGQSVLAVQLYDVISGGAGFASSAPVHIEAILQGMVKQLGCRHCETACSECLLDSQTRHDHDLLDRKAALAWLGDDFTYYIGLPDEETFSLPDARYCPGAIGDTIRRAINEGAEKLTMWMTGAPNEWDLYARQFRAAVQNYRLKDNVEVDLVIPAGVDDPDLLHELSQFTALGVRLCHVEQDLQLPIVAQVTFADRVMTLASRSQQATIPGPEWHLNDELVVRSLGYKTVELNEFILPAKAANAVERVKDIQIHKQLNGPLSQFGQRFWDVLFNDHEEAQSLMNNTRITGVHYTDRYLQNPVALALLGSILRPLKTKLTDGAEVTLDTLFKDKDRPGNRPFHDWMSIADFQDFADQWFAAALGRPVELTVFDSPRDIPHHRKLTVTFEDGQVLKIRFDQGMGYWRINFASQWHYFDFRDDVSFQLVKMAQACKEGNVANSEESWATDVLVEVIAS

SEQ ID NO: 26332 - protein, 1096 aa, Escherichia coli UCI 57
MDQSEYISWVKCTSWLSNFLNLRGLRQPDGRPLYEYHATNDEYNQLTQLLRAVGQSQSNICNRDFAACFVLFCSEWYRRDYERQCGWTWDPIYKKIGISFTATELGTIVPKGMEDYWLRPIRFYESERRNFIGTLFSEGGLPFRLLKESDSRFLAVFSRILGQYEQAKQSGFSALSLARAVIEKSALPTVFSEDTSVELISHMADNLNSLVLTHNLINHKEPVQQLDKVHPTWRSEFPIPLDDETGTHFLNGLLCAASVEAKPRLQKNKSTRCQFYWSEKHPDELRAIVSLPDEVSFPVTSEPSTTRFELAICEDGEEVSGLGPAYASLENRQATVRLRKSEVRFVRQNPSAGLSLVARAGGMIVGSIKLDDSEIAIGEVPLTFIVDADQWLLQGQASCSVRSSDVLIVLPRDNSTVAGFDGQSSAVNVLGLQALPVKGCRDVTITANETYRIRTGREQINTGGFALHGKRASWVCHPDETFIGVPKVISTLPDIQSIDVTRYLSGISIEQCHIQEMMGAQYLSIRNSNNETLLRRKIGILPADFSVEIKGGVRANEGSIVITTQHPCVAKLKDKTLEATRKRTEGRTEIQLKAEGVPPAFITLQVLPNLAADPIDIELPFPAKGCLALDVNGRPLDKNITLHDLLGSRAFLFSRNGEPTRYTLQLHLRSVSGLQAWHEWCYTALSDRPVELNLYSLREHIENLISLEAGIDQVVEMRITGAGVVMAWQIRRYKYSLRYDYEKELLLSQSVNHRAGQIPSPVIMLLSEPERKSIPLASRMSEGVPVGEYELSSIVNKNGPWLVVPKPGEEMAFRPCFVRGESSLPVEESNIRSLQKATQLFNPQAEVNTITLVLGQMANDPAHSGWQFMRSLYDQFGYLPLATFEVWRALVQHPQALAMSLFKFEMSAEYLSRIENEFPILWEFFPIFEIKAASERFKLFLSQKGAPEETQKLLVTNMFQRLGLVFPTYADEIEKWLSNGYLPPSIPESCVHGWYQELLREHSEARWPEYGCKRLYKWMMSQKNPVIGINPDANHRYSVAWLPVFAAAVASGNTSFEAVFDRKPGAVFFLRQVRDFDSRWFKTIFQCSLLRYVAKK

SEQ ID NO: 26333 - protein, 2114 aa, Escherichia coli UCI 58; identical to SEQ ID NO: 26331

SEQ ID NO: 26334 - protein, 1096 aa, Escherichia coli UCI 58; identical to SEQ ID NO: 26332

SEQ ID NO: 26335 - protein, 2104 aa, Escherichia coli UMEA 3144-1; identical to SEQ ID NO: 25345

SEQ ID NO: 26336 - protein, 1119 aa, Escherichia coli UMEA 3144-1; identical to SEQ ID NO: 25418

SEQ ID NO: 26337 - protein, 2104 aa, Escherichia coli UMEA 3151-1
MDVQQLHYAPLLNQLHQRAVRSVVSQLALRSKSLTHYLESQYFQPPGQEGSLLADPVFESTFGWMPADETMEDLRDKLISSPLVDALSKAPVPFRHQLTAWRTILEDKKSLLVSSGTGSGKTECFMVPVLEDLIRQQKSTRQSLTGTQAIFLYPLNALINSQQERLREWTRGFKGKIRFALYNGETRHTKYEIQEDQLKVPEQALSREAIYEAPPSIMVTNTTMLEYMLIRRKDAPIIEKSQGMLKYIVLDEAHSYIGSQAAELALLLRRVMQAFNVGPGTDKPVQIIATSATIGEDSPEGNKELAKFVADLAGVTERDVKVVRGYRQIPRVSESLIRHEYPTSLTSLKSLSPQDLYQQLCHYRVAQQLRQALTHPGRQAVRLSELLNVARRTWPDINHRELLQLLDLMARSREGELAFTPLRMHGFIRTLAGLWACSNKQCSHKAHELNQSDWPFGQVWFEQRQYCDCGAPVFEVLRCSGCGSAYLSAKEEMRGDGTNWLVAQPAAAEVDEFALDVDVYSEDEDNDELDNNSQFDRLIASDGEKYIISLEETTAGKIDSEAQKHYEINLLRPESRGEGRNNSFACVCCGDTQRKNNPLFRPLRLGAPFFLNEIIPTLLEFSPLPQTREEQLGPFNGRRLLTFTDSRQGTARISARLQQDADKATLRALCYQELANITEPSAKLSPAHCALLEKVISQFSVLPLKNSIDALKKAMAANEELSPTDIQALKIIEPMVSSLSPDHAEAMQILQANSGNQQKKTMSWQTLSEQLVGSVDLADRMRGSFKELSGLDLTKQQFADFCLYSEFGRRPKNAWTLESLGLVAIHYPFIDKVTTCPQDWKTLLPDPDKQLAEWRNLLKITVDFFIRENSAVFYENEQYPRWMGARFPVKMLQGPDKKNKGQKRDQLWPQIRDRHYNRVIKLLIAVFPAIQPEQAHWKSLVNHLMIEVWDAIRPCLRQFESGYQLDIKQQAEFYSPKQVWRCPYTRRALDVTLLGYSPYLPGSKEIAPEKAVLIEMPELPVRHWRLSGGGEIAREERLEWLESNALIQHAREEGLWSTRSDRLALKDSWYRLEEHSAQRTPEQNQFNEKQFKSGKVNVLNCSTTMEMGVDIGGMSLVAMNNVPPAPANYLQRAGRAGRRGESASAAITLCKNTAHGMEVFKDPLWAFNTTASAPRVRFGSSSIVQRHVNALVLGLFLRAEVPDATKLSCKWFFEGDESQCFRFLHWLNHQADQLADKLKRLTQGTVLMSLTATQLLTRTQAMMQQVDIRWRSQLAILLENIEALKADNSAWEETPAGKAIAYQLRDYRGAYLFSKLISEAFLPGHGFPVGVVNFNYLTADELEKRRAIKATQADPNEGGESFSRRIEKLPSRDLPTALREYAPGADVVLGGKVYRSSGIMLGKVLASGQELSGDHHIPWFWHCRKCGAGATSTTRPVECSHCKADIQQLDVKRYLQPVGFATDIRYQAHNDVSMPAQLPWKDPRVLVPSSVWVSLPDAGLGRYRFSHSGELFHFSEGEFGHGYAICLSCGRAESQTQPQRTPENLKNPERENTHYLLRGGSNDRQGSNKLCHGHVHKDLWLGYSSRTDMVELQLNDDNGLLIRDEVAARSLAVALREGLAHKLGIENTELGVTTQQARDINGYTGYSIFIYDNNAGGAGYAVQLIDHWADVFNYARKLLDCSCDKFCHHCLLSYDSQHYVNRLDRHHALTLLTNVRLQRLNLAPEYQYFGDGSRVETNPLSLRIAQCLNSEIYDSCSLVLAGPQEQWDFAQWPLFKELLQFASSGGHVELLVATPLANLTDSSRHQLSALAAMPGGRLQVKSIATAQLMQGKGRWLAQVTREGQSQQWAADDSATVAPGELWGQSASSPVVTLKGTSGKTFSGQTLSAEDLLPALPTGAVRINLCEQLDGPLEGFGSRFWSLVTQQHAGWKQAFTRHKEITHVEYSDRYLNSPFTARLLGEILTELVEQGMAERASLTVCVKKLDYNSRQHDALYNAWLNEEDRQQVVTTLLEEGYLGPAWPGAISWLTGDNQSTEHGRELTVTFSDGSQHYVLLDMGLSYWRCIEDTFFDFALRLPQQVERLANTRARAVAPGNDLRSYIIAG

SEQ ID NO: 26338 - protein, 1119 aa, Escherichia coli UMEA 3151-1
MLVKTPVNPLLQWLNMFFSRRSLSGADGRALYAYRCTDTEYESLAELLRTYAPRSYPRTIFISYSDVLFSIYAAEFIRRTHTVGHPKWDTILDSINWKVPYVHRQKLVNDGIRYWKRKIRNLGQASGYLHTLACEGGLPIRMIENESGYLITYFRRIYQALRGQSSQYPAAKIAQELGDTIPVTMQNELVYEIAGEFCETLCRLLSEHPPHSSDPVSALRKLSPDWHLQLPLVLPEANAAEIVRRLLSQSSEIRSASSLQVERIWVDVDDSWYCDARFRFPATMRTEQLTSLFECHIQPEQTRLIISGKWKNGGARLAMLSRYEQQDWRVELLPIAMQKLSGADAMAEISLSLHEGPILLGHTIPKGGYELTEELPWVFEAMNESESQLKLVGMGSVSSRLNALFISLPKNSHLDISGEGEFDIPRLLKNSERSLTKISGVFSVVLHDGAVCTIRTQQLYDSAIEYYIKSTEVELVKSDYPVHRAWPKIGWKKDLQYGIVPEKELFWRSIRSGNNAWYSVASEMPKGQIEVRRIVNDEVLFSGKVVVLPADFDINIIPESAQQGIIMLSGITDTRIDKYSNNEKVTLKSDYSQNECAIYYNSSLMLENTVDLRVSWKDGSNLKLLLPKPVSGGRFVTNDGSVHFDGVASIAHLHGIDAELLTISCAGRGYLNIELLDENPVAEKFRYLHADLPLLSGRNDKLQQISLYENYNLLNAMLACAWNSNSTLCVDFYSDRFGKDKATLNIKRYDGSFIEHDQGLLVDIKNSVVFPANRIDELVVDAISLKNPGLHISLLKKDEFAYDLSALNVQDSPWLIVGKLDGTARIAPVIKWMLPVLQTNDLLLNALCEADPEQRKKNFNELIFEIDNNPLQNYCCLLTEYIKKYKMNNGLSLLDLDLFRCISSNYRVVVQLLISSCLSGDSDTIYDIQEELPFSWGWIPVSIWKDVFQKCWTYLEKQINDKTLALHILQPFIAFMNHRAHIDRRLAPIANMLLTYSESLPTGCDVLPTVSREQFNEAKQMLLRNPDSFGRISIFPKELWSSAITPELKSVFNKLWIEDKYHSRLEKRFNLMLVAALLTQKDNNLIHQLSALFEFHYQQAPQQLGVIYQYYFEQAGVCH

SEQ ID NO: 26339 - protein, 2114 aa, Escherichia coli UMEA 3201-1
MTTRYFSSLIEQSLSRSTEATLSIMGVTNPQLREHLAQQMGADCGKPGSFLASPVFQQMFGWKESNHTMRSLTEGNALLSKAVVDSLDDQSNGRYRFGADWKPFTHQLASWKALLEKKHSVVVTSGTGSGKTECFMVPVLEDLYRELHENGNNPLVGVRALFLYPLNALINSQRERLDAWTRGFGTGIRYCLYNGNTEELHAKMKTVQDNRPNEVLSREKMRLEPAPILVTNGTMLEYMMVRQVDAPIIQQSKAQKSLRWIVLDEAHTYVGSQAAELALQLRRVMTAFGVTPDDVRFVATSATIACSDAEKQLKKFLSELSGIPQERIDVLDGSRVIPELEPSKNVSVPLDEIEQIPDLDLKDKNDNKIKGISPERFYALTHSPEARYIREMLVSQPNPMKLDEMTQRLNALTKQHYSQQEVLRWIDVCSGTQPNAKDPAFLKVRAHIFQRNTQGIWACVDKDCRLKHGTPLEKGWPFGYVYVNQRQNCDCGSPVYEVAFCNDCNEPHLLAQDKKGKLVQWENKGGDEFSLQDEVPVEHDTTEEKVEKENGFLPPLIIAAGETSETGYTLQRLDHQTRRIGVINNDSIPLIINDVEQVCSASGCGYRGMSGKQPFRRALLGGPFYVTNIVPTVLEYCQDFTSDEGKEGVGPDSLPGRGRRLITFTDSRQGTARMAVRMQQEAERSLLRGSVVEILSWHQRTQTSTAPNANADLEKLAARAKQAREQAEEYRSWGMPDQAKLSQAQAEQLEQAYQAATGGKAATTLVSRTWTEMVNELKDKADIRGPVLKYNHYLQPEVFNKNGGPLKLSEMLLFREFMRRPKRTNSLETQGLVQVGYQGLEKIHKSPLHWQEKGLTLDDWRDFLKVTLDLYVRESNFTQLDDELKNWIGSRFSSKFVRNPESKDPEDNQNRRWPQIRNGNVSHRLAKLLMLGAGFKTVNTATIDIINTWLKEAWAQLTGPLAVLKPDGNRFYLPKEHMTFSLITDAWICPVTNKILDTAFKGLTPYLPTHISFEHLTQAQYDTFVAQKVTMPEIWKLDRSQEDYAEGLAKARDWVNNDPLIAQLRSENVWTDINDRVVEGGFYYRTAEHSAQQSSERLQSYEKMFKNGQLNVLNCSTTMEMGVDIGGITAVVMNNVPPHPANYLQRAGRAGRSKESRAISYTLCKGNPHDQQVFANPLWPFETMIPAPMVAMNSARLVQRHVNALLLSDFLCNVIGETDKEKTSLDSLWFFGEDDGQSKCERFKVWLERPVLDIDTALERLVKGTALHGARAEHLRDKTINAITFLQQRWLSVYRDLVTQERESQPQTPYRKRIELEKKRHCGEYLLRDLAARTFLPGYGFPTDVVTFDNFTMEDYIREKSQKSRDKKDREDNVSRYKGLPSRNLGVAIREYASGAEIILDGRVFRSAGVSLHWHNINADTNEAQRLDCAWRCHKCGTIGYEEGMSSSGMLFCSNSACGEKITMDNRRQVLQPAGFVTDAHAPVTNNIETMKFVPVVPAWVFVKAEPVPLPNPLMGYMASGADGHVFQQSLGEGGHGYALCLSCGRAESMLNENDAPKSMEAHYPPRPGKADRDSQNHRLICPGSTALMKNVTLGALARTDVFEMVLRKPQNGEYLPDNTEEGRIVAMTLAVALRQALAGVLGISAAELGYSVRPVRLEDGQSVLAVQLYDVISGGAGFASSAPVHIEAILQGMVKQLGCRHCDTACSECLLDSQTRHDHDLLDRKVALAWLGDDFTYYIGLPDEETFSLPDARYCPGAIGDTIRRAINEGAEKLTLWMTGAPNEWDLYARQFRAAIQSYRLKDNVEVDLVIPAGVDDPDLLHELSQFTALGVRLCHVEQELQLPIVAQVTFADRVMTLASRSQQATIPGPEWHLNDELVVRSLGYQTVELNEFILPAKAANAVERVKDIQIHKQLNGPLSQFGQRFWDVLFNDHEEAQSLMKNTRITGVHYTDRYLQNPVALALLGSILKPLKTKLTDGAEVALDTLFKDKDRPGNRPFHDWMSIADFQDFADQWFAAALGRPIELTVFDSPRDIPHHRKLTVTFEDGQVLKIRFDQGMGYWRINFASQWHYFDFRDDVSFQLVKMAQACKEGNVANSEESWATDVLVEVIAS

SEQ ID NO: 26340 - protein, 1096 aa, Escherichia coli UMEA 3201-1
MGQSEYISWVKCTSWLSNFVNLRGLRQPDGRPLYEYHATNAEYNQLTQLLCAVGQSQSNICNRDFAACFVLFCSEWYRRDYERQCGWTWDPIYKKIGISFTATELGTIVPKGMEDYWLRPIRFYESERRNFLGTLFSEGGLPFRLLKESDSRFLAVFSRILGQYEQAKQSGFSALSLARAVIEKSALPTVFSEDTSVELISHMADNLNSLVLTHNLTNHKEPVQQLDKVHPTWRSEFPIPLDDETGTHFLNGLLCAASVEAKPRLQKNKSTRCQFYWSEKHPDELRVIVSLPDEVSFPVTSEPSTTRFELAIYEDGEEVSGLGPAYASLENRQATVRLRKSEVRFVRQNPSAGLSLVARAGGMIVGSIKLDDSEIAIGEVPLTFIVDADQWLLQGQASCSVRSSDVLIVLPRDNSTVAGFDGQSSAVNVLGLKALPVKGCQDVTVTANETYRIRTGREQISIGRFALNGKRASWVCHPDETFIGVPKVISTLPDIQSIDVTRYLSGISIEQCHIQEMLGAQYLSIRNSNNETLLRRKIGILPADFSIEIKGGMHANEGTIVITTQHPCVATLKDKTLEATRKRTEGRTEIQLKAEGVPPAFITLQVLPNLAADTIDIELPFPAKGCLALDVNGRPLDKNITLHDLLGSRAFLFSRNGEPTKYTLQLHLRSISGLQAWHEWSYTALSERPVELNLYSLREHIENLISLEAGIDQVVEMRITGAGVVMAWQIRRYKYSLRYDYEKELLLSQSVNHRAGQIPSPVIMLLSEPERKSIPLASRMSEGVPVGEYELSSIVNKNGPWLVVPKPGEEMAFRPCFIRGESSLPVEESNIRSLQKATQLFNPQAEVNTITRVLGQMANDPAHSGWQFMRSLYDQFGYLPLATFEVWRALVQHPQALAMSLFKFEMSAEYLSRIENEFPILWEFFSIFEIKAASERFKLFLSQKGAPEETQKLLVTNMFQRLGLVFPTYADEIEKWLSNGYLPPSIPESCVHGWYQELLREHSEARWPEYGCKRLYKWMMSQKNPVIGINPDANHRYSVAWLPVFAAAVASGNASFESVFDRKPGAVFFLRQVRDFDSRWFKAIFQFSLLRYVAKK

SEQ ID NO: 26341 - protein, 2114 aa, Escherichia coli UMEA 3240-1
MTTRYFSSLIEQSLSRSTEATLSIMGVTNPQLREHLAQQMGADCGKPGSFLASPVFQQMFGWKESNHTMRSLTEGNALLSKAVVDSLDNQSNGRYRFGADWKPFTHQLASWKALLEKKHSVVVTSGTGSGKTECFMVPVLEDLYRELHENGNNPLVGVRALFLYPLNALINSQRERLDAWTRGFGTGIRYCLYNGNTENLHASVKSEQAKRPNEVLSREKMREEPAPILVTNGTMLEYMMVRQVDAPIIQQSKAQKSLRWIVLDEAHTYVGSQAAELALQLRRVMTAFGVTPDDVRFVATSATIAGSDAEKQLKKFLSELSGIPQERIDVLDGSRVIPELEPSKNVSLPLDEIEQIPDLDLRDKNDNKIKGISPERFYALTHSPEARYIREMLVKQPNPMKLDEITERLNALTKQHYSQQEVLRWIDVCSGTQPNAKDPAFLKVRAHIFQRNTQGIWACVDKDCRLKHSTPLEKGWPFGYVYVNQRQNCDCGSPVYEVAFCNDCNEPHLLARDKKGKLVQWENKGGDEFSLQDEVPVEHDATEEKVEKENSFQPPLIIAAGETSEAGYTLQRLDRQTRRIGVINNDSIPLIINDIEQVCSASGCGYRGMSGKQPFRRALLGGPFYVTNIVPTVLEYCQDFTSDEGKEGVGPDSLPGRGRRLITFTDSRQGTARMAVRMQQEAERSRLRGSVVEILSWHQRTQTSTAPNANADLEKLAARAKQAREQAEEYRSWGMPDQAKLSQAQAEQLEQAYQAATGGKAATILVSRTWTEMVNELKERADIRGPVLQYNHYLKPEVFNENGGPLKLSEMLLFREFMRRPKRTNSLETQGLVQVGYQGLEKIHKSPLHWQEKGLTLDDWRDFLKVTLDLYVRESNFTQLDDELKNWIGSRFSSKFVRNPESKDPEDNQNRRWPQIRNGNVSHRLAKLLMLGAGFKTVNTATIDIINTWLKEAWAQLTGPLAVLKPDGNRFYLPKEHMTFSLITDAWICPVTNKILDTAFKGLTPYLPTHISFEHLTQAQYDTFVAQKVTMPEIWKLDRSQEDYAEGLAKARDWVNNDPLIAQLRSENVWTDINDRVVEGGFYYRTAEHSAQQSSERLQSYEKMFKNGQLNVLNCSTTMEMGVDIGGITAVVMNNVPPHPANYLQRAGRAGRSKESRAISYTLCKGNPHDQQVFANPLWPFETMIPAPMVAMNSARLVQRHVNALLLSDFLCNVIGETDKEKTSLDSLWFFGEDDGQSKCERFKVWLERPVLDIDTALERLVKGTALHGARAEHLRDKTINAITFLQQRWLSVYRDLVTQERESQPQTPYRKRIELEKKRHCGEYLLRDLAARTFLPGYGFPTDVVTFDNFTMEDYIREKSQKSRDKKDREDNVSRYKGLPSRNLGVAIREYAPGAEIILDGRVFRSAGVSLHWHNINADTNEAQRLDCAWRCHKCGTIGYEEGMSSSGMLFCSNSACGEKITMDNRRQVLQPAGFVTDAHAPVTNNIETMKFVPVVPAWVFVKAEPVPLPNPLMGYMASGADGHVFQQSLGEGGHGYALCLSCGRAESMLNENDAPKSMEAHYPPRPGKADRDSQNHRLICPGSTALMKNVTLGALARTDVFEMVLRKPQNGEYLPDNTEEGRIVAMTLAVALRQALAGVLGISAAELGYSVRPVRLEDGQSVLAVQLYDVISGGAGFASSAPVHIEAILQGMVKQLGCRHCDTACSECLLDSQTRHDHDLLDRKVALAWLGDDFTYYIGLPDEETFSLPDARYCPGAIGDTIRRAINEGAEKLTLWMTGAPNEWDLYARQFRAAIQSYRLKDNVEVDLVIPAGVDDPDLLHELSQFTALGVRLCHVEQELQLPIVAQVTFADRVMTLASRSQQATIPGPEWHLNDELVVRSLGYQTVELNEFILPAKAANAVERVKDIQIHKQLNGPLSQFGQRFWDVLFNDHEEAQSLMKNTRITGVHYTDRYLQNPVALALLGSILKPLKTKLTDGAEVALDTLFKDKDRPGNRPFHDWMSIADFQDFADQWFAAALGRPIELTVFDSPRDIPHHRKLTVTFEDGQVLKIRFDQGMGYWRINFASQWHYFDFRDDVSFQLVKMAQACKEGNVANSEESWATDVLVEVIAS

SEQ ID NO: 26342 - protein, 333 aa, Escherichia coli UMEA 3240-1
MNMMISYQELVRTFPRMSEGVPVGEYELSSIVNKNGPWLVVPKPGEEMAFRPCFIRGEYSLPVEESNIRSLQKATQLFNPQAEVNTITLVLGQMANDPAHSGWQFMRSLYDQFGYLPLATFEVWRALVQHPQALAMSLFKFEMSAEYLSRIENEFPILWEFFPIFEIKAASERFKLFLSQKGAPEETQKLLVTNMFQRLGLVFPTYADEIEKWLSNGYLPPSIPESFVHVWYQELLREHSEAQWPEYGSKRLHSWMASQKNPVIGINPDANHRYSVALLPVFAAAVASGNASFESVFDRKPGAVFFLRQVRDFDSRWFKAIFQCSLLRYVAKK

SEQ ID NO: 26343 - protein, 2114 aa, Escherichia coli UMEA 3271-1; identical to SEQ ID NO: 25913

SEQ ID NO: 26344 - protein, 580 aa, Escherichia coli UMEA 3271-1
MLGAQYLSIRNSKNETLLRRKIGILPADFSIEIKGGIHANEGTIVITTQHPCVAKLKDKTLEATRKRTEGRTEIQLKAEGVPPAFITLQVLPNLAADPIDIELPFPAKGCLALDVNGRPLDKNITLHDLLGSRAFLFSRNGEPTKYTLQLYLRSVSGLQAWHEWCYTALSDRPVELNLYSLREHIENLISLEAGIDQVVEMRITGAGVVMAWQIRRYKYSLRYDYEKELLLSQSVNHRAGQIPSPVIMLLSEPERKSIPLASRMSEGVPVGEYELSSIVNKNGPWLVVPKPGEEMAFRPCFIRGEYSLPVEESNIRSLQKATQLFNPQAEVNTITLVLGQMANDPAHSGWQFMRSLYDQFGYLPLATFEVWRALVQHPQALAMSLFKFEMSAEYLSRIENEFPILWEFFPIFEIKAASERFKLFLSQKGAPEETQKLLVTNMFQRLGLVFPTYADEIEKWLSNGYLPPSIPESFVHVWYQELLREHSEAQWPEYGSKRLHSWMASQKNPVIGINPDANHRYSVALLPVFAAAVASGNASFESVFDRKPGAVFFLRQVRDFDSRWFKAIFQCSLLRYVAKK

SEQ ID NO: 26345 - protein, 2114 aa, Escherichia coli UMEA 3329-1; identical to SEQ ID NO: 25217

SEQ ID NO: 26346 - protein, 580 aa, Escherichia coli UMEA 3329-1
MLGAQYLSIRNSNNETLLRRKIGILPADFSIEIKGGMHANEGTIVITTQHPCVATLKDKTLEATRKRTEGRTEIQLKAEGVPPAFITLQVLPNLAADTIDIELPFPAKGCLALDVNGRPLDKNITLHDLLGSRAFLFSRNGEPTKYTLQLHLRSISGLQAWHEWSYTALSERPVELNLYSLREHIENLISLEAGIDQVVEMRITGAGVVMAWQIRRYKYSLRYDYEKELLLSQSVNHRAGQIPSPVIMLLSEPERKSIPLASRMSEGVPVGEYELSSIVNKNGPWLVVPKPGEEMAFRPCFIRGESSLPVEESNIRSLQKATQLFNPQAEVNTITRVLGQMANDPAHSGWQFMRSLYDQFGYLPLATFEVWRALVQHPQALAMSLFKFEMSAEYLSRIENEFPILWEFFPIFEIKAASERFKLFLSQKGAPEETQKLLVTNMFQRLGLVFPTYADEIEKWLSNGYLPPSIPESCVHGWYQELLREHSEARWPEYGCKRLYKWMMSQKNPVIGINPDANHRYSVAWLPVFAAAVASGNASFESVFDRKPGAVFFLRQVRDFDSRWFKAIFQFSLLRYVAKK

SEQ ID NO: 26347 - protein, 2114 aa, Escherichia coli UMEA 3355-1; identical to SEQ ID NO: 25217

SEQ ID NO: 26348 - protein, 1096 aa, Escherichia coli UMEA 3355-1; identical to SEQ ID NO: 25218

SEQ ID NO: 26349 - protein, 2114 aa, Escherichia coli UMEA 3718-1; identical to SEQ ID NO: 25395

SEQ ID NO: 26350 - protein, 1096 aa, Escherichia coli UMEA 3718-1; identical to SEQ ID NO: 25396

SEQ ID NO: 26351 - protein, 2114 aa, Escherichia coli UMEA 4076-1
MTTRYFSSLIEQSLSRSTEATLSIMGVTNPQLREHLAQQMGADCGKPGSFLASPVFQQMFGWKESNHTMRSLTEGNALLSKAVVDSLDNQSNGRYRFGADWKPFTHQLASWKALLEKKHSVVVTSGTGSGKTECFMVPVLEDLYRELHENGNNPLVGVRALFLYPLNALINSQRERLDAWTRGFGTGIRYCLYNGNTEELHAKMKTVQDNRPNEVLSREKMRLEPAPILVTNGTMLEYMMVRQVDAPIIQQSKAQKSLRWIVLDEAHTYVGSQAAELALQLRRVMTAFGVTPDDVRFVATSATIAGSDAEKQLKKFLSELSGIPKERIDVLDGSRVIPELEPSKNVSLPLDEIEQIPDLDLRDKNDNKIKGISPDRFYALTHSPEARYIREMLVKQPNPMKLDEITERLNVLTKQHYSQQEVLRWIDVCSGTQPNAKDPAFLKVRAHIFQRNTQGIWACVDKDCRLKHGTPLEKGWPFGYVYVNQRQNCDCGSPVYEVAFCNDCNEPHLLARDKKGKLVQWENKGGDEFSLQDEVPVEHDATEEKVEKENSFQPPLIIAAGESSEAGYTLQRLDRQTRRIGVINNDSIPLIINDIEQVCSASGCGYRGMSGKQPFRRALLGGPFYVTNIVPTVLEYCQDFTSDEGKDGVGPDSLPGRGRRLITFTDSRQGTARMAVRMQQEAERSLLRGSVVEILSWHQRTQTSTAPNANADLEKLAARAKQAREQAEEYRSWGMPDQAKLSQAQAEQLEQAYQAATGGKAATTLVSRTWTEMVNELKDKADIRGPVLKYNHYLQPEVFNKNGGPLKLSEMLLFREFMRRPKRTNSLETQGLVQVGYQGLEKIHKSPLHWQGKGLTLDDWRDFLKVTLDHYVRESNFTQLDDELKNWIGSRFSSKFVRNPESKDPEDNQNRRWPQIRNGNITHRLAKLLMLGAGFKTVNTATIDIINTWLKEAWAQLTGPLAVLKPDGNRFYLPKEHMTFSLITDAWICPVTNKILNTAFKGLTPYLPTHISFEHLTQAQYDSFVAQKVTMPEIWKLDRSQEDYAEGLAKVRDWVSNQPLIAQLRSENVWTDINDRVVEGGFYYRTAEHSAQQSSERLQSYEKMFKNGQLNVLNCSTTMEMGVDIGGITAVVMNNVPPHPANYLQRAGRAGRSKESRAISYTLCKGNPHDQQVFANPLWPFETMIPAPMVAMNSARLVQRHVNALLLSDFLCNVIGETDKEKTSLDSLWFFGEDDGQSKCERFKIWLERPVLDIDTALERLVKGTALHGARAEYLRDKTINAITFLQQRWLSVYRDLVTQERESQPQTPYRKRIELEKKRHCGEYLLRDLAARTFLPGYGFPTDVVTFDNFTMEDYIREKSQKSRDKKDREDNVSRYKGLPSRNLGVAIREYAPGAEIILDGRVFRSAGVSLHWHNINADTNEAQRLDCAWRCHKCGTIGYEEGMSSSGMLFCSNSACGEKIIMDNRRQVLQPAGFVTDAHAPVTNNIETMKFVPVVPAWVFVKAEPVPLPNPLMGYMASGADGHVFQQSLGEGGHGYALCLSCGRAESMLNENDAPKSMEAHYPPRPGKADRDSQNHRLICPGSTALMKNVTLGALARTDVFEMVLRKPQNGEYLPDNTEEGRIVAMTLAVALRQALAGVLGISAAELGYSVRPVRLEDGQSVLAVQLYDVISGGAGFASSAPVHIEAILQGMVKQLGCRHCETACSECLLDSQTRHDHDLLDRKAAQAWLGDDFTYYIGLPDEETFSLPDARYCPGAIGDTIRRAINEGAEKLTLWMTGAPNEWDLYARQFRAAVQNYRLKDNVEVDLVIPAGVDDPDLLHELSQFTALGVRLCHVEQDLQLPIVAQVTFADRVMTLASRSQQATIPGPEWHLNDELVVRSLGYKTVELNEFILPAKAANAVERVKDIQIHKQLNGPLSQFGQRFWDVLFNDHEEAQSLMNNTRITGVHYTDRYLQNPVALALLGSILRPLKTKLTDGAEVTLDTLFKDKGRPGNRPFHDWMSIADFQDFADQWFAAALGRPVELTVFDSPRDIPHHRKLTVTFEDGQVLKIRFDQGMGYWRINFASQWHYFDFRDDVSFQLVKMDQACQEGNVVNSEESWATDVLVEVLAS

SEQ ID NO: 26352 - protein, 1096 aa, Escherichia coli UMEA 4076-1
MGQSEYISWVKCTSWLSNFVNLRGLRQPDGRPLYEYHATNDEYTQLMQLLRAVGQSQSNICNRDFAACFVLFCSEWYRRDYERQCGWTWDPIYKKIGISFTATELGTIVPKGMEDYWLRPIRFYESERRNFLGTLFSEGGLPFRLLKESDSRFLAVFSRILGQYEQAKQSGFSALSLARAVIEKSALPTVFSEDTSVELISHMADNLNSLVLTHNLINHKEPVQQLEKVHPTWRSEFPIPLDDETGTHFLNGLLCAASVEAKPRLQKNKSTRCQFYWSEKHPDELRVIVSLPDEVSFPVTSEPSTTRFELAICEDGEEVSGLGPAYASLENRQATVRLRKSEVRFVRQNPSAGLSLVARAGGMIVGSIKLDDSEIAIGEVPLTFIVDADQWLLQGQASCSVRSSDVLIVLPRDNSNVAGFDGQSSAVNVLGLKALPVKGCQDVTVTANETYRIRTGREQISIGRFALNGKRASWVCHPDETFIGVPKVISTLPDIQSIDVTRYLSGISIEQCHIQEMLGAQYLSIRNSNNETLLRRKIGILPADFSIEIKGGMHANEGTILITTQHPCVAKLKDKTLEATRKRTEGRTEIQLKAEGVPPAFITLQVLPNLAADPIDIELPFPAKGCLALDVNGRPLDKNITLHDLLGSRAFLFSRNGEPTKYTLQLYLRSVSGLQAWHEWCYTALSDRPVELNLYSLREHIENLISLEAGIDQVVEMRITGAGVVMAWQIRRYKYSLRYDYEKELLLSQSVNHRAGQIPSPVIMLLSEPERKSIPLASRMSEGVPVGEYELSSIVNKNGPWLVVPKPGEEMAFRPCFIRGESSLPVEESNIRSLQKATQLFNPQAEVNTITLVLGQMANDPAHSGWQFMRSLYDQFGYLPLATFEVWRALVQHPQALAMSLFKFEMSAEYLSRIENEFPILWEFFPIFEIKAASERFKLFLSQKGAPEETQKLLVTNMFQRLGLVFPTYADEIEKWLSNGYLPPSIPESCVHGWYQELLREHSEARWPEYGCKRLYKWMMSQKNPVIGINPDANHRYSVAWLPVFAAAVASGNTSFEAVFDRKPGAVFFLRQVRDFDSRWFKTIFQCSLLRYVAKK

SEQ ID NO: 26353 - protein, 2114 aa, Escherichia coli UMN026; identical to SEQ ID NO: 25257

SEQ ID NO: 26354 - protein, 1112 aa, Escherichia coli UMN026; identical to SEQ ID NO: 25376

SEQ ID NO: 26355 - protein, 2104 aa, Escherichia coli Xuzhou21; identical to SEQ ID NO: 25235

SEQ ID NO: 26356 - protein, 1117 aa, Escherichia coli Xuzhou21; identical to SEQ ID NO: 25564

SEQ ID NO: 26357 - protein, 2113 aa, Escherichia fergusonii
MTTRYFSSLIEQSLSRSTEATLSIMGVTNPQLREHLAQQMGADCGKPGSFLASPVFQQMFGWKESNHTMRSLTEGNALLSKAVVDSLDNQSNGRYRFGADWKPFTHQLASWKALLEKKHSVVVTSGTGSGKTECFMVPVLEDLYRELHENGNNPLVGVRALFLYPLNALINSQRERLDAWTRGFGTGIRYCLYNGNTEELHAKMKTVQDNRPNEVLSREKMRLEPAPILVTNGTMLEYMMVRQVDAPIIQQSKAQKSLRWIVLDEAHTYVGSQAAELALQLRRVMTAFGVTPDDVRFVATSATIAGSDAEKQLKKFLSELSGIPQERIDILDGSRVIPELEPSKNVSVPLDEIEQIPDLDLKDKNDNKIKGISPERFYALTHSPEARYIREMLVSQPNPMKLDEMTQRLNALTKQHYSQQEVLRWIDVCSGTQPNAKEPAFLKVRAHIFQRNTQGIWACVDKDCRLKHGTPLEKGWPFGYVYVNQRQNCDCGSPVYEVAFCNDCNEPHLLAQDKKGKLVQWENKGGDEFSLQDEVPVEHDTTEEKVEKENGFQPPLIIAAGETSETGYTLQRLDRQTRRIGVINNDSIPLIINDKKVCGASGCGYSGVSGKQPFRRALLGGPFYVTNIVPTVLEYCQDFTSDEGKEGVGPDSLPGRGRRLITFTDSRQGTARMAVRMQQEAERSLLRGSVVEILSWHQRTQTSTAPNANADLEKLAARAKQAREQAEEYRSWGMPDQAKLSQAQAEQLEQAYQAATGGKAATTLVSRTWTEMVNELKDKADIRGPVLKYNHYLQPEVFNKNGGPLKLSEMLLFREFMRRPKRTNSLETQGLVQVGYLGLEKIHKLPLHWQERELTLDDWRDFLKVTLDHYVRESNFTQLDDELKNWIGSRFSSKFVRNPESKDPEDNQNRRWPQIRNGNVSHRLAKLLMLGAGFKTVNTATIDIINTWLKEAWAQLTGPLAVLKPDGNRFYLPKEHMTFSLITDAWICPVTNKILDTAFKGLTPYLPTHISFEHLTQAQYDTFVAQKVTMPEIWKLDRSQEDYAEGLAKARDWVSHDPLIAQLRSENVWTDINDRVVEGGFYYRTAEHSAQQSSERLQSYEKMFKNGQLNVLNCSTTMEMGVDIGGITAVVMNNVPPHPANYLQRAGRAGRSKESRAISYTLCKGNPHDQQVFANPLWPFETMIPAPMVAMNSARLVQRHVNALLLSDFLCNVIGETDKEKTSLDSLWFFGEDDGQSKCERFKIWLERPVLDIDTALERLVKGTALHGARAEYLRDKTINAITFLQQRWLSVYRDLVTQERESQPQTPYRKRIELEKKRHCGEYLLRDLAARTFLPGYGFPTDVVTFDNFTMEDYIREKSQKSRDKKDREDNVSRYKGLPSRNLGVAIREYAPGAEIILDGRVFRSAGVSLHWHNINADTNEAQRLDCAWRCHKCGTIGYEEGMSSSGMLFCSNSACGEKIIMDNRRQVLQPAGFVTDAHAPVTNNIETMKFVPVVPAWVFVKAEPVPLPNPLMGYMASGADGHVFQQSLGEGGHGYALCLSCGRAESMLNENDAPKSMEAHYPPRPGKADRDSQNHRLICPGSTALMKNVTLGALARTDVFEMVLRKPQNGEYLPDNTEEGRIVAMTLAVALRQALAGVLGISAAELGYSVRPVRLEDGQSVLAVQLYDVISGGAGFASSAPVHIEAILQGMVKQLGCRHCETACSECLLDSQTRHDHDLLDRKAALAWLGDDFTYYIGLPDEETFSLPDARYCPGAIGDTIRRAINEGAEKLTLWMTGAPNEWDLYARQFRAAVQNYRLKDNVEVDLVIPAGVDDPDLLHELSQFTALGVRLCHVEQDLQLPIVAQVTFADRVMTLASRSQQATIPGPEWHLNDELVVRSLGYKTVELNEFILPAKATNAVERVKDIQIHKQLNGPLSQFGQRFWDVLFNEHEEAQSLMNNTRITGVHYTDRYLQNPVAQALLGSILRPLKTKLTDGAEVTLDTLFKDKDRPGNRPFHDWMSIADFQDFADQWFAAALGRPVELTVFDSPRDIPHHRKLTVTFEDGQVLKIRFDQGMGYWRINFSSQWHYFDFRDDVSFQLVKMDQACQEGNVVNSEESWATDVLVEVIAS

SEQ ID NO: 26358 - protein, 1096 aa, Escherichia fergusonii
MGQSEYISWVKCTSWLSNFVNLRGLRQPDGRPLYEYHATNDEYTQLTQLLRAVGQSQSNICNRDFAACFVLFCSEWYRRDYERQCGWTWDPIYKKIGISFTATELGTIVPKGMEDYWLRPIRFYESERRNFLGTLFSEGGLPFRLLKESDSRFLAVFSRILGQYEQAKQSGFSALSLARAVIEKSALPTVFSEDTSVELISHMADNLNSLVLTHNLINHKEPVQQLDKVHPTWRSEFPIPLDDDTGTHFLNGLLCAASVEAKPRLQKNKSTRCQFYWSEKHPDELRAIVSLPDEVSFPVTSEPSTTRFELAICEDGEEVSGLGPAYASLENRQATVRLRKSEVRFVRQNPSAGLSLVARAGGMIVGSIKLDDSEIAIGEVPLTFIVDADQWLLQGQASCSVRSSDVLIVLPRDNSNVAGFDGQSSAVNVLGLKALPVKGCQDVTVTANETYRIRTGREQISIGRFALNGKRASWVCHPDETFIGVPKVISTLPDIQSIDVTRYLSGISIEQCHIQEMLGAQYLSIRNSNNETLLRRKIGILPADFSIEIKGGMHANEGTILITTQHPCVAKLKDKTLEATRKRTEGRTEIQLKAEGVPPAFITLQVLPNLAADPIDIELPFPAKGCLALDVNGRPLDKNITLHDLLGSRAFLFSRNGEPTKYTLQLYLRSVSGLQAWHEWCYTALSDRPVELNLYSLREHIENLISLEAGIDQVVEMRITGAGVVMAWQIRRYKYSLRYDYEKELLLSQSVNHRAGQIPSPVIMLLSEPERKSIPLASRMSEGVPVGEYELSSIVNKNGPWLVVPKPGEEMAFRPCFIRGESSLPVEESNIRSLQKATQLFNPQAEVNTITLVLGQMANDPAHSGWQFMRSLYDQFGYLPLATFEVWRALVQHPQALAMSLFKFEMSAEYLSRIENEFPILWEFFPIFEIKAASERFKLFLSQKGAPEETQKLLVTNMFQRLGLVFPTYADEIEKWLSNGYLPPSIPESFVHVWYQELLREHSEAQWPEYGSKRLHSWMASQKNPVIGINPDANHRYSVALLPVFAAAVASGNASFESVFDRKPGAVFFLRQVRDFDSRWFKAIFQCSLLRYVAKK

SEQ ID NO: 26359 - protein, 2113 aa, Escherichia fergusonii ATCC 35469
MTTRYFSSLIEQSLSRSTEATLSIMGVTNPQLREHLAQQMGADCGKPGSFLASPVFQQMFGWKESNHTMRSLTEGNALLSKAVVDSLDDQNNGRYRFGADWRPFTHQLASWKALLEKKHSVVVTSGTGSGKTECFMVPVLEDLYRELHENGNNPLVGVRALFLYPLNALINSQRERLDAWTRGFGTGIRYCLYNGNTEELHAKMKTVQDNRPNEVLSREKMRLEPAPILVTNGTMLEYMMVRQVDSPIIQQSKAQKSLRWIVLDEAHTYVGSQAAELALQLRRVMTAFGVTPDDVRFVATSATIAGSDAEKQLKKFLSELSGIPQERIDILDGSRVIPELEPSKNVSVPLDEIEQIPDLDLKDKNDNKIKGISPERFYALTHSPEARYIREMLVKQPNPMKLDEITERLNVLTKQHYSQQEVLRWIDVCSGTQPNAKDPAFLKVRAHIFQRNTQGIWACVDKDCRLKHGTPLEKGWPFGYVYVNQRQNCDCGSPVYEVAFCNDCNEPHLLAQDKKGKLVQWENKGGDEFSLQDEVPVEHDTTEEKVEKENGFQPPLIIAAGETSETGYTLQRLDRQTRRIGVINNDSIPLIINDKKVCGASGCGYSGVSGKQPFRRALLGGPFYVTNIVPTVLEYCQDFTSDEGKEGVGPDSLPGRGRRLITFTDSRQGTARMAVRMQQEAERSRLRGSVVEILSWHQRTQTSTAPNANADLEKLAARAKQAREQAEEYRSWGMPDQAKLSQAQAEQLEQAYQAATGGKAATILVSRTWTEMVNELKERADIRGPVLQYNHYLKPEVFNENGGPLKLSEMLLFREFMRRPKRTNSLETQGLVQVGYQGLEKIHKSPLHWQEKGLTLDDWRDFLKVTLDHYVRESNFTQLDDELKNWIGSRFSSKFVRNPESKDPEDNQNRRWPQIRNGNVSHRLAKLLMLGAGFKIVNAATIDIINTWLKEAWAQLTGPLAVLKPDGNRFYLPKEHMTFSLITDAWICPVTNKILDTAFKGLTPYLPTHISFEHLTQAQYDTFVAQKVTMPEIWKLDRSQEDYAEGLAKARDWVSNDPLIAQLRSENVWTDINDRVVEGGFYYRTAEHSAQQSSERLQSYEKMFKNGQLNVLNCSTTMEMGVDIGGITAVVMNNVPPHPANYLQRAGRAGRSKESRAISYTLCKGNPHDQQVFANPLWPFETMIPAPMVAMNSARLVQRHVNALLLSDFLCNVIGETDKEKTSLDSLWFFGEDDGQSKCERFKIWLERPVLDIDTALERLVKGTALHGARAEYLRDKTINAITFLQQRWLSVYRDLVTQERESQPQTPYRKRIELEKKRHCGEYLLRDLAARTFLPGYGFPTDVVTFDNFTMEDYIREKSQKSRDKKDREDNVSRYKGLPSRNLGVAIREYAPGAEIILDGRVFRSAGVSLHWHNINADTNEAQRLDCAWRCHKCGTIGYEEGMSSSGMLFCSNSACGEKIIMDNRRQVLQPAGFVTDAHAPVTNNIETMKFVPVVPAWVFVKAEPVPLPNPLMGYMASGADGHVFQQSLGEGGHGYALCLSCGRAESMLNENDAPKSMEAHYPPRPGKADRDSQNHRLICPGSTALMKNVTLGALARTDVFEMVLRKPQNGEYLPDNTEEGRIVAMTLTVALRQALAGVLGISAAELGYSVRPVRLEDGQSVLAVQLYDVISGGAGFASSAPVHIEAILQGMVKQLGCRHCETACSECLLDSQTRHDHDLLDRKAALAWLGDDFTYYIGLPDEETFSLPDARYCPGAIGDTIRRAINEGAEKLTLWMTGAPNEWDLYARQFRAAVQNYRLKDNVEVDLVIPAGVDDPDLLHELSQFTALGVRLCHVEQDLQLPIVAQVTFADRVMTLASRSQQATIPGPEWHLNDELVVRSLGYKTVELNEFILPAKATNAVERVKDIQIHKQLNGPLSQFGQRFWDVLFNEHEEAQSLMNNTRITGVHYTDRYLQNPVALALLGSILRPLKTKLTDGAEATLDTLFKDKDRPGNRPFHDWMSIADFQDFADQWFAAALGRPVELTVFDSPRDIPHHRKLTVTFEDGQVLKIRFDQGMGYWRINFSSQWHYFDFRDDVSFQLVKMAQACKEGNVANSEESWATDVLVEVIAF

SEQ ID NO: 26360 - protein, 1112 aa, Escherichia fergusonii ATCC 35469
MLWGFVFVSFISKELALGQSEYISWVKCTSWLSNFVNLRGLRQPDGRPLYEYHATNDEYTQLTQLLRAVGQSQSNICNRDFAACFVLFCSEWYRRDYERQCGWTWDPIYKKIGISFTATELGTIVPKGMEDYWLRPIRFYESERRNFLGTLFSEGGLPFRLLKESDSRFLAVFSRILGQYEQAKQSGFSALSLARAVIEKSALPTVFSEDTSVELISHMADNLNSLVLTHNLINHKEPVQQLDKVHPTWRSEFPIPLDDETGTHFLNGLLCAASVEAKPRLQKNKSTRCQFYWSEKHPDELRAIVSLPDEVSFPVTSEPSTTRFELAICEDGEEVSGLGPAYASLENRQATVRLRKSEVRFGRQNPSAGLSLVARAGGMIVGSIKLDDSEIAIGEVPLTFIVDADQWLLQGQASCSVRSSDVLIVLPRDNSNVAGFDGQSSAVNVLGLKALPVKGCQDVTVTANETYRIRTGREQISFGRFALNGKRASWVCHPDETFIGVPKVISTLPDIQSIDVTRYLSGISIEQCHIQEMLGAQYLSIRNSKNETLLRRKIGILPADFSIEIKGGIHANEGTIVITTQHPCVAKLKDKTLEATRKRTEGRTEIQLKAEGVPPAFITLQVLPNLAADPIDIELPFPAKGCLALDVNGRPLDKNITLHDLLGSRAFLFSRNGEPTRYTLQLHLRSVSGLQAWHEWCYTALSDRPVELNLYSLREHIENLISLETGIDQVVEMRITGAGVVMAWQIRRYKYSLRYDYEKELLLSQSVNHRAGQIPSPVIMLLSEPERKSIPLASRMSEGVPVGEYELSSIVNKNGPWLVVPKPGEEMAFRPCFIRGESSLPVEESNIRSLQKATQLFNPQAEVNTITLVLGQMANDPAHSGWQFMRSLYDQFGYLPLATFEVWRALVQHPQALAMSLFKFEMSAEYLSRIENEFPILWEFFPIFEIKAASERFKLFLSQKGAPEETQKLLVTNMFQRLGLVFPTYADEIEKWLSNGYLPPSIPESCVHGWYQELLREHSEARWPEYGCKRLYKWMMSQKNPVIGINPDADYRYSVAWLPVFAAAVASGNTSFEAVFDRKPGAVFFLRQVRDFDSRWFKTIFQCSLLRYIAKK

SEQ ID NO: 26361 - protein, 2114 aa, Escherichia fergusonii B253
MTTRYFSSLIEQSLSRSTEATLSIMGVTNPQLREHLAQQMGADCGKPGSFLASPVFQQMFGWKESNHTMRSLTEGNALLSKAVVDSLDNQSNGRYRFGADWKPFTHQLASWKALLEKKHSVVVTSGTGSGKTECFMVPVLEDLYRELHENGNNPLVGVRALFLYPLNALINSQRERLDAWTRGFGTGIRYCLYNGNTEELHAKMKTVQDNRPNEVLSREKMRLEPAPILVTNGTMLEYMMVRQVDAPIIQQSKAQKSLRWIVLDEAHTYVGSQAAELALQLRRVMTAFGVTPDDVRFVATSATIAGSDAEKQLKKFLSELSGIPQERIDVLDGSRVIPELEPSKNVSLPLDEIEQIPDLDLRDKNDNKIKGISPERFYALTHSPEARYIREMLVKQPNPMKLDEITERLNVLTKQHYSQQEVLRWIDVCSGTQPNAKDPAFLKVRAHIFQRNTQGIWACVDKDCRLKHGTPLEKGWPFGYVYVNQRQNCDCGSPVYEVAFCNDCNEPHLLARDKKGKLVQWENKGGDEFSLQDEVPVEHDATEEKVEKENSFQPPLIIAAGETSEAGYTLQRLDRQTRRIGVINNDSIPLIINDIEQVCSASGCGYRGMSGKQPFRRALLGGPFYVTNIVPTVLEYCQDFTSDEGKEGVGPDSLPGRGRRLITFTDSRQGTARMAVRMQQEAERSRLRGSVVEILSWHQRTQTSTAPNANADLEKLAARAKQAREQAEEYRSWGMPDQAKLSQAQAEQLEQAYQAATGGKAATILVSRTWTEMVNELKERADIRGPVLQYNHYLKPEVFNENGGPLKLSEMLLFREFMRRPKRTNSLETQGLVQVGYQGLEKIHKSPLHWQEKGLTLDDWRDFLKVTLDHYVRESNFTQLDDELKNWIGSRFSSKFVRNPESKDPEDNQNRRWPQIRNGNVSHRLAKLLMLGAGFKTANAATIDIINTWLKEAWAQLTGPLAVLKPDGNRFYLPKEHMTFSLITDAWICPVTNKILDTAFKGLTPYLPTHISFEHLTQAQYDTFVAQKVTMPEIWKLDRSQEDYAEGLAKARDWVSHDPLIAQLRSENVWTDINDRVVEGGFYYRTAEHSAQQSSERLQSYEKMFKNGQLNVLNCSTTMEMGVDIGGITAVVMNNVPPHPANYLQRAGRAGRSKESRAISYTLCKGNPHDQQVFANPLWPFETMIPAPMVAMNSARLVQRHVNALLLSDFLCNVIGETDKEKTSLDSLWFFGEDDGQSKCERFKIWLERPVLDIDTALERLVKGTALHGARAEYLRDKTINAITFLQQRWLSVYRDLVTQERESQPQTPYRKRIELEKKRHCGEYLLRDLAARTFLPGYGFPTDVVTFDNFTMEDYIREKSQKSRDKKDREDNVSRYKGLPSRNLGVAIREYAPGAEIILDGRVFRSAGVSLHWHNINADTNEAQRLDCAWRCHKCGTIGYEEGMSSSGMLFCSNSACGEKIIMDNRRQVLQPAGFVTDAHAPVTNNIETMKFVPVVPAWVFVKAEPVPLPNPLMGYMASGADGHVFQQSLGEGGHGYALCLSCGRAESMLNENDAPKSMEAHYPPRPGKADRDSQNHRLICPGSTALMKNVTLGALARTDVFEMVLRKPQNGEYLPDNTEEGRIVAMTLAVALRQALAGVLGISAAELGYSVRPVRLEDGQSVLAVQLYDVISGGAGFASSAPVHIEAILQGMVKQLGCRHCETACSECLLDSQTRHDHDLLDRKAALAWLGDDFTYYIGLPDEETFSLPDARYCPGAIGDTIRRAINEGAEKLTLWMTGAPNEWDLYARQFRAAVQNYRLKDNVEVDLVIPAGVDDPDLLHELSQFTALGVRLCHVEQNLQLPIVAQVTFADRVMTLASRSQQATIPGPEWHLNDELVVRSLGYKTVELNEFILPAKAANAVERVKDIQIHKQLNGPLSQFGQRFWDVLFNDHEEAQSLMNNTRITGVHYTDRYLQNPVALALLGSILRPLKTKLTDGAEVTLDTLFKDKDRPGNRPFHDWMSIADFQDFADQWFAAALGRPVELTVFDSPRDIPHHRKLTVTFEDGQVLKIRFDQGMGYWRINFSSQWHYFDFRDDVSFQLVKMDQACQEGNVVNSEESWATDVLVEVIAS

SEQ ID NO: 26362 - protein, 1096 aa, Escherichia fergusonii B253
MGQSEYISWVKCTSWLSNFVNLRGLRQPDGRPLYEYHATNDEYTQLTQLLRAVGQSQSNICNRDFAACFVLFCSEWYRRDYERQCGWTWDPIYKKIGISFTATELGTIVPKGMEDYWLRPIRFYESERRNFLGTLFSEGGLPFRLLKESDSRFLAVFSRILGQYEQAKQSGFSALSLARAVIEKSALPTVFSEDTSVELISHMADNLNSLVLTHNLINHKEPVQQLDKVHPTWRSEFPIPLDDETGTHFLNGLLCAASVEAKPRLQKNKSTRCQFYWSEKHPDELRAIVSLPDEVSFPVTSEPSTTRFELAICEDGEEVSGLGPAYASLENRQATVRLRKSEVRFVRQNPSAGLSLVARAGGMIVGSIKLDDSEIAIGEVPLTFIVDADQWLLQGQASCSVRSSDVLIVLPRDNSNVAGFDGQSSAVNVLGLKALPVKGCQDVTVTANETYRIRTGREQISFGRFALNGKRASWVCHPDETFIGVPKVISTLPDIQSIDVTRYLSGISIEQCHIQEMLGAQYLSIRNSKNETLLRRKIGILPADFSIEIKGGIHANEGTIVITTQHPCVAKLKDKTLEATRKRTEGRTEIQLKAEGVPPAFITLQVLPNLAADPIDIELPFPAKGCLALDVNGRPLDKNITLHDLLGSRAFLFSRNGEPTRYTLQLHLRSVSGLQAWHEWCYTALSDRPVELNLYSLREHIENLISLETGIDQVVEMRITGAGVVMAWQIRRYKYSLRYDYEKELLLSQSVNHRAGQIPSPVIMLLSEPERKSIPLASRMSEGVPVGEYELSSIVNKNGPWLVVPKPGEEMAFRPCFIRGESSLPIEESNIRSLQKATQLFNPQAEVNTITLVLGQMANDPAHSGWQFMRSLYDQFGYLPLATFEVWRALVQHPQALAMSLFKFEMSAEYLSRIENEFPILWEFFPIFEIKAASERFKLFLSQKGAPEETQKLLVTNMFQRLGLVFPTYADEIEKWLSNGYLPPSIPESFVHVWYQELLREHSEAQWPEYGSKRLHSWMASQKNPVIGINPDANHRYSVALLPVFAAAVASGNASFESVFDRKPGAVFFLRQVRDFDSRWFKAIFQCSLLRYVAKK

SEQ ID NO: 26363 - protein, 2114 aa, Escherichia sp. KTE172; identical to SEQ ID NO: 25891

SEQ ID NO: 26364 - protein, 894 aa, Escherichia sp. KTE172; identical to SEQ ID NO: 25892

SEQ ID NO: 26365 - protein, 2084 aa, Geobacter sulfurreducens
MSNESYSYFSILIRELGQRAARAFISKFSPVSTPLRLHLHDVFERPPGETGSFLADPVFEASFGWQQASMTMQELAGTLLNKRLVTAMDTPPKDLAEQRFGADWHPYTHQVTAWKTLKESPPRSIIVSSGTGSGKTECFLVPILSDLADQLDRKETLEGVQALMLYPLNALINSQRDRLRAWTTEFKGGIRYALYNGETPDDESQAVQNETPEEVLSRKLLRSSPPPILVTNSTMLEYMLVRQQDNPILEKSKGKLRWIVLDEAHTYIGSHAAEISLLLRRVLHAFGVEAHEVRFIATSATIGSAGDESASRQLQHYLADVAGVDPDRVTVVTGNRQVPALDTTYTQTDHPLPPIPELRQLDPEPLYATLAKNKRVRLLRQELTERGPMTISELAEVYAGKEHPSLDEKTRALELLDLCRVAQREGETLIPLRGHLFHRTQSGIWACCNNACAGREGTPLDSFEWPFGKIYMERRERCDAPGCGSKVYEVIFCDSCGEEYLSAEEKVVDEKSVLVPYAIDVNEDDAEDEGLVDEENPDEEAEPYPYSFPRLISDAKYVEVPASVDRITGGLGETGQNAIQLGLTCQDDGFRCHRCGQKEKRQGQLFRPARSGAAYHLLMSIPTLLEHTPPISEKATSVPFGGRRLITFSDSRQGTARFSLQSQLDAERNYSRSWLYHQLYASKPCIAPEDLATKKSQLAGLELAFQQTQLEDLKSLIAEKRKEIESYELSSCCFMSWTEALQHMQGTEVLQVWMPEQWRHTAFRHLTAHQIAQLCLIREFARRPKRQTSLETLGMVSLHYPDLDRIGESDLPSAWKQRRLGVQEWRDFLKIAVDFTIRGTCAVQVPHEYNRWIGIDLPTRFVIGPDDVPSSRRQQRWPLVRDAIPRSRLPILLFRALALSPDDRADRSDINELLAAAWAQIRARVLSQEQDGYRLSLERKVVFKSVQDAWFCPVTRRVVDVTLMGWSPYTSMEIPEALAKCTKIQLPELRYPFTRDSGKSVSRETVLDWLETDPRIAELRKLGVWSAYSDRIATFSDFYRINEHSAQQNSARLRKLEEGFKTARINVLSCSTTMEMGVDIGGVSCVAMNNAPPSPANYLQRAGRAGRRKESAAVSFTLCQSAPHGESVFSNPVWPFRTPIKLPHVSLQSARIIQRHINALTLTRFLQQHAQDLTKLQCQWFFTAPTEDASSPATTMELWVQKHEERLEDTWLIRGIRRLSRGTALEGVEPTRLLEQVGLQLCRIKDRWLEEENSLKAELENAGGEPSDQARATPAQLAILKQLKRIYDEYLLGELAASGFLPGYGFPTSVVPFINSTLETLRRDSRASNEREDNRSQRRGYPSRDLPMAIREYAPGSDIVIDGQVFTSEGVTLNWHIPAGDYTEAPELQSFRNAWRCRSCGSSGTRSTLLHSCPVCGADSNLLVIKPYLQPAGFAVNIYTEPHNDLSYRRYMPVHKPWITAGQTPWSPLPRPELGRYRFSHEGHIFYQSGGLMGHGYAICLRCGRAASEIEVGGALPVELQDHYRLRGGMERNGQSLCPGNDQQWAIKRNQWLGMGVSTDVFELQLSDPVTGVPLNDDVAAYSLATALRQALAEELGINDREISCASIPSRTPTNQLARSIVLYDTSTGGAGFVAAVASHLPRLLERAKEILACKKNCDTACHSCLLTYDTQHDVARLNRHEALTQISPQLLKGLSLPKELHYFGPQSRLEFDELQFALYREMQRSDVDELRIYLGGSLENWDFLDWPIRSSLLKWASEERKVVLLAKKEAIFSLDSSVANPLASLIEAGGIELREIAQHEDDIQVPNLIAEVGGKQRSVRWATTSSDCLTPSESWARANQDDRCVKISGSRPLLPIKGEVIDTAQVRRVPPGSFTELVITKELDGPIDNFGGLFWQQVAAKLPHLKERLEQRKPISFVEFRDRFFSSPLNVKLLAEAVKGLSAYFGQFDSGVKLVIETTDFIKQNYKPSEFLHDDWQIRQHRNVAIAQLLKASGGTVSVKEVPKNQSQHARDISICWCDGAKCTIRLDHGLSFMKSTSIVPFNFNIDALTQVASLMTLSCNLMNRLTTTGTYIYLSDVSDVQK

SEQ ID NO: 26366 - protein, 1141 aa, Geobacter sulfurreducens
MPRCPEIIVSILKRHNLSDADGRMLCKYRCSEIEYENIQAELRDIIRFRNGHLNGSTLEVAAFCLYASEWWRKNYDSGHWTWNGILVSLGLDADYNRIDLYEPVRKGLKFWKRGLLTVGDRNAYFITLACEGGLPLKIIHREGYNYLQQYLKALLNEFRVYGRGEISSFELAGRIGSRLPMGLRQKPLFQLCGELIEQVWNLQHSIGDTSTPIEDLDRTQPSWRENFPLVVSDEAAKALLNSLIKDAVKIARIQEIKISTILKRIGTTYRLERKIQIPPSFDAPSLAAQLQIPVHQLPYNVQLYLCKQSAPRQLLALVTRRTAGDDGRFAAEIPGGAPNTVSGISAVEQLWLDARSNNITREIRNIKGSLGLSELPWVFSAKDSNADQWELIGEGGLRTRHPFVVVAIPSTSNIISSDDLCEYLGEDSQLGRQLYHISGTVVVSDGTSNTTICTKAVEEDSAQYAMSGDFLSHGTFGSNIYKGIPKILSYLENGAIQIIPEAQLQWRTRRGSDAWKSDLRTCCGPVAIRHVRQGETHFMTNIDVVPRDGKITFIPGRNAREGAIEITGMAAMQYGCTTNHAGLQITTTTFPEGVRFECIAANDPPANLDVHIRWHLGQELALSVPYPARGVRFINRDGTVLHNDEIIHMTRMAGVTVQVMDLDPTLTFSIEATALSNRLPGLKLESIRLEEVAPGRHEIDLRQLQDGCNLLFSAVEDLDAMIKIGVISNKFTTFPQRIYVARYDLNIKPDRDAGEVYIPENELETLNGDASRLEFRAFPLANPDQEHEVLPATSSGRWQFHREDRALGPWLITGWDGDWSRIRPLCWTVYDDSMSAPYDATDKSFDSVVRLVAQRDRSDACDELLGRLSADPNHNDWKKVNACFNHLKHLPATTFDVIGRLARHPDAAATAILKAGEDTFDEVWTGLERLPFAWYLVPVSSWMKAVKLRERSLRETLAPLAESFGGNLDTVIESSFRTFLNQVPIRQPGMQTLVELTRHKLFSTPITNLPCLNMFTNSPFQIMRGLIVTPAEQDLLQMHADDIWPTCPELEEEWWPTIQGQIPADLHTLWNTSIMGAGFRLSVLNAPVAAAYCATFNIKLKKRMVFNIRKLREFDPTWFDVAYGYALASSIGYCIRNDREL

SEQ ID NO: 26367 - protein, 2084 aa, Gimesia maris DSM 8797
MSDSYFLSLMTRLREQTARATISDKNPSNDALRQFLLRNFEALPGKDASLLSQPVFESLFEYEKNADILSDIDFLHPTLINLLDAPPKDHAERRFPRTERPYKHQIAAWQALKENPARSVIVSTGTASGKTECFLIPILDDLVREWEATRKKQLVGVRALFLYPLNALINSQQERLSAWTAGLKGGVRYCLYNGATPTSCNSADQSARPEQVLSRKNLWDSPPPILVTNATMLEYMLVRSQDRPIIDKSEGKLRWIVLDEAHTYLGSNAAEISLLLRRVMNAFNTDPQNVRFVATSATIGGSGNEKAKNQLQKYLADLAGIDVSQVNVIGGRRITPTLEVPEAKLPLPTMEELKSLDNYEARWSRLAASAEVRGLRNTLGKKALTLPQVSAELNIENDPDFTLQILDACSESPAKKNSSSTLLPLRGHYFLRTTPGVWACCNPECEGRSDELADDSWPFGAVYFDHRKVCQHCNSLVFDVLLCNDCGEVYLGAHEGDENQLFANPWNDETESDDFEIELNDEPSLEDEAQELDAVSVSPAGSTAKQLLCSRAPNDLMTGPVPYDTQTGKLADDDARTASFLFALPEPDTGSLRCVACGGRDSDRWQQFSTIRLGGPFYLGVSIPILLSHAPVHQDQTKKKPFEGRQMISFTDSRQGTARFAVRMQRESEINYVRSFIYHKLWSLAKSVDSAELIRLEGTVASLEKVASTSPELQQLYQEKLQKLNQLKSQQDTPQATIAWSDLSSALAKEPAVEFFIRESTRQRYLSAIHEPNELAEMFLFREFLSRPRRKNSLETLGLASIWFPAIEACDPPEEWLSRRRGKSEWCVFLKLCVDYLVRTNYCSEIRRDYLRWIGVRFRQRELVPPDQDIISRLQVRWPSVRRNRGRASRIMMLLQLVLGLNLENDHDKTLIDVILRAAWRQLTMSDIFNQTTEGYQLNFNKSEIRIATSGYLCPVTRRFLDACIGGISPYHDRRSLATFGLAAEVVMPTLPFPFSRKDGHTVSPDEVSDWLATDSVTQAARNAGVWSQFNDRIVFLSPYFETAEHSGQLSKSRLQFLEKRFRKGMTNLLSCSTTMEMGIDIGGLTSVAMNNAPPGPANWLQRAGRAGRRGITRASTLTLCRELPHGQAVFRNPLWPFTTPIHVPTVSLNSDRIVQRHINALLLGSFIAAESDNATKLECKWFFLPEQELPSRCHRFASWLEETAESCEQIVRGIERLQARTLLQSDSVRRILDHSSRMIQEISTRWSQQRESLWEQLEIVGGAPEQNEQIGSEQAAVLRQLRRHEEEYLLRELVGGGFLPSHGFPLHVLPFVNTSVESIESERQSHLNADSQGREDNQFQYRSYPSRELDVAIREYAPGNRVVIDGLSYQSAGLTLNWQIPPNDSAVKEIQALRWVWWCQSCGSFATSTQRQETCHCGSNEIVNKKYIQPSGFAVDIRRGPNSEDEVRTFVPPTDPRVTCESPWVSLSNPETGQIRYSSDGRVFHHSKGATEYGYAVCLECGRAASETGDAGEGAAIPFDVSGNHERLRTGRKNENTHICSGSDRAFAIQRNLWLGGEDLTDVVQIRLQHPHRERRLMTTSVATSLAIALRTSLAEHLGVESREIGWAVQSSIEDGVNYRDVFLYDAAAGGAGYVAAIPHSFEGLLNRVRENLNSCDCDSACHFCLLDFDTQRSADELDRNALLSWLDDDLMNAIKVPDSYQCFGTATRYESGCIVEGIMAESKRPGLSQICVYLNGQHDAWDLSDWSLYRHLAKLSLSKQGAHISIIVPSSICNQLPWSTLHALTRIAETNEIELIEMPDSMCRVENGYRAAEVCSAGRYVEWAVFEPSVLEAGNRWGIGHPKSPSVRESHNRESHNTVLKNDSQFQEGRKLSLSLIESQKPNQCQIYKAGGELNGEVENLGVAFWGQIQKVAPWITEAMNDGPPLTVEYSDRYLVSPLAVRLLYEVLKELLAGSHGSSKLSIQTMKVDNHPVTGRCLHHNWQNERAQESTLKHVFNHVAKSSVRLLRKNKLAHARTMRIKWPGDRLAVITLDQGMGFAESESQIPFSFHDSPEKQANSIISRQFNVRQYDHEVPIYVAGVE

SEQ ID NO: 26368 - protein, 1176 aa, Gimesia maris DSM 8797
MQQKFNTCEASSRFSDQSALLSEIFFATEESILASQIQNILDHIIERSGLDPVDKHPLYAYKVTQEELLMLQAALKDALQVNPELRKKEQQAAFCLFGAEWFRRNHDQGPWSWDIILDDGLGLKGSTKKSFRNNSVRHTTAAGLNWWKVPLVETEIATQYLVTLACQGGLPLKTLRNHVAPLRRFLKKMLQHHERYPQEPINGVFEEYAFLLPKTLNNSGVQTLTCRIVDCVANLRRSSKAVEENGQGRQEYLDQNLSGWRDSIPLRIDDSDAMDLILGLLDQEVARALPSEGFSVTTFLTMQDQSILISRDLNYESVINEEDLWRWLELSSAKELQPRMTLYLQSDTQQVRVGTIAKRSIDDSYVITSISSTPLTGSDADGTIRLVVTAGNRQVSSIVVPGGEALPESPWVFSDADPAELIGVGSVKTRYSTVLVAIPPGVTWVGSPEMEVLIDSNSDDNRIVMRLSGELCLCQDGNDVRICSRAEEEATSIFKLRGRGGTLGPNGSSFWYGIPEIIEYPVNSSGTVSDVPQHMIEWKGTGNTWQNLSSNCVGDVSLRAVRNHETIFQTRLTLLPDGFSYRIRPRRNNKGTIELKNLGMAAVFPGEISGVETQVESQKSVTQLHVTLCSGSDRPVTIPISIHFHNGVRSYLQATCPTDGIYIVNAAGLAISKNLPIPMDQLDGLFLRILTPKSQDLILIERSRHRFLGKPTEFRNTGTQEFALSSVQEIIQGILAQSDDPDGSVEIRLERPPSSIDLFSFKVARYPGWLEKEPNDYSETGTQPDCTEVFVSEQTLQDLRISGEDIRIDVSPLGQPDAVIETAAVQRIGEAKWKLSHEMLGTGIYLVVAWINEFRCLRPLRVSVNLNLIDPIRVEDAEPSDQFDTALNTLSHDVRRFEWEAFVNRIACDSGHPGWARIDSLIKSNQRLPLTTYEAISSLIRNSDATAMLAIRMHRLSWLWQRLEELPFLWATVPVRSWVTALRCHVELLLQQLDSLEADMSSQIIESKIEGFSQDLALRWGGGVCINSCLHISGFKIPPQNINIKDLMVNEQDSLLERLQQERSRLIADHDLYDTRTVWPQVDLRIPERVRGVISDIEISDGHSNQWEVLNAPAIAAAYSVHDFPLPPLIIMKLKELRSVDPVWFDRANVIAMQILAGRRLTQNHRCFVMEEKVEV

SEQ ID NO: 26369 - protein, 2144 aa, Grimontia indica
MSSAINFTSLYQDLSSVTSQAVINRLQLKSTPLRKFLEREFQVKFGKGNDFFAQPVFEATFGWEPAPKTENLIGLKEAGFLASSLVSNLAYPPMPIPENEKQLADYKARNIDESRWAGDIQEDYTWPVDRPPYQHQINAWRHLSTDDVKSVVVTSGTGSGKTECFLIPLLNDLAKQAALSSDPLVGTQAIFLYPLNALINSQKERLSAWTRGFGGKVRFALYNGETPETPEPKNKENASFSGDSAPELVTCRRDIWSSPPPILVTNATMLEYMLVRQKDEDVLAKSQGKLKWIVLDEAHTYVGSQAAEISLLLRRVMHAYGVEPDQVRFVATSATIGDKTKQEETNQQLQEFLAKLAGVSLNQVKVVNGRRLIPDIDESQKEDHFLYEHARSLESGKLFEYLCAFPTFRTLRGKLTSEPLTLEEIAATIWPEKSDNLKQSDLENALKIMDLAVTAYPNGDEKSEQAFLPVRAHIFHRAQRGFWACVDPQCCNKKGTELENGWKFGMVYTHEKTHCDGECGAPVFELTHCSDCGTPSLSAAKTTADGGVKLIEGRESDLLDDYADEIEDLEDENEELETEFEANLQIFAREDAMGNAHDKSGCSKVFIDAKSNRISDTYSDGLLSIFYNQNERSQGVRCACCNAVEYKPNVIFKRGILGAPFLMGTLVPAMLRHVPSENPDDMKGKRLITFTDSRQGTARFSAKMQLDSERNWARSVIYKETLKAARSESTPLDIQSKLDDIEMLKNLDAQGNASAISILQSLVDAKIASLKPKSLGWIEMRDELASREEIQLLSGEYLASLEDGAFKKELEKLPGEYAKRQQRFESAKNVAHLFLLREFSRRAKTANNLESMGLVQLRYPAIDSLIEDDITSFEWRNLGFSLQDLKDYLKICLDFYVRENTLINIDSDAIHWMGAKIMPRLLKEPGYEFKDRYERKACFRFPSVNKGIQHRLVRLLEIASGREAKVEEGTFNDILRFVWETLTRKLKVLTPAAPRLEMISGAELTGYELSLDKSVAFAPIEKAWLCPITNRWLDTIFKGLSPYTKGSSTREDVQCSPALYLDIAHPELSLLDESPTKIRSWLNQNETVLAHKESGRWSDISDKVIAGVQLVRAAEHSAQQESEQLKKLERAFKKDHLNVLSCSTTMEMGVDIGSLSMVAMNNVPPSTSNYLQRAGRAGRRKESTALALTFCKSTPHGERVFAEPKWPFTTPIRVPKVSLDSTVIVQRHINAFLLAQYLKMEKKKSQNLMTMQAGAFYLGEPGFCPVDGFVDWLYDSAETNESVSSGIRTLKFDSAYSSFPDSSLIEDARKCIVSAKDKWLLKHETLKHQLDNAQGSDNGATKKLERQLKRIERDYLLAQLADSGFLPGYGFPTGVVQLITENRSEKSTRDDNKQQARKAYPSRGLAVALREYAPGSEIVKDGAVYQSQGLQLNWKMPFSQNEIQQEQLLQYQWECSHCGSLGIEPYKEEGKSKRCPDCDSVSLVWSEFIIPSGFVVDYNKPLHNNYVQPNYAGYREGKPAIKGEEWQPISHEGLGRFRVSNEGTIFHYNDGNGGGYALCWCCGRAEALAVEKTSQGSYRLASEPKIHSEHKRLQGLKIKGQVHCDTWGVKYSQIGKASKEIETPFILGYPQKTAMFELQLKDPLSFTWISDEKLIYTLGVAIRQMYALERGITTQELGVTVKKKKTELGEEVTSLFIYDLATQGAGFSSAIPEYLTKLWVGLIAYLEKCPSKCAAACHSCLLDYDTQHSVKKLDRMHLLSFLNESCLLDLLSLAEDKKYFGSSSAAELLNAQQALTRIGTACSDASFFIHDTDWEWGDWSIKEHLLSLKSKGIPVKIYLSQQAAESIDSDLAWEICRTLPISKVDIYKLVEPVRLELGALPVMKVELSGGDKWFAVSNETSVSANSHWGKDANGCLVSGRNVNVEVVAEPFDIEAIARNSGLNENSTIIEDLNSLRGSVDEFGRRFSDLLENHISEFKSKVSGSIDSIVYSDKYVVSPLSVVLVNQVLSEFKKRYGTFSAEIHTAHPNQNADYSPRCIAHNFPSSDELNEFVYESAKSFNAEVYSECFDSNDLPHSRIMVVKLSNGDVIKLLLDHGMGYWCKGRDYWDYRFDFRDVYSEAVSVGTWGFNLVDADKATYIAVKMS

SEQ ID NO: 26370 - protein, 1172 aa, Grimontia indica
MTNPSSEIHRWFADFEKHRPVHKPGMPLWSLKVTDEELNHLQIILKGIFSGKDPSVIFNHYSCTGGNSRFDQVFTLYLATWIQRNFRGGRERWPVVLASLNIKHENRLNPAIYESVKAGLKYWGIDLYSTSSANQYFATLYCQGGFPRSGLVGLVDGPVSSYLDSVITQFGLFYKTSSLSSIAEKRLEVLPETLKQIPFATLASALISSLLSLRDRFHLYAENDPVAALSVKNPGWRDELPFLLCDEEAHELMGRLLKRAATIIRREQNPVRIRRYLTVSMDCWEVVAETHINHTIHPEDLNNVMGVSNLPTYFDLYTQTQSGERARSASFNLKGQQNRRWQVLTKHTCFYGADATSAIGYELWTDGRLVGSDQYYRGEELNNDLPWVFSAEGQRFLFVGQGNVSAKQGSVFVVFEGELRPSNALSEVEKVAEIPSLNKSVFKVTGRAEALVTFGKFTISTFADEANEFSCWFDGKRCSEAVSHRNTFYGRPNVFVRYGLDKPYSVPEDELFWKCIDSDSLCSLMAENVQFGLGVIVWIKDGNVKWQSKCALLPESAHFNVLHYDRGEVELKATGFKNTDLGILDGETNWLRDVDKLEDIYFAELQLPANMPESFHPILGWNNSLDNKIVFEFASMQAGICLLTPEGTPYKLQKNTLTVEELFTHKLKVKMPSGSDNTLSISAALLGKNKRIRASVTERIVCEDSTTTISSNILGRMAQVLYAQSDNLYDFVTFKFYAGQELLDSRLPKVELFKHPVQCREQDERIVLKVLSSRRHKNRDAIVLCAAPIWDLGCVHYKLERTTNSFDDLLFLMPETDLSGPWFVYALNDNKVQPRAVIVEAESVKEVTASLTPLQRAIRDLPFNRETFQFDYTDMDACIEAPMESLQHADWRTMQSFVDMLDLSTPNTFHLFRRLILKTDVLATLLLQQQSPESFERLWSLANEMPFEWLYVPVPYWEKAIQLVLKDTLGQLAHLESTISQEQFDSIKRSVVESRFQMLADKGKYFKTVVELVLEKHFQIPAPWSTSPIFSNGENDSNTLLYEFHQEKAAFFSRHEGRLMNHVQNKHNDRELREHMEMSMSRSFLPAELKGLLQHYSLDKNKADARAFALDLPVMVSFKNAGLFENSATTENEDWLVSFALSQLQKFDRVWLQNSMSCALKAAHIQKTNTVQ

SEQ ID NO: 26371 - protein, 2046 aa, Hoeflea sp. BRH_c9
MKPFATLSEIRRRSAEAVIAQSGINNESLARQLREMLSSQKVATGSLLQEPVVEGAHPFEAAEIRMQEVSDDVLHPAFISVLDGLDPTNEYRFPKTRKPFKHQLETWRVLAEKGVPQSVLVTSGTGSGKTECFLFPILSDLIRQSQGQQLPIEGVQAIMLYPLNALIESQRSRLSAWTKPLAGKIRYCLYNGDLPQEALPESERKRSPEQQIDRHQLRESPAPILVTNITMLEYMLARAQDQPIIEKSKGKLRWIVLDEAHSLVGAAAAEIALLLRRVLIAFDTDPQNVHFVATSATIGKGSETHNQLKQFLAEVAGIPDAQVHVIEGGRRLPETPTPQTSKAIDFAKCSSTELYDRLGGQPEVWKFVTTLKETPQPISEFARLGEKYGLGAEEFMTSLARAERVSPINGDIERLAPMRIHSFERAIPGIWGCINPSCSNAPQGWAFGQLYGDRLETCLSCGAPVMEVVSCTECGEPMLEADEQMDSGRLLPSRRTQERDEFQFEADRDFESDDPNEGEVGDIDTEILENPAAKRTILFAANPSKNARELWISDGEWKVLSGKTDQSLTFKYEEKLNDTTECPCCSAKALRGIDNLLRPLRFGAPFLIGNAAPILLEGVDPKSADQLPLPASGRSLLSFTDSRQGTARMSAKIQAEAERNFVRSFIYHSVQDSLNAQSEDPALVNLRGLVQQLESMYSVTPSPEIQQMMDTQKGEIERLSRGKVLGIKWADLEDRLAHRPEVEYWIKDVWEPRDPERFSSPNKLAEFLLLREFSRRPRKANSVETLGLACLRFERIESCVSLPIPFARRGKTIQQWREFLHAVVNHFIRANSAVNINRETMRWISNVMQPRSLLSPGTIGGEKRQLHWPSVPKNASSLSMPQSILLRGLGLDLSDTEDRADLQDCLDQAWRNLQPILGDNPEHRALDFRSAHVSPMLEAYQCPVTRRLLDTTPFGLTPYARGDLQSDRFRTKVVTMPRHPSPVLGPIDVDLTKQGIRQWLESDDAVQNLKSIGAWSGISDRIAFFANYARSAEHSAQQENKLLRRYETDFKDGRINILNCSTTMEMGVDIGSVSTVMMTNVPPSIANYRQRVGRAGRRGQAFSLAFTFCRDRPLDREAFSDPLAYLNRNIAAPKVALNSRPIVQRHVNAYLLRRFMIEVGGDGLKMTIGSLMGCSPKLGEARSDPSPVRTLSDWLSEPSLENRVASDLEKLVARSVLEGETRLIEVCRDDLASLEEDFINEWTGLQALARDEGVKEAGKNRMAVELKRLCGEFLLSALADRGFLPGHGFPTSVVTFIPHRPKRLTSDSEANSVDGRRHTRLSGPQRSLDLAIRDYAPGSEVVLDGLVHRSAGVLLNWKRPATEEKVREVQSLKYHWTCGGCGASETTRELISECRNCSGRVICNEYLRPSGFAVDYWKKPHADTDRISYVAPEDPAVAPGNDEWIGLPIPELGRYRGSREGTVYYSNRGPDRNGYALCLHCGRAEPDYPHEESDDPATLTPSPLDGHRPLRSKLKENQLVCEGLDNPWKIKRNIDLGHEITTDVFELQPAKPLSKPAATALIIAMRGALARSLGIEADEMGYSTHRSLGELGGNCRSLLVFDRTSGGAGFAVSMGGNIAKVITDATDILNCPNPGCTEACASCVLTPDAPFEDGGLDRLAALEFITEHLTFSSVLPEEDRISDDAVLSISLVDELDRELRNNSKPHVKVYLPETGDLASLSAWSATQNLETWRYRGYDVSVVVSKKLLQSLDPSAKLALHALGQRLSGQNSDFPIHRGDQPACANGARVLASVSAGKTVQVWATLEASPQQLGPSWGFPQERPIVRGTGFALNDSQALTAEELLPIPTAKMRSLIKDLDRPMILFGNGMAEILRSLLADLGFKKDLEIDSISYSDPYIRSPLVARLFLDTVAALFRKAKSGGGLHLTTRPPNPGAFPPPRIASDWSDAQSANDVMMAYAALQHLNLAVKFGDCAHGRYMTIAFVDGSSAKIVFDQGFGAWRPTSQDKASHFDFRASPARQADALSKANPMLSKKGNWATYVVVTRE

SEQ ID NO: 26372 - protein, 1149 aa, Hoeflea sp. BRH_c9
MGESGVSLHKLDNDALRREFERNRDHQQKLEQINEVLKKRNSDQANELQFDVINRLRILRRNGPAPVTAHTHQENDERWVAEFFRARSLRYSDGNPLYRYRMTDAEYVEANKIMRYLAACGKLIPGNRAACMVFVAFCAEWFRREANSTFRKWDDLAPDVFPSIPWNVKTGMTKAGLNHWKRPLLTTDDTSEYLLSLALEGGVPVNAIIDGSKGWLRDYLRTLVRFTSISDDPTKIRGFAHDESYRVKPTYRREQFIDLCAEIAVTLAKWRTVVECETPGGMDAVSYLDARHPTWKDTIPLYISDKEDSTARQLLVGLVTEKFDSVAAQGVGATRHLKLLDGSWHPAIRILAHGELPVGRVPMLPRGTRWKAVPSGALANFLPSQFALFEPPTDEERTWRVRPLTELSKIIVGFPLTARVTANLATSNANHPVEWPGGERVTSDMLVFVEEQPSDSPSQLKLVKTGSASLPAKRLYALVPKDWTAESLTAPGRSWPSSDGMSVLYEIEGTYYFTDAEDGARYRVEADSDEREANLEIHAGGTASIHSSGDLDIFEGPVSVQILDSGTVRDAEPGSIFLRQPGGVWRPLQGREIRAYGCIDVSWRDTKANIQLERKRIAVIPTGAKIHGVLHNNAEGQVTLTNLDNWSLEFLHKNVVKTHDDDDETGFRFDGRPTYRIEASLLPPMGAAIPICISVLARQAAILTSDGSVVSGGQTLDLTALRGSLAISSHRSRMVITRHHSKAQDIVVSVDQEFPMATLKSAIEEIFASLEDQDGEVDIEFLGDFQPPVRLRQYRWERASSVGDTILFSQTSVSDPVAKMVLAPELEHKLDRVDDGTFRLPSDLYGPCLVYSRDGPDVVSRPLVVIGKAPVPSFAPETLQWTSCIPNYIQRKALLDLSFQRLSDGNGNADEIAYLLSIIRNLNGLPAKAFDALNDLWRFPKVLIRLLIKATDDATRQSVWRLQSKLPFIWLSLPLADWKDVLDHERLSLDQTLAQLPIGDDKRTEILVSHFAALNAGLCDIEPALQYLLHEHGFVGQATQIRSLKDAIETFIKDQRMKEDAEDGIPSKPTLNPLAAKVEQQGLRPPSELSRFSANEFDGLFTPLILAASARGLIKIDADLEIPLRISLRESADYVTESYGHFSNFYRNM

SEQ ID NO: 26373 - protein, 2099 aa, Idiomarina baltica OS145
MNFFQALIEQSQNRIKEATLGVLGIRNEGLRRHIEKQFSDCLGAEGSFLANPVFEHTFGWTPGKKSFAELSPELLHPQLIKTLHEAPKYEFDKSIKPYKHQVEAWQVLTDKKPRSAVITTGTGSGKTECFMVPILDDLIREQKATQSALIGVRALFLYPLNALINSQQERLDAWTRQFEGDIRFCLYNGKTEHKASKSEVRKRQAILKNQILSRELLRKEPAPILMTNSTMLEYMLVRQVDSPILEISKQQQSLRWIVLDEAHTYVGSQAAELSLLLKRVVNAFGRQSKDIRFVATSATIADANAEEKLQHYLADLAGVPIEQVSVITGRRITPQLSGGWLEQSTPYTLDDVNAIDSAEEVSASRFKALSSSAIASKLRATILDTDKPQRLDDLVASVAPLLEGKTLQQQQVEVLSWLDVMTGTKGDKQGDPFLKVRAHFFQRMLHGLWACVDHSCNVKPAELNSFPFGTVYVTERSHCDCGAPVFEVVFCNECSEPHLLAADQRGKLTHRVSRGVDEFSLNIEQDDGDDTPADDEKESILRGVSSNVVIGAVTSENEHYCLQSLNRQTSEFAVIDDEYISIKIGVGEIDNCSACASETDSKGDFYRGAHLGAPFYITNAVPTVLEFCPDADKKDSNKRSPEELPGRGRKLITFTDSRQGTARMAVRMQHEAERSRIRGLVFQLLQQKNLELIGGQKAAEVNEKIEDLRMVIAYAKQSKQHDKASKKEQELERLLNEQQEPQTVNVLYTDLENRFIEQHDIKSAMLKYNRYANPRLFGDEGGPRRLTQLLMMREFSRRPKKQISTETLGLVAVGYEGLEQVRSCPQFWEETFAHNATGNLRERSKLTLDDWKNFLKVALDFYVRENRMMRMDDDLQNWMGSLSTQKFLFSPNADIQENPRIRKWPQVRTANKNRLVKLLELATGLSTAHAEDKDKINLWLMRAWTDLTQHQILKQSGSNGFQLELSSLNFSLPRKAWLCPNTYRLIDTTFRGLTPYLPRKLTDADYRCELVKMPDFTELSSLESGIAQIREIREKLNSHPTVRELRSKGVWNNLSDRIVEGGFYYRTAEHSAQQSTKTLSNYENLFKLGDVNVLNCSTTMEMGVDIGGISAVVMNNLPPHPANYLQRAGRAGRRKESRAIAYTLCKADPHNQRAFLNPMWPFVTAIPAPKVILSSRSIVQRHVNAVLLAAFLRTLPDEGDRTRLSAESFFGGEPSECETMLAWMDYSRDEFADAVKSVINQTSLAGESLSQLILAAKDKLTDIKTDWLEERQRIQALYDTSTDEPYKRALAFELSAHNSQFLLKELISSTFLPGHGFPTNVVELDHKNIEDFKESKRQKEFKEREDNVFVNKEKPSRSLNIALREYAPGATLVIDGRAYRSEGIVIKDFTNPGNNDDIHFAVAWRCDKCGTTGVRENAYANSRDLCCSNMQCRALIPEREKVSTLRPTGFLTDFWKPTSNDILTQKFIPVAEPRVSLIGEQVTLPNKDCGFVRFGHNGQIFHHTKGEYGYGFAVCLACGRAASMTATDTIPSELDVLRDHRPLGGAVAGDLKESCSGGHVKSNIALGYQVRTDVLEICLRNPLQQQWLTTSDEHHMVADTLAVAMREVLAEQLGISPSEIGFSTREELDLENGAPRMVIQLFDEASGGAGFVITAIDDLVGLLRATRKQLECPSQCDTVCSHCLAGNDSSVERFELDRRAAIAWLDESQILEHLELPQEFTQIPDAAFCSSGVLRAFHMLKNRAKHTNESIRVVLPMNGDTERWDLSADAFRSFILNLITIDKVSVTLALNSRQVLVNDLKRTLKNLEYLGVEISYGETAGLLKDVTLGFQLIAGDKTFSLLSNSERTTEINDDWLTDEHAVWVSSIEFPKLQLTPCNTSDWGNYEGAVTTKIVYVKQELDGALLQLPLRMVGLLQREFPLLLELIKNDTLLSISYSDRYLKSPWAVMMLMSFIKLFSRCEPKSIDITALKSEANIEGRLVFHDWSFDYEQREFMEQLISRACPSVNGTTITLKDNAQELQHSRKLELKWTSGRIIEVIFDQGFGYWKAFSKSYEARQFPFEGDSIIQVDTSMKLNEHLEMRHSGNWPTIITFNEVLSS

SEQ ID NO: 26374 - protein, 1113 aa, Idiomarina baltica OS145
MDNCKAWINEFLFTRELFQGPQGEPLYSYQVTADEFQKLISLLTHANLIKHPPKGLPHYTGAAFCLLVAEYYRRQYTGEYSTKPIEDLISQKISQQNRAQLTLGGLAFWRREPIKTENRISYLGSLFAEGGLPWPLLNSDTHGFGRAIRRGIGAYYKIAAMDKSLTSLMLDNQEELPQVFRTIHTAKLLSGIVERLTKLTEAYPLREVKNPAEYLDEHAKGWNKDFPIPLDIENGRRLINDWLIQAEKSRHQSALEKKRQAELLSEFTSDNYFQLSNRGVDVTSEVVIPRELKIKRSEQEIISTRFEPLIYEGNRLIFRGSPIYASLDQKQDCIQLTFKRTRVEVKRSASAEPLTFKLVSHGSVVFNRTIENSLLDLDASPLVLTEQADRWYIAGSESCSIAETSARLWLPKQCQFGKGESAANLIKVYDFGTLYELSSNALITNADNDEFEIQLCKAQPRSFIRVIGHETNWSTLPITTYFEFPKLNLSDDANFALEDLRIFVNDRRVLNLNHLSNIYGRVQLVIKDNFDKTLFRRTFGVVPHDLKIRTRPARSATPAFIQFMTSARCQVTPNVANGAANYVVIDELDAGKFSLTTCDNKAPVSFNVDVCSDKCSKPVTLRVPFPVAGARIITPMGDAFEGTSLLLDGLLGHRIQLTNSSDKRQRFNIALNVMSRGQVKYVKDDVVFVDHLPIEISLFGMHREITKLLGNLSDQDAAVQLVIQLGQTVLKRVIIQRYNAYLERDGYDLVIKDYECNDIRAPINLRAINIINPEQHPLIIEPILSAETPTGRYAIDKLISSNTTWIVHSDADAELKVRPYVQPGDEVETLVESADLGALTSLHSACNFFHPIERPNLIREQIEKMAVDYNHSGWNYLSILKRKYGHLPLSSFEAWRALGCNSDALALAVFRLELDSMFCERISDELAVVWEFIPVDTWRSARTLFANAIMKLGVPESYADITVREREVALKDIVSAFEYLTDYIQTGDVQAVRQYPYERIIPCWYQELRRFFAENDNWPIDLSHELKAFVMASSLGDGFKQVSSIGYTDAVVYLPMFVACITAGLASPKSLGVPTSQLKFAVTNLSDFGREMWFRPVHAATTAYLIANNNNPN

SEQ ID NO: 26375 - protein, 2099 aa, Idiomarina sp. T82-3
MNFFQALIEQSQNRIKEATLGVLGIRNEGLRRHIEKQFSDCLGAEGSFLANPVFEHTFGWTPGKKSFAELSPELLHPQLIKTLHEAPKYEFDKSIKPYKHQVEAWQVLTDKKPRSAVITTGTGSGKTECFMVPILDDLIREQKATQSALIGVRALFLYPLNALINSQQERLDAWTRQFEGDIRFCLYNGKTEHKASKSEVRKRQAILKNQILSRELLRKEPAPILMTNSTMLEYMLVRQVDSPILEISKQQQSLRWIVLDEAHTYVGSQAAELSLLLKRVVNAFGRQSKDIRFVATSATIADANAEEKLQHYLADLAGVPIEQVSVITGRRITPQLSGGWLEQSTPYTLDDVNAIDSAEEVSASRFKALSSSAIASKLRATILDTDKPQRLDDLVASVAPLLEGKTLQQQQVEVLSWLDVMTGTKGDKQGDPFLKVRAHFFQRMLHGLWACVDHSCNVKPAELNSFPFGTVYVTERSHCDCGAPVFEVVFCNECSEPHLLAADQRGKLTHRVSRGVDEFSLNIEQDDGDDTPADDEKESILRGVSSNVVIGAVTSENEHYCLQSLNRQTSEFAVIDDEYISIKIGVGEIDNCSACASETDSKGDFYRGAHLGAPFYITNAVPTVLEFCPDADKKDSNKRSPEELPGRGRKLITFTDSRQGTARMAVRMQHEAERSRIRGLVFQLLQQKNLELIGGQKAAEVNEKIEDLRMVIAYAKQSKQHDKASKKEQELERLLNEQQEPQTVNVLYTDLENRFIEQHDIKSAMLKYNKYANPRLFGDEGGPRRLTQLLMMREFSRRPKKQISTETLGLVAVGYEGLEQVRSCPQFWEETYAHNATDNLRERSKLTLDDWKNFLKVALDFYVRENRMMRMDDDLQNWMGSLSTQKFLFSPNADIQENPRIRKWPQVRTANKNRLVKLLELATGLSADRAEDKDKINLWLMRAWKDLTQHQILKQSGSNGFQLELSSLNFSLPRKAWLCPNTYRLIDTTFRGLTPYLPRKLTDADYRCELVTMPDFTELSSLESGIAKIREVREKLHTHPTVRELRVKGVWNNLSDRIVEGGFYYRTAEHSAQQSAKTLSNYENLFKLGDINVLNCSTTMEMGVDIGGVSAVVMNNLPPHPANYLQRAGRAGRRKESRAIAYTLCKADPHNQRAFRNPMWPFVTAIPAPKVILSSRSIVQRHVNAVLLAAFLRTLPDEGDRTRLSAESFFGGEPSACETMLAWMDDSRDEFTDAVKSVINQTSLAGESLNQLILASKDKLADIQTEWLEERQRIQALHDTATDEPYKRALAFELSAHNSQFLLKGLISSTFLPGHGFPTNVVELDHKNIEDFKESKRQKEFKEREDNVFVNKEKPSRSLNIALREYAPGATLVIDGRAYRSEGIVIKDFTNPGNNDDIHFAVAWRCEKCGTTGVRENAYANSRDLCCSNPQCRALIPEREKVSTLRPTGFLTDFWKPTSNDILTQKFIPVAEPRVSLVGEQVTLPNKDCGFVRFGHNGQIFHHTKGEYGYGFAVCLACGRAASMTAADTIPSELDVLKDHRPLGGAVAGDFKESCSGGHVKSNIALGYQVRTDVLEVCLRNPLQQQWLTTSDEHHVVADTLAIAMREVLAEQLGISPTEIGFSTREELDLENGAPRMVIQLFDEASGGAGFVITAIDDLVGLLRATQKQLECPSQCDTVCSHCLAGNDSSVERFELDRRAAIAWLDESQILEHLELPQEFKQIPDAAFCSSGVLRAFHMLKNRAKHTNESIRVILPMNGDTERWDLSADTFRSFILNLITIDKVSVTLALNGRQVLANDLKRTLKNLEYLGVEISYGEKTGLSKGVALGFQLIAGDKTFSLLSNSECTTEINGDWLTDDDAVWVSSSEFPTLQLAPCNTSDWGNYEGAVTTKIVYVKQELDGALLQLPLRMVGLLQREFPLLLELIKNDTLLSISYSDRYLKSPWAVMMLMSFIKLFNRCEPKSISITALKSEANIVGHLVFHDWSLDYEQREFMEQLISRTCPSANCTTITLKDNPQELQHSRKLELKWASGRTIEVIFDQGFGYWKAFSTSYAARQFPFEGDSTLQVDTSMKVNEHLEMRHSGNWLTIITLNEVLQN

SEQ ID NO: 26376 - protein, 1113 aa, Idiomarina sp. T82-3
MDNCKAWMNEFLFTRELFQGPQGDPLYSYQVTADEFQKLIALLTHANLIKHPPKGLPHYTGAAFCLLVAEYYRRQYTGEYSTKPIEDLISQKISQQNRAQLTLSGLAFWRREPIKTENRISYLGSLFAEGGLPWPLLNSDTHGFGRAIRRGIGAYYKIAAMDKSLTSLMLDNQEELPQVFRTIHTAKLLSGIVERLTKLTEAYPLREVKNPAEYLDEHAKGWNKDFPIPLDIENGRRLINDWLIQAEKSRHQSALEKKRQAELLSEFTSDNYFQLSNRGVDVTSEVVIPRELKIKRSEQEIISTRFEPLIYEGNRLIFRGSPIYASLDQKQDCIQLTFKRTRVEVKRSASAEPLTFKLVSHGSVVFNRTIENSLLDLDASPLVLTEQADRWYIAGSESCSIAETSARLWLPKQCQFGKGESAANLIKVYDFGTLYELSSNALITNADNDEFEIQLCKAQPRSFIRVIGHETNWSTLPITTYFEFPKLNLSDDANFALEDLRIFVNDRRVLNLNHLSNIYGRVQLVIKDNFDKTLFRRTFGVVPHDLKIRTRPARSATPAFIQFMTSARCQVTPNVANGAANYVVIDELDAGKFSLTTCDNKAPVSFNVDVCSDKCSKPVTLRVPFPVAGARIITPMGDAFEGTSLLLDGLLGHRIQLTNSSDKRQRFNIALNVMSRGQVKYVKDDVVFVDHLPIEISLFGMHREITKLLGNLSDQDAAVQLVIQLGQTVLKRVIIQRYNAYLERDGYDLVIKDYECNDIRAPINLRAINIINPEQHPLIIEPILSAETPTGRYAMDKLISSNTTWIVHSDADAELKVRPYVQPGDEVETLVESADLGALTSLHSACNFFHPIERPNLIREQIEKMAVDYNHSGWNYLSILKRKYGHLPLSSFEAWRALGCNSDALALAVFRLELDSMFCERISDELAVVWEFIPVDTWRSARTLFANAIMKLGVPESYADITVREREVALKDIVSAFEYLTDYIQTGDVQAVRQYPYERIIPCWYQELRRFFAENDNWPIDLSHELKAFVMASSLGDGFKQVSSIGYTDAVVYLPMFVACITAGLASPKSLGVPTSQLKFAVTNLSDFGREMWFRPVHAATTAYLIANNNNPN

SEQ ID NO: 26377 - protein, 2106 aa, Janthinobacterium agaricidamnosum NBRC 102515 = DSM 9628
MKPFYYSKLLPDMAERTKYATVSRLAFSNPALRRYLLKQFTAPFGQSGSFLGDPVFEATFGWEASTATMGDLAGNLLSSALVDAMDAPPDELRDDYRFPRSATPYVHQLQAWRLLASDLPQSVVVTSGTGSGKTECFMVPILDRLCREQQAARRPLVGVRALFLYPLNALINSQRDRLHAWTHAFGDSLRFCLYNGNTEHKVPQRERDQVPNQVLDRETLREVPPPILVTNATMLEYMLVRAQDASILEKSKGTLEWIVLDEAHSYIGSQAAELALLLRRVLHGFGVDASKVRFVATSATIGDPSGEAGIKLRTFLADLAGVGVEQVHVVAGQRSVPVLPPADDRHRQSSLQTLQELAGETDSGERLFAALAGNDTAMKLRNRFAQPPDRKPVAQLSELCELLIPAAVDTSTKQTQSLLWLDLLSGTTRVLPSGRLEPFLPLRAHLFHQVLAGLWACADSQCPCKANSLLDVPEWPFGKIYMEQRKRCECGVPVFEINSCSECGESFLPAMLGLTEHGYFLEATDSDAVDEFSLDVEPSDDEGGEDDVGVVVHVSRTKVIIANRILGATTGTRVDRLTLQVEPDDSVACLRLDIRDEEAQKDGRMALRCPCCNEVESAKSPLARRAILGSPFLLGQIIPTLLEFCEDGEQPLTKPYRGKRMITFTDSRQGTARIAAKIQQDSERNRIRGLVLARVASLANGPENPVIRQKQEQISTLQSALVAGPNAGLENLIRTFEKEIVEASVFKPVGFNDMAEHLTTNEPDVKRMYEFYLGLDPELFSGPHGLREFAKMLLAREFARRPRRVNSSETMGLVAVHYPKLEAIQAKPVLGGMSLEEWKSFLKISLDFFVRENTCIDLPTSWMKWGGNKVPRKYLLGPQSKEKAGHPFLKWPQVSGARRDPRLARLLAYGLKIDARTPDGRDAIDSLLRNAWDDLIGCGILQGSVSGGYYLTFDAIGFVPITRAWICPVTRRILDTTFRSITPYLPRDNPSPATAECYPITLPSYALLSQSFTSESERLEAIRSWLMTAPEITTFREEGIWSDLSDRIVEGAAYFRAAEHSAQQPARRLGNYERDFKNGYLNLLSCSTTMEMGVDIGGISVVAMNNVPPHPANYLQRAGRAGRRSETRSVALTVCKNNPHDQSVFDNTRWPFDTSLPLPAISLSSSAIVQRHVNSMLLSNFLRVRAGTGGMDLNKLDCAWFFLPHDAALVDQFCNWAENFLGKNNAALSKGLRSLIRNTCFDGTTALTGLTQIAAAEMLRVRNAWYEEYASIDARISEFSSPAMQKEAACKALSIQRSRLASEYLLSELASEGFLPGYGFPSHIASFDTLNIEEIKRNKQQAAHREDNRMRHRDLPSRDLVTALREYAPGSDVVMDGMVYRSAGITLNWHAPAAQQQIREIQSIRTAWRCRSCGANGTEPNVDSTLHCAECAKPIPPDGIRKYLEPAGFAVDLYADIHNDVTHQQFIKPQSPWIHVSAEWTSLPNARLGRFRASPEGAAYFHSSGAHDLGYAVCLKCGRAEPMGDDSSATTSLKGHLPAIFRHPHKPLRGKRGGESAVCSGSDEPWSIMPHLHLGHEVRTDVLELQLQTVDGDYLQDEAAAFSLAVAIRSAIADMLGIQSDELGCSTKEVRADGGTICRSILVYDNNASGYVSTVSDRIDAVLRKAAHALHCPKSCDSACQHCLDNYDTRFQNELLNRHAALAFLTEAWIRDMQLPVEYAFFGAANSQAEYQPLAEAIWRELTAPTNTALYLYLHGDVTDWDLPASTLRSYLYRWIGVGKPITFVLSEAALQTISMPNRQMLNAWANLETVSIGTCKKSPLIGAGVLLAQIASLGGTISWAMTNELAGCVGPQWGASAGQTLVRGLGIEPASVKEVPVGELMPANQANSYQLQVTDQWNGSLQGFGERFWRDLFEAYPDLASPLSRGNNNVVGVSYRDRYLNAPLPVALLLEVINGLKRRYEDQWNPQQIVIETVSLSTTSQIASAPRPVWMDWTNEALRQAAIEEAFAYCGMYEIEFSLIKKYDAEHARTLEIEFQDGSGIVVRLDQGLSYWKANRKGSRVGGTHDRDNEFDFSLPTSLQGEKIAELRTEVVCPSYPTFLYANLR

SEQ ID NO: 26378 - protein, 1090 aa, Janthinobacterium agaricidamnosum NBRC 102515 = DSM 9628
  MOD_RES (2)..(3): Any amino acid
MXXAAWWQREYAGGAWRWDDVIGSFGSDPDSWPAQFRTECVQIGLQYWRQQIPTSGKRYFGVLVEQGGLPRVLLAKSKGNIYGLIRAVLKRAARLGAEVGEIAVMVADYQDKLPKSLQNDAVHLLIAQVVGTVLDLKREFKLNKGDNAVARLDSLAPQWRQRFPVALDDHAAIALLSDLVGDAAAIETETRAAPVVAERLLVEESGVYTLVSRVEFPKLLLAEPLAGILNIDESTLPFRFAVDLQLDKQYSAADVRKTLGTGPARFQFAVLCSQWRGDAALREHLLCSALPGRASISIPVPGGMEMDVASPWVFTSNGEECRLVAQGSAGIRQDFAYLVIDDTWNISSEGPDSLVERLGRFSSDSLAKSVFKVVGVAAVFDGIHTYRVHTGQAGAETERPVWEGRRLGFASSPTLAFYGAPKLCRYTPDGAREVVPVQQLEWRVAGTTRVVSAAAARGPVDVLWRVNGELRLRNRMVILDRQPLRFQSGTSVTEGCINVPSVWAVDAVTLEDRALALRCERTIDWLSINVDATNHPPESLRLTLDWKTCPVPFFLTVPFPASGGRFVDRNDNRLEVDSTITLDQLLGVRLRLFDSNPDHPVQHKLVFSLRYTGLDRLAAVPSIEHILELEDNRAEVRLIDHQSDINSLLSHTDVLDAVVTVALWAGRKQAASLLVKRYEFALIPDGASVGISPSDLPRLPIAALSGIELFAVPIGSMHKDPGIRLVQQQSEGVPSGRWSLPVNAPDHQWLIYPASGSSYSFRAVMIDVAQPQVTMPTGYILAPESIYDVLQISDPIRRRAILARRLNTLADDYAHPDWQLIEGIWCNIGHLTLPTLDIWRAFAMNPSALAAFACRCWESASLDHVMSMCWRFHSELGVLWETVPLRTWYDACVKIGIQYQALMPMVDSSARAALIIDRVGETLRSIRLHFPALNTLLAFISFQHTGQEVEIVAPLMHAKLQDLKARLWHGPDAAIQTIVLRNSADRHPPSLPLYGDLIAKLKLPDAIASTAFTLLWDPTNPKACVANMPVLLALCSCTGALCHWWSDPARLTELRQYRDFDRDWFSHAFDQAVAMCIVSGAVPAIPITTN

SEQ ID NO: 26379 - protein, 2106 aa, Klebsiella oxytoca
MTTRYFSSLIEQSLSRSTEATLSIMGVTNPQLREHLAQQMGADCGKSGSFLASPVFQQMFGWKASNKTMRSLTEGKALLSKAVVDSLDDQNNGRYRFGADWKPFTHQLASWKALLEKKHSVVVTSGTGSGKTECFMVPVLEDLYRELHENGNNPLIGVRALFLYPLNALINSQRERLDAWTRGFGSGIRYCLYNGNTENLHAAVKSEQVKRPNEVLSREKMREEPAPILVTNGTMLEYMMVRQIDAPIIQQSKSQKSLRWIVLDEAHTYVGSQAAELALQLRRVMTAFGVTPDDVRFVATSATIAGSDAEKQLKKFLSELSGIPQERIDVLDGSRVIPELEPCKHVFIPLEEIEQIPDTDMKGVSPERFDALTHSPEAYYLRDMLVTQPNPMKLDDMTQRLNSLTKQHYSQQDVLRWIDVCSGTQPNTKDPAFLKVRAHIFQRNTQGVWACVDKECRLKHGTPLEKGWPFGYVYVNKRQNCDCGSPVYELAFCNECNEPHLLARDKKGKLVQWENKGGDEFSLQDDVHIENDAAEEKVDKESRFQPPLIIAAEKTSEAGYTLQRLDRQTRRIGVINNDSIPLVINDIEQVCSASSCGYRGASGKQPFRRALLGGPFYVTNIVPTVLEYCQDFISEEGKEGVGPDSLPGRGRRLITFTDSRQGTARMAVRMQQEAERSRLRGSVVEILSWHQRTQTSATPNANADLEKLATRAKQARHEAKEYRSWGMPEQAKLAEAQAEQLEQAIQAATGGKAATILVSRTWIEMVNELKEKADIRGPILQYNHYLKPEIFNENGGPLKLSEMLLFREFMRRPKRTNSLETQGLVQVGYQGLEKIHKMPVHWQEKGLTLDDWKDFLKVTLDLYVRESNFTQLDDELKNWIGSRFSSKFVRNPDTKDPEDNQNRRWPQIRNGNISHRLVKLLMLGAGFKTVNTATMDIINTWLKEAWTQLTGPLAVLKPDGNRFYLPKEHMTFSLITDAWICPVTNKILDTAFKGLTPYLPTHISFEHLTKTQYDAFVAQKVTMPEIWKLDRSQEDYAPGLAKVRDWVSKEPLIAQLRSENVWTDINDRVVEGGFYYRTAEHSAQQSSERLQSYEKMFKNGQLNVLNCSTTMEMGVDIGGITAVVMNNVPPHPANYLQRAGRAGRSQESRAISYTLCKGNPHDQQVFANPLWPFETMIPAPMVAMNSARLVQRHVNALLLSDFLCHVIGETDKEKTSLDSLWFFGEDDGQSKCERFKVWLERPVLDIDAALERLVKGTALHGARPDLLRDKTIHAITFMQQRWLSVYRDLVAQERESQPQTPYRKRIELEKKRHCGEYLLRDLAARTFLPGYGFPTDVVTFDNFTMEDYIREKSQKNRDKKDREDNVSRYKGLPSRNLGVAIREYAPGAEIILDGRVFRSAGVSLHWHNINADTNEAQRLDCAWRCHKCGTIGYEEGLSSSGTLFCTNSACGEKIIMDNRRQVLQPAGFVTDAHAPVTNNIETMKFIPVVPAWVFVKAEPASLPNPIMGYMASGADGHVFQQSLGEGGHGYALCLSCGRAESMLNANDAPKSMEAHYPPRPGKADRDSQNQRLICPGSTALMKNVTLGALARTDVFEMVLRKPQNGEYLPDSTEEGRIVAMTLAVALRQALAGVLGISAAELGYAVRPVRLEDGQSVLAVQLYDVISGGAGFASSAPMHIEAILLGMVKQLGCHHCDTACSECLLDSQTRHDHDLLDRKAAQAWLGDDFSYYIGLPDDETFSLPDARYCPGAIGDTLRRAINEGAEKLTLWMNGPLNEWDLYARQFRAAIQNYRIKDNVAVDLVIPAGVDDPELLHELSQFTALGVRLCHSEQALELPIVAQVAFADRVMTLASRSQQATIPGPGWHLNDELVVRSLGYNTVKLNEFVLPGKAANAVERVKDIEIHKQLNGPLSQFGQRFWDLLCNNHEEAQSLMKNQRITSVHYTDRYLQNPVALALLGAILKPLKTKLTDDAELALDTLFKSKERSGNRPSHDWMSEADFQDFADQWFTAAMGRAVELTVFDSPRDIPHHRKLTVAFENGQTLKIRFDQGMGYWRIDFPNAWRNFDFTDDVTYQLVKMAQACQEGKVLNSEDSWATDVLVEVMTS

SEQ ID NO: 26380 - protein, 1095 aa, Klebsiella oxytoca
MSQSECISWVKCTSWLSNFLNRRGLRQPDSRPLYEYHATNDEYNNLTQLLRAVGQVQSNIDDKGYAACFVLFCSEWYRRDYERHCGWMWDPIYRALGVSLTSTELRIIIPKGMEGYWNRPIRFYESERRNFLGTLFSEGGLPFRLLKESDSHFQNVFSRILNQYGQAQLAGFSILSLVRTVIEKSALPTVFSEDTSVELISHIAEKLSSLVLMYNLSNHTEPVKQLDKVHPKWRDEFPMPLDDETGTRFLNGLLCTASVEAKSHLQKNKGSGCQFYWSENHPNQIQAIISLPDELTFPIISTPSTTRFELAIYEDGEEVTCLGPAYASLENAHAKVRLRKSESRFVRRQPAASLTIVARTGGMIVGTIKLEDSEIAVGEVPLTFVDDEERWLLQGQASCTVRNSNVLIALPQEKTTISGCEGSPGTASLLGLRTLSVKGRQDITISGDETYRIRTGREQSNQSGFDFYGKHVTWNCHPDETFLGVPKVTAKNLNAEDIQFKRYLSGISLDECQVQEMMGTQYVSVRNTHNETLLRRKIGILPADFNIEIKGGELANEGSIVISTQHPCMSVLKDKTLEVARKRSAGQTEILLKAEGIPPAFVSLQIYPNLGAAPVEMTLPFPAKGCLALDANGCTLDKNITLHDLLGSRAFLFGKNGDPTRFSLELHLRSKSGLQAWHEWCYTAGEHPVELNLYSLREHIENLLSLETGIDQVVEMQIKGAGAVMSWQIRRYKYSLRYDYERELLISQSTHYRTGQMSSPDIMLLSEPERKITPLSSRMSEGVPTGEYELSSVINKNGPWLVVPKQGEEMAFRPCFIRGEPSLPVDESSIRSLQKATQLFNPQSEVNTITLVLEQMANDPAHSGWQFMRCLYDQFGYLPLATFEVWRALVQHPRALAMSLFKFEMSAEYLSRIENEFPILWEFFPIFEIKTAADRFKLFLSQKGAPEETQNLLVKSLYQRLGLVFPTYADEIEKWLSYGQFPPPIPEFFIREWYQELLREHSEARWPEYGSKRLHSWMTSQKNPVISINPDAEYRYSVAWLPVFAAAVASGNTSFEAVFDRKPGAVFFLRQVRDFDSRWFKAIFQCSLLRYFAQK

SEQ ID NO: 26381 - protein, 2108 aa, Klebsiella oxytoca 10-5249
MNVQQLHYAPLLNQLHQRAVRSVVSQLALRSKSLSQYLESQYFQPPGLGGSLLADPVFESTFGWMPADETMEDLRDKLISSPLVDALSNAPVPFRHQLTAWRTILEDKQSLLVSSGTGSGKTECFMVPVLEDLIRQQNLTRQSLTGTQAIFLYPLNALINSQQERLREWTRGFKGKIRFALYNGETRHTKYEVQEDQLKVPEQALSREAIYEAPPSIMVTNTTMLEYMLIRRKDAPVIEKSQGMLKYIVLDEAHSYIGSQAAELALLLRRVMQAFNVGPGTDKPVQIIATSATIGEDSPEGNKELAKFVADLAGVTERDVKVVRGYRQIPPISESLIRHEYPTSLASLNSLSSQELYQQLCHYRVAQQLRQALTRPGRLAVRLSELLNVARRTWPDINHRELLQLLDLMAKSREGESKFSLAFTPLRMHGFIRTLAGLWACSNKQCAHKASELGESDWPFGQVWFEQRQYCDCGAPVFEILRCSGCGSAYLSAKEEVRGDGTSWLVAQPAAAEEDEFALDLDVYSEDEDNNELENNSQFDRLIASDGEKYIISLEEATAGKIDREAQKHYEINLLRPESRGEGRNNSFACVCCGDTQRKNNPLFRPLRLGAPFFLNEIIPTLLEFSPLPQTREEQLGPFNGRRLLTFTDSRQGTARISARLQQDADKATLRTLCYQELANINEPSVKLSPAHCALLESFITQFSIPPLKNSIDALRKAMVSNEKLSPADVQALRIIEPMVSSLSQEHAEAMQILLVNSGNQQKKTMSWQTLSEQLVGSVDLADRMRGSFKDLSGLELTKQQFADFCLYSEFGRRPKNAWTLESLGLVAIHYPFIDKVTTCPQDWKTLLPDPDKQLPEWRNLLKITLDFFIRENSAVFYENEEYPRWMGARFPVKMLQGPDKKYKGQKRDQLWPQIRDRHYNRVIKLLIAVFPAIQPEQAHWKALVNYLMNEVWEAIRPCLRQFESGYQLDIKQQAEFYSPKQVWRCPYTRRALDVTLLGYSPYLPGSKEIAPEKAVLIEMPELPARHWRLSGGGEMAREERLHWLECNERIQHAREEGVWSTRSDRLALKDSWYRLEEHSAQRTPEKNQFNEKQFKAGKVNVLNCSTTMEMGVDIGGMSLVAMNNVPPAPANYLQRAGRAGRRGESASAAITLCKNTAHGMEVFKDPLWAFNTVASAPRVRFGSSSIVQRHVNALVLGAFLRAEVPDATKLSCKWFFEGDESQCLRFLHWLNHQADQLADKLKRLTQGTVLMSLTPPQLLTRTQTMMQLVDTRWRSQLAILLENIEALKTDNSAWEETPAGKAITYQLRDYRGAYLFSKLISEAFLPGHGFPVGVVNFNYLTADELERRRAIKATQADPNEGGENFSRRIEKLPSRDLPTALREYAPGADVVLGGKVYRSSGIMLGKVLASGQELSGDHHIPWFWHCRKCGAGATSATRPVECCHCKADIQQLDVKRYLQPVGFATDIRYQAHNDVSMPAQLPWKDPRVLVPSSVWVSLPDAGLGRYRFSHSGELFHFSEGEFGHGYAICLSCGRAESQTQPQRTPENLKNPEKENTHYLLRGGSNDRQGNNKLCHGHVHKDLWLGYSSRTDMVELQLSDDSGLLIRDDVAARSLAVALREGLAHKLGIENTELGVTTQQARDIDGFTGYSIFIYDNNAGGAGYAVQLIDNWSDVFNYARKLLDCSCDKFCHHCLLSYDSQHYVGKLDRHQALTLLTNLRLQRLNLAPEYQYFGESSRVETNPLSLRIAQCLNSEVYDSCSLVLAGSQEQWSFAQWPLFKELLQFASSGGNVELLIATQLENLADSTRHQLSALAAIPGECLQVKSIDTAQLVQGNGHLLAQVTREGQTQQWAAADSATVSPGELWGQSSASPVVTIKGASRKTFSGQTLSAEDLLPALPAGAVRINLSQQLDGQVEGFGSRFWALIAQQHAGWKKVFTNGREITHVHYSDRYLNSPFTVRLLGEILTELVEQGLAERAELTVSVKKLEYSSRQHDSLYNAWLDEQDRQQVMTTLLEEGYLGPAWSGKISWLAGDNQNTDHGRELTVTFSDGSEHYVLLDMGLSYWRCTGDTFFDFSGRIPNQVERLATCRALVIAPDNGLKSYIIAG

SEQ ID NO: 26382 - protein, 1117 aa, Klebsiella oxytoca 10-5249
MKTPVNPLLRWLNAFFSSRSLPGADGRALYAYRCHDAEYESLAALLRAHVPRNYPKTIFISYSDVLFSIYAAEFIRRNHTAGHPRWDVILESIGWKVPYAHRQKLVNDGIRYWKRKVRSLGQASGYLHTLACEGGLPIRMIENESGYLITYFKRVYQALRGQSSRRPAEIIAQELGDTIPATMQNELVYEIAGEFCETLHTLLNEHPTHGQDPVSSLRKQYPDWHLQLPLVLPEENASEIVRRLLSQSSEPRISSNVLVERIWVDVDDSWYCDARFRFPATMRTEQLISLFESNIQPEQTRLIISAKWRNGGARLAMLSRYEQQDWRVELLPFAMQKLSGADAMTEISLSLHEGPILLGHVIPKGGYELTEDLPWVFEAMNESESQLKLVGMGSVSSRQNSLFISLPTNSHLDISGEGEFDIPRLLKNSERSLTKISGVFSVVLHDGAVCTIRTQQLYDSAIEYYIKPTEIDLVKSDYPVHRAWPKIGWKKDMQHGIVPENELFWRSIRSGNNSWFSVASVMPKGQIEVRRIVNGEVLFSGKVVILPADFDIQIIPETAQQGVIVLSGITDARVDKYSNSEKVTLKSDYLQNECVIDCNSSQMLENTINLRVSWKDGSNLKLLLPKPVSGGRFVSNDGSVHFDGVASIAHLHGVDAELLTISCAGKGYLNIELLDENPMSEKFHYLHADIPLLSGRNEKLQQISLYENYNLLNAMLVCAWKNDSTLRVDFYSDRFGKDKTTLNIKRYDGRFIEGDERLLVDIKDSIVFPYHKIDDMVVEAISLNTPDLYTVLLKKDESGYDFSTLNNQGGPWLIVGKIDGAIRIAPVIKWMLPTLQTDDLFLNAICNASPEQRKEYCNALFLEMKNNPLQNSCYLLVEYIKKYKLNNSLPLLELDLFREISSNYCVIVQLLISSCLSGDSDAIYDIQEELPFSWGWIPVSIWKDVFEQCWYSLEKQINDKAFALNILQPFIAFINHQAHIDRRLVPIANMLLTHSEILPAGCTVLPSVSREQFNDAKQMLLRNPDSFGRVSIFSKELWDSAITPDLKSVFNKFWIENTYHTRFEKRFNLMLVAALLSQRNNKLMHQLTALFEFHYQQAPQQLGVIYQYYFEQAGVCH

SEQ ID NO: 26383 - protein, 2108 aa, Klebsiella oxytoca G54
MNVQQLHYAPLLNQLHQRAVRSVVSQLALRSKSLSQYLESQYFQPPGLGGSLLADPVFESTFGWMPADETMEDLRDKLISSPLVDALSNAPVPFRHQLTAWRTILEDKQSLLVSSGTGSGKTECFMVPVLEDLIRQQNLTRQSLTGTQAIFLYPLNALINSQQERLREWTRGFKGKIRFALYNGETRHTKYEVQEDQLKVPEQALSREAIYEAPPSIMVTNTTMLEYMLIRRKDAPVIEKSQGMLKYIVLDEAHSYIGSQAAELALLLRRVMQAFNVGPGTDKPVQIIATSATIGEDSPEGNKELAKFVADLAGVTERDVKVVRGYRQIPPISESLIRHEYPTSLASLNSLSSQELYQQLCHYRVAQQLRQALTRPGRLAVRLSELLNVARRTWPDINHRELLQLLDLMAKSREGESKFSLAFTPLRMHGFIRTLAGLWACSNKQCAHKASELGESDWPFGQVWFEQRQYCDCGAPVFEILRCSGCGSAYLSAKEEVRGDGTSWLVAQPAAAEEDEFALDLDVYSEDEDNNELENNSQFDRLIASDGEKYIISLEEATAGKIDREAQKHYEINLLRPESRGEGRNNSFACVCCGDTQRKNNPLFRPLRLGAPFFLNEIIPTLLEFSPLPQTREEQLGPFNGRRLLTFTDSRQGTARISARLQQDADKATLRTLCYQELANINEPSVKLSPAHCALLESFITQFSIPPLKNSIDALRKAMVSNEKLSPADVQALRIIEPMVSSLSQEHAEAMQILLVNSGNQQKKTMSWQTLSEQLVGSVDLADRMRGSFKDLSGLELTKQQFADFCLYSEFGRRPKNAWTLESLGLVAIHYPFIDKVTTCPQDWKTLLPDPDKQLPEWRNLLKITLDFFIRENSAVFYENEEYPRWMGARFPVKMLQGPDKKYKGQKRDQLWPQIRDRHYNRVIKLLIAVFPAIQPEQAHWKALVNYLMNEVWEAIRPCLRQFESGYQLDIKQQAEFYSPKQVWRCPYTRRALDVTLLGYSPYLPGSKEIAPEKAVLIEMPELPARHWRLSGGGEMAREERLHWLECNERIQHAREEGVWSTRSDRLALKDSWYRLEEHSAQRTPEKNQFNEKQFKAGKVNVLNCSTTMEMGVDIGGMSLVAMNNVPPAPANYLQRAGRAGRRGESASAAITLCKNTAHGMEVFKDPLWAFNTVASAPRVRFGSSSIVQRHVNALVLGAFLRAEVPDATKLSCKWFFEGDESQCLRFLHWLNHQADQLADKLKRLTQGTVLMSLTPPQLLTRTQTIMQLVDTRWRSQLAILLENIEALKTDNSAWEETPAGKAITYQLRDYRGAYLFSKLISEAFLPGHGFPVGVVNFNYLTADELERRRAIKATQADPNEGGENFSRRIEKLPSRDLPTALREYAPGADVVLGGKVYRSSGIMLGKVLASGQELSGDHHIPWFWHCRKCGAGATSATRPVECCHCKADIQQLDVKRYLQPVGFATDIRYQAHNDVSMPAQLPWKDPRVLVPSSVWVSLPDAGLGRYRFSHSGELFHFSEGEFGHGYAICLSCGRAESQTQPQRTPENLKNPEKENTHYLLRGGSNDRQGNNKLCHGHVHKDLWLGYSSRTDMVELQLSDDSGLLIRDDVAARSLAVALREGLAHKLGIENTELGVTTQQARDIDGFTGYSIFIYDNNAGGAGYAVQLIDNWSDVFNYARKLLDCSCDKFCHHCLLSYDSQHYVGKLDRHQALTLLTNLRLQRLNLAPEYQYFGESSRVETNPLSLRIAQCLNSEVYDSCSLVLAGSQEQWSFAQWPLFKELLQFASSGGNVELLIATQLENLADSTRHQLSALAAIPGECLQVKSIDTAQLVQGNGHLLAQVTREGQTQQWAAADSATVSPGELWGQSSASPVVTIKGASRKTFSGQTLSAEDLLPALPAGAVRINLSQQLDGQVEGFGSRFWALIAQQHAGWKKVFTNGREITHVHYSDRYLNSPFTVRLLGEILTELVEQGLAERAELTVSVKKLEYSSRQHDSLYNAWLDEQDRQQVMTTLLEEGYLGPAWSGKISWLAGDNQNTDHGRELTVTFSDGSEHYVLLDMGLSYWRCTGDTFFDFSGRIPNQVERLATCRALVIAPDNGLKSYIIAG

SEQ ID NO: 26384 - protein, 1117 aa, Klebsiella oxytoca G54
MKTPVNPLLRWLNAFFSSRSLPGADGRALYAYRCHDAEYESLAALLRAHVPRNYPKTIFISYSDVLFSIYAAEFIRRNHTAGHPRWDVILESIGWKVPYAHRQKLVNDGIRYWKRKVRSLGQASGYLHTLACEGGLPIRMIENESGYLITYFKRVYQALRGQSSRRPAEIIAQELGDTIPATMQNELVYEIAGEFCETLHTLLNEHPTHGQDPVSSLRKQYPDWHLQLPLVLPEENASEIVRRLLSQSSEPRISSNVLVERIWVDVDDSWYCDARFRFPATMRTEQLISLFESNIQPEQTRLIISAKWRNGGARLAMLSRYEQQDWRVELLPFAMQKLSGADAMTEISLSLHEGPILLGHVIPKGGYELTEDLPWVFEAMNESESQLKLVGMGSVSSRQNSLFISLPTNSHLDISGEGEFDIPRLLKNSERSLTKISGVFSVVLHDGAVCTIRTQQLYDSAIEYYIKPTEIDLVKSDYPVHRAWPKIGWKKDMQHGIVPENELFWRSIRSGNNSWFSVASVMPKGQIEVRRIVNGEVLFSGKVVILPADFDIQIIPETAQQGVIVLSGITDARVDKYSNNEKVTLKSDYLQNECVIDCNSSQMLENTINLRVSWKDGSNLKLLLPKPVSGGRFVSNDGSVHFDGVASIAHLHGVDAELLTISCAGKGYLNIELLDENPMSEKFHYLHADIPLLSGRNEKLQQISLYKNYNLLNAMLVCAWKNDSTLRVDFYSDRFGKDKTTLNIKRYDGRFIEGDERLLVDIKDSIVFPYHKIDDMVVEAISLNTPDLCTVLLKKDESGYDFSTLNNQGGPWLIVGKIDGAIRIAPVIKWMLPTLQTDDLFLNAICNASPEQRKEYCNALFLEMKNNPLQNSCYLLVEYIKKYKLNNSLPLLELDLFREISSNYCVVVQLLISSCLSGDSDAIYDIQEELPFSWGWIPVSIWKDVFEQCWYSLEKQINDKAFALNILQPFIAFINHQAHIDRRLVPIANMLLTHSEILPAGCTVLPSVSREQFNDAKQMLLRNPDSFGRVSIFSKELWDSAITPDLKSVFNKFWIENTYHTRFEKRFNLMLVAALLSQRNNKLMHQLTALFEFHYQQAPQQLGVIYQYYFEQAGVCH

SEQ ID NO: 26385 - protein, 2106 aa, Klebsiella pneumoniae
MTTRYFSSLIEQSLSRSTEATLSIMGVTNPQLREHLAQQMGADCGKSGSFLASPVFQQMFGWKASNKTMRSLTEGKALLSKAVVDSLDDQNNGRYRFGADWKPFTHQLASWKALLEKKHSVVVTSGTGSGKTECFMVPVLEDLYRELHENGNNPLIGVRALFLYPLNALINSQRERLDAWTRGFGSGIRYCLYNGNTENLHAAVKSEQVKRPNEVLSREKMREEPAPILVTNGTMLEYMMVRQIDAPIIQQSKSQKSLRWIVLDEAHTYVGSQAAELALQLRRVMTAFGVTPDDVRFVATSATIAGSDAEKQLKKFLSELSGIPQERIDVLDGSRVIPELEPCKHVFIPLEEIEQIPDTDMKGVSPERFDALTHSPEAYYLRDMLVTQPNPMKLDDMTQRLNSLTKQHYSQQDVLRWIDVCSGTQPNTKDPAFLKVRAHIFQRNTQGVWACVDKECRLKHGTPLEKGWPFGYVYVNKRQNCDCGSPVYELAFCNECNEPHLLARDKKGKLVQWENKGGDEFSLQDDVHIEHDAAEEKVDKESRFQPPLIIAAEKTSAAGYTQQRLDRQTRRIGVINNDSIPLIINDIEQVCSASSCGYRGTSGKQPFRRALLGGPFYVTNIVPTVLEYCQDFISEEGKEGVGPDSLPGRGRRLITFTDSRQGTARMAVRMQQEAERSRLRGSVVEILSWHQRTQTSATPNANADLEKLATRAKQARHEAKEYRSWGMPEQAKLAEAQAEQLEQAIQAATGGKAATILVSRTWIEMVNELKEKADIRGPILQYNHYLKPEIFNENGGPLKLSEMLLFREFMRRPKRTNSLETQGLVQVGYQGLEKSHKMPVHWQEKGLTLDDWKDFLKVTLDLYVRESNFTQLDDELKNWIGSRFSSKFVRNPDTKDPEDNQNRRWPQIRNGNISHRLVKILMLGAGFKTVNTATMDIINTWLKEAWTQLTGPLAVLKPDGNRFYLPKEHMTFSLITDAWICPVTNKILDTAFKGLTPYLPTHISFEHLTKTQYDAFVAQKVTMPEIWKLDRSQEDYAPGLAKVRDWVSKEPLIAQLRSENVWTDINDRVVEGGFYYRTAEHSAQQSSERLQSYEKMFKNGQLNVLNCSTTMEMGVDIGGITAVVMNNVPPHPANYLQRAGRAGRSQESRAISYTLCKGNPHDQQVFSNPLWPFETMIPAPMVAMNSARLVQRHVNALLLSDFLCHVIGETDKEKTSLDSLWFFGEDDGQSKCEHFKVWLERPVLDIDAALERLVKGTALHGARPDLLRDKTIHAITFLQQRWLSVYRDLVAQERESQPQTPYRKRIELEKKRHCGEYLLRDLAARTFLPGYGFPTDVVTFDNFTMEDYIREKSQKSRDKKDREDNVSRYKGLPSRNLGVAIREYAPGAEIILDGRVFRSAGVSLHWHNINADTNEAQRLDCAWRCHKCGTIGYEEGLSSSGTLFCTNSACGEKIIMDNRRQVLQPAGFVTDAHAPVTNNIETMKFIPVVPAWVFVKAEPVSLPNPIMGYMASGADGHVFQQSLGEGGHGYALCLSCGRAESMLNANDAPKSMEAHYPPRPGKADRDSQNQRLICPGSTALMKNVTLGALARTDVFEMVLRKPQNGEYLPDSTEEGRIVAMTLAVALRQALAGVLGISAAELGYAVRPVRLEDGQSVLAVQLYDVISGGAGFASSAPMHIEAILLGMVKQLGCHHCDTACSECLLDSQTRHDHDLLDRKAAQAWLGDDFSYYIGLPDDETFSLPDARYCPGAIGDTLRRAINEGAEKLTLWMNGPLNEWDLYARQFRAAIQNYRIKDNVAVDLVIPAGVDDPELLHELSQFTALGVRLCHSEQALELPIVAQVAFADRVMTLASRSQQATIPGPGWHLNDELVVRSLGYNTVKLNEFVLPGKAANAVERVKDIEIHKQLNGPLSQFGQRFWDLLCNNHEEAQSLMKNQRITSVHYTDRYLQNPVALALLGAILKPLKTKLTDDAELELDTLFKPKDRSGNRPSHDWMSEADFQDFADQWFTAAMGRAVELTVFDSPRDIPHHRKLTVTFEDSQMLKIRFDQGMGYWRIDFPYAWRNFDFTDDVTYQLVKLAQACQEGKVLNSEESWATDVLVEVMPS

SEQ ID NO: 26386 - protein, 1095 aa, Klebsiella pneumoniae
MSQSECISWVKCTSWLSNFLNRRGLRQPDSRPLYEYHATNDEYNNLTQLLRAVGQVQSYIDDKGYAACFVLFCSEWYRRDYERHCGWMWDPIYRALGVSLTSTELRIIIPKGMEGYWNRPIRFYESERRNFLGTLFSEGGLPFRLLKESDSHFQNVFSRILNQYGQAQLAGFSILSLVRTVIEKSALPTVFSEDTSVELISHIAEKLSSLVLMYNLSNHTEPVKQLDKVHPKWRDEFPMPLDDETGTRFLNGLLCTASVEAKSHLQKNKGSGCQFYWSENHPNQIQAIISLPDELTFPIISTPSTTRFELAIYEDGEEVTCLGPAYASLENAHAKVRLRKSESRFVRRQPAASLTIVARTGGMIVGTIKLEDSEIAVGEVPLTFVDDEERWLLQGQASCTVRNSNVLIALPQEKTTISGCEGSPGTASLLGLRTLSVKGRQDITISGDETYRIRTGREQSNQSGFDFDGKHVTWNCHPDETFLGVPKVTAKNLNAEDIQFKRYLSGISLDECQVQEMMGTQYVSVRNTHNETLLRRKIGILPADFNIEIKGGELANEGSIVISTQHPCMSVLKDKTLEVARKRSAGQTEILLKAEGIPPAFVSLQIYPNLGAAPVEMTLPFPAKGCLALDANGCTLDKNITLHDLLGSRAFLFGKNGDPTRFSLELHLRSKSGLQAWHEWCYTAGEHPVELNLYSLREHIENLLSLETGIDQVVEMQIKGAGAVMSWQIRRYKYSLRYDYERELLVSQSTHYRTEQMSSPVIMLLSEPERKITPLSSRMSEGVPTGEYELSSVINKNGPWLVVPKQGEEMAFRPCFIRGEPSLPVDESSIRSLQKATQLFNPQSEVNTITLVLEQMANDPAHSGWQFMRCLYDQFGYLPLATFEVWRALVQHPRALAMSLFKFEMSAEYLSRIENEFPILWEFFPIFEIKTAADRFKLFLSQKGAPEETQNLLVKSLYQRLGLVFPTYADEIEKWLSYGQFPPPIPEFFIREWYQELLREHSEARWPEYGSKRLHSWMTSQKNPVISINPDAEYRYSVAWLPVFAAAVASGNTSFEAVFDRKPGAVFFLRQVRDFDSRWFKAIFQCSLLRYFAQK

SEQ ID NO: 26387 - protein, 2106 aa, Klebsiella pneumoniae
MTTRYFSSLIEQSLSRSTEATLSIMGVTNPHLREHLAHQMAAECGKDGTFLASPVFEQTFGWKESNFTMRDLATKQTLLSKEVVDSLDNEENGRYRFGSTWKPFTHQLASWQALLDKKHSVVVTSGTGSGKTECFMVPVLEDLYRELRDNGKKPLIGVRALFLYPLNALINSQRERLDAWTQGFGTGIRYCLYNGNTEELHASVKSEQANRPNEVLSREKMREEPAPVLVTNGTMLEYMMVRQVDAPIIQKSKAEKSLRWIVLDEAHTYVGSQAAELALQLRRVMTAFGVTPDDVRFVATSATIAGSDAEKQLKKFLSELSGVPQERIDVLGGSRVIPDLEPCQHLSLSLDELERIPDSDGKGISLERYTALTHSPQARHLREMLVSQPRPMKLDTLSRRLNELTKHQYTQQDTLRWIDLCTGTLPNAQEPAFLKVRVHIFQRNTQGIWACVDKHCSAKHNTALEKGWPFGNVYVNQRQNCECGSPVYELAFCNECNEPHLLARDKKGKLVQWDNKGGDEFSLQDEAPDDFDSSSEKIQKEQVFQPPHIIAAECNTEMGYIVQRLDRQTRSIGVVNPDSIPLAMNDIEQVCSASNCSYRGGKGKHPFRRALLGGPFYVTNIVPTVLEYCQDFISDEGKEGVGPLSLPGRGRRLITFTDSRQGTARMAVRMQQEAERSRLRGSVMDILGWHQRKQSTHAPNAQADVTKLTEMAAQAREEAKNLHDWGMPEEAIRREEQAERLEHAIQVASGGKVDAALISLSWPEMVKELKDKADIKGPILQYNHYLKPEIFTENGGPLKLAEMLLFREFMRRPKRTNSLETQGLVQVGYLGLEKLHSIPAHWQEKGLTLDDWRDFLKVTLDFYVRESNYTQLDEDLKNWIGSRFSSKFVRNPDSKEPDDNQVKRWPQIRHGNVTQRLVKLLILGAKFSSVNTVTIDIVNAWLKEAWLQLTGSLAILKSDGNRFYLPKEHLTFSLVQKAYICPVTNKLLATAFRGLTPYLPMHIQFERLTSAQYDAFVAKSVTLPEIWQHDRSQDDYVDGLRKVRDWLGQDPLVAQLRSQNLWTDINDRVVEGGFYYRTAEHSAQQSSERLQSYERMFKNGQLNVLNCSTTMEMGVDIGGISAVVMNNVPPHPANYLQRAGRAGRSKESRAISYTLCKGNPHDRQVFANPLWPFETVIPAPMVAMNSERLVQRHVNSLLLSDYLCHVIGETEKERTSLNSQWFFGEELDQSVCNRFKAWLERPTLSIDAALVRLVKGTALHGVAAEKLRDKTCDAIAALQKRWLGIYRDLVKQESESHPNTPYRKRLELEKKRHCGEYLLRDLAARTFLPGYGFPTDVVTFDNFTMEDYIREKTYKVRDKSDREDNVSRYKGLPSRNLSVAIREYAPGAEIILDGRVFRSAGVSLHWHNLNADTNEAQRLDSAWRCHKCGTLGYEEGIGGSGDLFCTNDACGERITAENRRQVLQPAGFVTDAHDPVTNNIETMKFIPVVPAWVFVKAERVPLPNPLMGFMASGADGNVFQQSMGEGGHGYALCLSCGRAESMLNPTDAPKSMEAHYPPRPGKADRDSQNQRIICPGSTALNKNVTLGALARTDVFELIVRRPQDGEYIADNTEEGRIVAMTLAVALRRSLASVLGVSAAELGYAVRPVRLENEQSVLAVQLYDIISGGAGFASSAPLHIEAVLKGMVKQLGCHHCDTACSECLLDSQTRHDHDLLDRKAALAWLGADFSHYIGLPDEEKFSLADAQYCPGSIEDTLRRAINDGGRKLTLWMGGPLNEWDLYARQFRTAIQNYRLKDDVEVVLVIPRNIDDPEILLELAQFAAIGVQLCQSELDTDTPLVAQVAFDDRLMTLISRSHEATIPGPNWHLNSQMVIRSHLQGPIALYKAELPSEDAGSKGLVNDIEIHKQLNGPVSQFGQRFWNLLTESQDDIQRLLTECRVTRIHYSDRYLQNPVALALLGGLLKTLKPMLTQEAEVTIDTLFRSKERPGNKPFHDWMSEADFQDFADQWFAASMGRAVEIQAFNSGRDIPHHRKLMVSFDNGQALKIRFDQGMGYWRINFARAWRDFNFNVDVSFQLGNMEQACAEGLVVNSEESWATDVLVQVIAP

SEQ ID NO: 26388 - protein, 1099 aa, Klebsiella pneumoniae
MSYHEHISILKCTPWLVKFLTRRGLRKPDNRPLYEYHATSDEYDELKRLLRAVGLPDGYKSDKGYAACFTLFCSEWYRRDYERECGWAWEPIYKTIGISASSSEMGKIIPKGLDGYWGRPVRFYDTERRNFLGSLFSEGGLPFRLLKESNSRFQSMFSLILNQYEQAQLSNISTFMLVHSAVEKSSLPVVFKEDTSVELISRMAEQLVSLVQIYDLSNHTEPVKELERVHPKWRDSFPVPLDDDTGTSFLNGLLQTASIESKPRLQKNKATLCQFLWSENHPEAVQTVIALPEELNFLLESEPSTTRFELAIYEDGNEIASLGPAYATLNNSQAKIRVRKREIKFYRKTPNVSLFIVARAGGMLVGSKLLEGSEIAAGDVPLIFVSDHDEWLLQGQASCCVRGSRVLIILPKDGCLASKHEACDVGLSALGCRAFTIEGRQDIIIEGDETYRIKTGRDKIIQAGFSFQGKQLNWTSYPDEVFLGIPGITKDPDDISEHHYRRFFNGTFIDDCDLHEKMGAQFLSVRNNNNETLLRKKIGILPNDFSLEIKNGEQANEGSIIISTKHSCWYSLKEKTLEVDRKRSPGSTEIMMKTEGVPPASILLQITPNLAANPIVVSLPFPARGCLAFDKDEKPLPKNLTIHDLLGARAYLFGKNGEPTRYQLELRLRSRSGMQAWYEWRYSAGESPVEITLYSLREHIDNLLSLEEGIDQTVDMRIEGGGSSFTWQIRRYKYSLEYDRERQLLLANSVSNRTGQIPSPVIMLLSEPERKAISLVSRTSEGVPVGEFELSSTIQNNGPWLVVPKQGDEASFRPCYIAGEPVIQSDTTTIQSLQKATQHFNPRSDVNTITLVLEQMASDPAHSGWQFLRNLYNQFGYLPLATFEVWRALVLHPRALAMSLFKFEMSIDYLSRIESEFPVFWEFLPITEVKYAAMRFRAFMTHKGAPEEMQNKSLGRMFQKLGTVFPTYASEVQTWLDQGKLPPTFPAQMIEGIIHEWYQELLREHGESRWPEFGGPGLFRWYASQKDPIIEVLPDTSYRYSVTLLPIFAAAVTCGKTTFDSVFENKPGAVFFLRQVRDFDSRWFNAIFQYCLLRNVAEK

SEQ ID NO: 26389 - protein, 2106 aa, Klebsiella pneumoniae; identical to SEQ ID NO: 26385

SEQ ID NO: 26390 - protein, 1095 aa, Klebsiella pneumoniae; identical to SEQ ID NO: 26386

SEQ ID NO: 26391 - protein, 2106 aa, Klebsiella pneumoniae
MTTRYFSSLIEQSLSRSTEATLSIMGVTNPQLREHLAQQMGADCGKSGSFLASPVFQQMFGWKASNKTMRSLTEGKALLSKAVVDSLDDQNNGRYRFGADWKPFTHQLASWKALLEKKHSVVVTSGTGSGKTECFMVPVLEDLYRELHENGNNPLIGVRALFLYPLNALINSQRERLDAWTRGFGSGIRYCLYNGNTENLHAAVKSEQVKRPNEVLSREKMREEPAPILVTNGTMLEYMMVRQIDAPIIQQSKSQKSLRWIVLDEAHTYVGSQAAELALQLRRVMTAFGVTPDDVRFVATSATIAGSDAEKQLKKFLSELSGIPQERIDVLDGSRVIPELEPCKHVFIPLEEIEQIPDTDMKGVSPERFDALTHSPEAYYLRDMLVTQPNPMKLDDMTQRLNSLTKQHYSQQDVLRWIDVCSGTQPNTKDPAFLKVRAHIFQRNTQGVWACVDKECRLKHGTPLEKGWPFGYVYVNKRQNCDCGSPVYELAFCNECNEPHLLARDKKGKLVQWENKGGDEFSLQDDVHIEHDAAEEKVDKESRFQPALIIAAEKTSAAGYTQQRLDRQTRRIGVINNDSIPLVINDIEQVCSASSCGYRGTSGKQPFRRALLGGPFYVTNIVPTVLEYCQDFISEEGKEGVGPDSLPGRGRRLITFTDSRQGTARMAVRMQQEAERSRLRGSVVEILSWHQRTQTSATPNANADLEKLATRAKQAHNEAKEYRSWGMPEQAKLAEAQAEQLEQAIQAATGGKAATILFSRTWIEMVNELKEKADIRGPILQYNHYLKPEIFNENGGPLKLSEMLLFREFMRRPKRTNSLETQGLVQVGYQGLEKIHKMPVHWQEKGLTLDDWKDFLKVTLDLYVRESNFTQLDDELKNWIGSRFSSKFVRNPDTKDPEDNQNRRWPQIRNGNISHRLVKLLMLGAGFKTVNTATMDIINTWLKEAWTQLTGPLAVLKPDGNRFYLPKEHMTFSLITDAWICPVTNKILDTAFKGLTPYLPTHISFEHLTKTQYDAFVAQKVTMPEIWKLDRSQEDYAPGLAKVRDWVSKEPLIAQLRSENVWTDINDRVVEGGFYYRTAEHSAQQSSERLQSYEKMFKNGQLNVLNCSTTMEMGVDIGGITAVVMNNVPPHPANYLQRAGRAGRSQESRAISYTLCKGNPHDQQVFANPLWPFETMIPAPMVAMNSARLVQRHVNALLLSDFLCHVIGETDKEKTSLDSLWFFGEDDGQSKCEHFKVWLERPVLDIDAALERLVKGTALHGARPDLLRDKTIHAITFLQQRWLSVYRDLVAQERESQPQTPYRKRIELEKKRHCGEYLLRDLAARTFLPGYGFPTDVVTFDNFTMEDYIREKSQKSRDKKDREDNVSRYKGLPSRNLGVAIREYAPGAEIILDGRVFRSAGVSLHWHNINADTNEAQRLDCAWRCHKCGTIGYEEGLSSSGTLFCTNSACGEKIIMDNRRQVLQPAGFVTDAHAPVTNNIETMKFIPVVPAWVFVKAEPVSLPNPIMGYMASGADGHVFQQSLGEGGHGYALCLSCGRAESMLNANDAPKSMEAHYPPRPGKADRDSQNQRLICPGSTALMKNVTLGALARTDVFEMVLRKPQNGEYLPDSTEEGRIVAMTLAVALRQALAGVLGISAAELGYAVRPVRLEDGQSVLAVQLYDVISGGAGFASSAPMHIEAILLGMVKQLGCHHCDTACSECLLDSQTRHDHDLLDRKAAQAWLGDDFSYYIGLPDDETFSLPDARYCPGAIGDTLRRAINEGAEKLTLWMNGPLNEWDLYARQFRAAIQNYRIKDNVAVDLVIPAGVDDPELLHELSQFTALGVRLCHSEQALELPIVAQVAFADRVMTLASRSQQATIPGPGWHLNDELVVRSLGYNTVKLNEFVLPGKAANSVERVKDIEIHKQLNGALSQFGQRFWDTLFNSHEEAQSLMKNQRITSVHYTDRYLQNPVALALLGAILKPLKTKLTDDAELELDTLFKPKDRPGNRPFHDWMSDADFQDFADQWFTAAMGRAVELTVFDSPRDIPHHRKLTVTFEDGQTLKIRFDQGMGYWRIDFPNAWRNFDFTDDVTYQLVKMAQACQEGKVLNSEDSWATDVLVEVMSS

SEQ ID NO: 26392 - protein, 1095 aa, Klebsiella pneumoniae
MSQSECISWVKCTSWLSNFLNRRGLRQPDSRPLYEYHATNDEYNNLTQLLRAVGQVQSNIDDKGYAACFVLFCSEWYRRDYERHCGWMWDPIYRALGVSLTSTELRIIIPKGMEGYWNRPIRFYESERRNFLGTLFSEGGLPFRLLKESDSHFQNVFSRILNQYGQAQLAGFSILSLVRTVIEKSALPTVFSEDTSVELISHIAEKLSSLVLMYNLSNHTEPVKQLDKVHPKWRDEFPMPLDDETGTRFLNGLLCTASVEAKSHLQKNKGSGCQFYWSENHPNQIQAIISLPDELTFPIISTPSTTRFELAIYEDGEEVTCLGPAYASLENAHAKVRLRKSESRFVRRQPAASLTIVARTGGMIVGTIKLEDSEIAVGEVPLTFVDDEERWLLQGQASCTVRNSNVLIALPQEKTTISGCEGSPGTASLLGLRTLSVKGRQDITISGDETYRIRTGREQSNQSGFDFDGKHVTWNCHPDETFLGVPKVTAKNLNAEDIQFKRYLSGISLDECQVQEMMGTQYVSVRNTHNETLLRRKIGILPADFNIEIKGGELANEGSIVISTQHPCMSVLKDKTLEVARKRSAGQTEILLKAEGIPPAFVSLQIYPNLGAAPVEMTLPFPAKGCLALDANGCTLDKNITLHDLLGSRAFLFGKNGDPTRFSLELHLRSKSGLQAWHEWCYTAGEHPVELNLYSLREHIENLLSLETGIDQVVEMQIKGAGAVMSWQIRRYKYSLRYDYERELLVSQSTHYRTEQMSSPVIMLLSEPERKITPLSSRMSEGVPTGEYELSSVINKNGPWLVVPKQGEEMAFRPCFIRGEPSLPVDESSIRSLQKATQLFNPQSEVNTITLVLEQMANDPAHSGWQFMRCLYDQFGYLPLATFEVWRALVQHPRALAMSLFKFEMSAEYLSRIENEFPILWEFFPIFEIKTAADRFKLFLSQKGAPEETQNLLVKSLYQRLGLVFPTYADEIEKWLSYGQFPPPIPEFFIREWYQELLREHSEARWPEYGSKRLHSWMTSQKNPVISINPDAEYRYSVAWLPVFAAAVASGNTSFEAVFDRKPGAVFFLRQVRDFDSRWFKAIFQCSLLRYFAQK

SEQ ID NO: 26393 - protein, 2106 aa, Klebsiella pneumoniae; identical to SEQ ID NO: 26385

SEQ ID NO: 26394 - protein, 1095 aa, Klebsiella pneumoniae; identical to SEQ ID NO: 26386

SEQ ID NO: 26395 - protein, 2106 aa, Klebsiella pneumoniae; identical to SEQ ID NO: 26385

SEQ ID NO: 26396 - protein, 1095 aa, Klebsiella pneumoniae; identical to SEQ ID NO: 26386

SEQ ID NO: 26397 - protein, 2108 aa, Klebsiella pneumoniae; identical to SEQ ID NO: 26381

SEQ ID NO: 26398 - protein, 1117 aa, Klebsiella pneumoniae
MKTPVNPLLRWLNAFFSSRSLPGADGRALYAYRCHDAEYESLAALLRAHVPRNYPKTIFISYSDVLFSIYAAEFIRRNHTAGHPRWDVILESIGWKVPYAHRQKLVNDGIRYWKRKVRSLGQASGYLHTLACEGGLPIRMIENESGYLITYFKRVYQALRGQSSRRPAEIIAQELGDTIPATMQNELVYEIAGEFCETLHTLLNEHPTHGQDPVSSLRKQYPDWHLQLPLVLPEENASEIVRRLLSQSSEPRISSNVLVERIWVDVDDSWYCDARFRFPATMRTEQLIYLFESNIQPEQTRLIISAKWRNGGARLAMLSRYEQQDWRVELLPFAMQKLSGADAMTEISLSLHEGPILLGHVIPKGGYELTEDLPWVFEAMNESESQLKLVGMGSVSSRQNSLFISLPTNSHLDISGEGEFDIPRLLKNSERSLTKISGVFSVVLHDGAVCTIRTQQLYDSAIEYYIKPTEIDLVKSDYPVHRAWPKIGWKKDMQHGIVPENELFWRSIRSGNNSWFSVASVMPKGQIEVRRIVNGEVLFSGKVVILPADFDIQIIPETAQQGVIVLSGITDARVDKYSNNEKVTLKSDYLQNECVIDCNSSQMLESTINLRVSWKDGSNLKLLLPKPVSGGRFVSNDGSVHFDGVASIAHLHGVDAELLTISCAGKGYLNIELLDENPMSEKFHYLHADIPLLSGRNEKLQQISLYENYNLLNAMLVCAWKNDSTLRVDFYSDRFGKDKTTLNIKRYDGRFIEGDERLLVDIKDSIVFPYHKIDDMVVEAISLNTPDLCTVLLKKDESGYDFSTLNNQGGPWLIVGKIDGAIRIAPVIKWMLPTLQTDDLFLNAICNASPEQRKEYCNALFLEMKNNPLQNSCYLLVEYIKKYKLNNSLPLLELDLFREISSNYCVVVQLLISSCLSGDSDAIYDIQEELPFSWGWIPVSIWKDVFEQCWYSLEKQINDKAFALNILQPFIAFINHQAHIDRRLVPIANMLLTHSEILPAGCTVLPSVSREQFNDAKQMLLRNPDSFGRVSIFSKELWDSAITPDLKSVFNKFWIENTYHTRFEKRFNLMLVAALLSQRNNKLMHQLTALFEFHYQQAPQQLGVIYQYYFEQAGVCH

SEQ ID NO: 26399 - protein, 2106 aa, Klebsiella pneumoniae; identical to SEQ ID NO: 26391

SEQ ID NO: 26400 - protein, 1095 aa, Klebsiella pneumoniae; identical to SEQ ID NO: 26392

SEQ ID NO: 26401 - protein, 2106 aa, Klebsiella pneumoniae; identical to SEQ ID NO: 26385

SEQ ID NO: 26402 - protein, 1095 aa, Klebsiella pneumoniae; identical to SEQ ID NO: 26386

SEQ ID NO: 26403 - protein, 2106 aa, Klebsiella pneumoniae; identical to SEQ ID NO: 26385

SEQ ID NO: 26404 - protein, 1095 aa, Klebsiella pneumoniae; identical to SEQ ID NO: 26386

SEQ ID NO: 26405 - protein, 2106 aa, Klebsiella pneumoniae; identical to SEQ ID NO: 26385

SEQ ID NO: 26406 - protein, 1095 aa, Klebsiella pneumoniae; identical to SEQ ID NO: 26386

SEQ ID NO: 26407 - protein, 2106 aa, Klebsiella pneumoniae; identical to SEQ ID NO: 26385

SEQ ID NO: 26408 - protein, 1095 aa, Klebsiella pneumoniae; identical to SEQ ID NO: 26386

SEQ ID NO: 26409 - protein, 2108 aa, Klebsiella pneumoniae
MNVQQLHYAPLLNQLHQRAVRSVVSQLALRSKSLSQYLESQYFQPPGLGGSLLADPVFESTFGWMPADETMEDLRDKLISSPLVDALSNAPVPFRHQLTAWRTILEDKQSLLVSSGTGSGKTECFMVPVLEDLIRQQNLTRQSLTGTQAIFLYPLNALINSQQERLREWTRGFKGKIRFALYNGETRHTKYEVQEDQLKVPEQALSREAIYEAPPSIMVTNTTMLEYMLIRRKDAPVIEKSQGMLKYIVLDEAHSYIGSQAAELALLLRRVMQAFNVGPGTDKPVQIIATSATIGEDSPEGNKELAKFVADLAGVTERDVKVVRGYRQIPPISESLIRHEYPTSLASLNSLSSQELYQQLCHYRVAQQLRQALTRPGRLAVRLSELLNVARRTWPDINHRELLQLLDLMAKSREGESKFSLAFTPLRMHGFIRTLAGLWACSNKQCAHKASELGVSDWPFGQVWFEQRQYCDCGAPVFEILRCSGCGSAYLSAKEEVRGDGTSWLVAQPAAAEEDEFALDLDVYSEDEDNNELENNSQFDRLIASDGEKYIISLEEATAGKIDREAQKHYEINLLRPESRGEGRNNSFACVCCGDTQRKNNPLFRPLRLGAPFFLNEIIPTLLEFSPLPQTREEQLGPFNGRRLLTFTDSRQGTARISARLQQDADKATLRTLCYQELANINEPSVKLSPAHCALLESFITQFSIPPLKNSIDALRKAMVSNEKLSPADVQALRIIEPMVSSLSQEHAEAMQILLVNSGNQQKKTMSWQTLSEQLVGSVDLADRMRGSFKDLSGLELTKQQFADFCLYSEFGRRPKNAWTLESLGLVAIHYPFIDKVTTCPQDWKTLLPDPDKQLPEWRNLLKITLDFFIRENSAVFYENEEYPRWMGARFPVKMLQGPDKKYKGQKRDQLWPQIRDRHYNRVIKLLIAVFPAIQPEQAHWKALVNYLMNEVWEAIRPCLRQFESGYQLDIKQQAEFYSPKQVWRCPYTRRALDVTLLGYSPYLPGSKEIAPEKAVLIEMPELPARHWRLSGGGEMAREERLHWLECNERIQHAREEGVWSTRSDRLALKDSWYRLEEHSAQRTPEKNQFNEKQFKAGKVNVLNCSTTMEMGVDIGGMSLVAMNNVPPAPANYLQRAGRAGRRGESASAAITLCKNTAHGMEVFKDPLWAFNTVASAPRVRFGSSSIVQRHVNALVLGAFLRAEVPDATKLSCKWFFEGDESQCLRFLHWLNHQADQLADKLKRLTQGTVLMSLTPPQLLTRTQTMMQLVDTRWRSQLAILLENIEALKADNSAWEETPAGKAITYQLRDYRGAYLFSKLISEAFLPGHGFPVGVVNFNYLTADELERRRAIKATQADPNEGGENFSRRIEKLPSRDLPTALREYAPGADVVLGGKVYRSSGIMLGKVLASGQELSGDHHIPWFWHCRKCGAGATSATRPVECCHCKADIQQLDVKRYLQPVGFATDIRYQAHNDVSMPAQLPWKDPRVLVPSSVWVSLPDAGLGRYRFSHSGELFHFSEGEFGHGYAICLSCGRAESQTQPQRTPENLKNPEKENTHYLLRGGSNDRQGNNKLCHGHVHKDLWLGYSSRTDMVELQLSDDSGLLIRDDVAARSLAVALREGLAHKLGIENTELGVTTQQARDIDGFTGYSIFIYDNNAGGAGYAVQLIDNWSDVFNYARKLLDCSCDKFCHHCLLSYDSQHYVGKLDRHQALTLLTNLRLQRLNLAPEYQYFGESSRVETNPLSLRIAQCLNSEVYDSCSLVLAGSQEQWSFAQWPLFKELLQFASSGGNVELLIATQLENLADSTRHQLSALAAIPGECLQVKSIDTAQLVQGNGHLLAQVTREGQTQQWAAADSATVSPGELWGQSSASPVVTIKGASRKTFSGQTLSAEDLLPALPAGAVRINLSQQLDGQVEGFGSRFWALIAQQHAGWKKVFTNGREITHVHYSDRYLNSPFTVRLLGEILTELVEQGLAERAELTVSVKKLEYSSRQHDSLYNAWLDEQDRQQVMTTLLEEGYLGPAWSGKISWLAGDNQNTDHGRELTVTFSDGSEHYVLLDMGLSYWRCTGDTFFDFSGRIPNQVERLATCRALVIAPDNGLKSYIIAG

SEQ ID NO: 26410 - protein, 978 aa, Klebsiella pneumoniae
MIENESGYLITYFKRVYQALRGQSSRRPAEIIAQELGDTIPATMQNELVYEIAGEFCETLHTLLNEHPTHGQDPVSSLRKQYPDWHLQLPLVLPEENASEIVRRLLSQSSEPRISSNVLVERIWVDVDDSWYCDARFRFPATMRTEQLISLFESNIQPEQTRLIISAKWRNGGARLAMLSRYEQQDWRVELLPFAMQKLSGADAMTEISLSLHEGPILLGHVIPKGGYELTEDLPWVFEAMNESESQLKLVGMGSVSSRQNSLFISLPTNSHLDISGEGEFDIPRLLKNSERSLTKISGVFSVVLHDGAVCTIRTQQLYDSAIEYYIKPTEIDLVKSDYPVHRAWPKIGWKKDMQHGIVPENELFWRSIRSGNNSWFSVASVMPKGQIEVRRIVNGEVLFSGKVVILPADFDIQIIPETAQQGVIVLSGITDARVDKYSNNEKVTLKSDYLQNECVIDCNSSQMLESTINLRVSWKDGSNLKLLLPKPVSGGRFVSNDGSVHFDGVASIAHLHGVDAELLTISCAGKGYLNIELLDENPMSEKFHYLHADIPLLSGRNEKLQQISLYENYNLLNAMLVCAWKNDSTLRVDFYSDRFGKDKTTLNIKRYDGRFIEGDERLLVDIKDSIVFPYHKIDDMVVEAISLNTPDLCTVLLKKDESGYDFSTLNNQGGPWLIVGKIDGAIRIAPVIKWMLPTLQTDDLFLNAICNASPEQRKEYCNALFLEMKNNPLQNTCYLLVEYIKKYKLNNSLPLLELDLFREISSNYYVVVQLLISSCLSGDSDAIYDIQEELPFSWGWIPVSIWKDVFEQCWYSLEKQINDKAFALNILQPFIAFINHQAHIDRRLVPIANMLLTHSEILPAGCTVLPSVSREQFNDAKQMLLRNPDSFGRVSIFSKELWDSAITPDLKSVFNKFWIENTYHTRFEKRFNLMLVAALLSQRNNKLMHQLTALFEFHYQQAPQQLGVIYQYYFEQAGVCH

SEQ ID NO: 26411 - protein, 2106 aa, Klebsiella pneumoniae
MTTRYFSSLIEQSLSRSTEATLSIMGVTNPQLREHLAQQMGADCGKSGSFLASPVFQQMFGWKASNKTMRSLTEGKALLSKAVVDSLDDQNNGRYRFGADWKPFTHQLASWKALLEKKHSVVVTSGTGSGKTECFMVPVLEDLYRELHENGNNPLIGVRALFLYPLNALINSQRERLDAWTRGFGSGIRYCLYNGNTENLHAAVKSEQVKRPNEVLSREKMREEPAPILVTNGTMLEYMMVRQIDAPIIQQSKSQKSLRWIVLDEAHTYVGSQAAELALQLRRVMTAFGVTPDDVRFVATSATIAGSDAEKQLKKFLSELSGIPQERIDVLDGSRVIPELEPCKHVFIPLEEIEQIPDTDMKGVSPERFDALTHSPEAYYLRDMLVTQPNPMKLDDMTQRLNSLTKQHYSQQDVLRWIDVCSGTQPNTKDPAFLKVRAHIFQRNTQGVWACVDKECRLKHGTPLEKGWPFGYVYVNKRQNCDCGSPVYELAFCNECNEPHLLARDKKGKLVQWENKGGDEFSLQDDVHIEHDAAEEKVDKESRFQPALIIAAEKTSAAGYTQQRLDRQTRRIGVINNDSIPLVINDIEQVCSASSCGYRGTSGKQPFRRALLGGPFYVTNIVPTVLEYCQDFISEEGKEGVGPDSLPGRGRRLITFTDSRQGTARMAVRMQQEAERSRLRGSVVEILSWHQRTQTSATPNANADLEKLATRAKQAHNEAKEYRSWGMPEQAKLAEAQAEQLEQAIQAATGGKAATILFSRTWIEMVNELKEKADIRGPILQYNHYLKPEIFNENGGPLKLSEMLLFREFMRRPKRTNSLETQGLVQVGYQGLEKIHKMPVHWQEKGLTLDDWKDFLKVTLDLYVRESNFTQLDDELKNWIGSRFSSKFVRNPDTKDPEDNQNRRWPQIRNGNISHRLVKLLMLGAGFKTVNTATMDIINTWLKEAWTQLTGPLAVLKPDGNRFYLPKEHMTFSLITDAWICPVTNKILDTAFKGLTPYLPTHISFEHLTKTQYDAFVAQKVTMPEIWKLDRSQEDYAPGLAKVRDWVSKEPLIAQLRSENVWTDINDRVVEGGFYYRTAEHSAQQSSERLQSYEKMFKNGQLNVLNCSTTMEMGVDIGGITAVVMNNVPPHPANYLQRAGRAGRSQESRAISYTLCKGNPHDQQVFANPLWPFETMIPAPMVAMNSARLVQRHVNALLLSDFLCHVIGETDKEKTSLDSLWFFGEDDGQSKCEHFKVWLERPVLDIDAALERLVKGTALHGARPDLLRDKTIHAITFLQQRWLSVYRDLVAQERESQPQTPYRKRIELEKKRHCGEYLLRDLAARTFLPGYGFPTDVVTFDNFTMEDYIREKSQKSRDKKDREDNVSRYKGLPSRNLGVAIREYAPGAEIILDGRVFRSAGVSLHWHNINADTNEAQRLDCAWRCHKCGTIGYEEGLSSSGTLFCTNSACGEKIIMDNRRQVLQPAGFVTDAHAPVTNNIETMKFIPVVPAWVFVKEEPVSLPNPIMGYMASGADGHVFQQSLGEGGHGYALCLSCGRAESMLNANDAPKSMEAHYPPRPGKADRDSQNQRLICPGSTALMKNVTLGALARTDVFEMVLRKPQNGEYLPDSTEEGRIVAMTLAVALRQALAGVLGISAAELGYAVRPVRLEDGQSVLAVQLYDVISGGAGFASSAPMHIEAILLGMVKQLGCHHCDTACSECLLDSQTRHDHDLLDRKAAQAWLGDDFSYYIGLPDDETFSLPDARYCPGAIGDTLRRAINEGAEKLTLWMNGPLNEWDLYARQFRAAIQNYRIKDNVAVDLVIPAGVDDPELLHELSQFTALGVRLCHSEQALELPIVAQVAFADRVMTLASRSQQATIPGPGWHLNDELVVRSLGYNTVKLNEFVLPGKAANSVERVKDIEIHKQLNGALSQFGQRFWDTLFNSHEEAQSLMKNQRITSVHYTDRYLQNPVALALLGAILKPLKTKLTDDAELELDTLFKPKDRPGNRPFHDWMSDADFQDFADQWFTAAMGRAVELTVFDSPRDIPHHRKLTVTFEDGQTLKIRFDQGMGYWRIDFPNAWRNFDFTDDVTYQLVKMAQACQEGKVLNSEDSWATDVLVEVMSS

SEQ ID NO: 26412 - protein, 1095 aa, Klebsiella pneumoniae; identical to SEQ ID NO: 26392

SEQ ID NO: 26413 - protein, 2106 aa, Klebsiella pneumoniae; identical to SEQ ID NO: 26411

SEQ ID NO: 26414 - protein, 1095 aa, Klebsiella pneumoniae; identical to SEQ ID NO: 26392

SEQ ID NO: 26415 - protein, 2106 aa, Klebsiella pneumoniae
MTTRYFSSLIEQSLSRSTEATLSIMGVTNPQLREHLAQQMGADCGKSGSFLASPVFQQMFGWKASNKTMRSLTEGKALLSKAVVDSLDDQNNGRYRFGADWKPFTHQLASWKALLEKKHSVVVTSGTGSGKTECFMVPVLEDLYRELHENGNNPLIGVRALFLYPLNALINSQRERLDAWTRGFGSGIRYCLYNGNTENLHAAVKSEQVKRPNEVLSREKMREEPAPILVTNGTMLEYMMVRQIDAPIIQQSKSQKSLRWIVLDEAHTYVGSQAAELALQLRRVMTAFGVTPDDVRFVATSATIAGSDAEKQLKKFLSELSGIPQERIDVLDGSRVIPELEPCKHVFIPLEEIEQIPDTDMKGVSPERFDALTHSPEAYYLRDMLVTQPNPMKLDDMTQRLNSLTKQHYSQQDVLRWIDVCSGTQPNTKDPAFLKVRAHIFQRNTQGVWACVDKECRLKHGTPLEKGWPFGYVYVNKRQNCDCGSPVYELAFCNECNEPHLLARDKKGKLVQWENKGGDEFSLQDDVHIEHDAAEEKVDKESRFQPALIIAAEKTSAAGYTQQRLDRQTRRIGVINNDSIPLVINDIEQVCSASSCGYRGTSGKQPFRRALLGGPFYVTNIVPTVLEYCQDFISEEGKEGVGPDSLPGRGRRLITFTDSRQGTARMAVRMQQEAERSRLRGSVVEILSWHQRTQTSATPNANADLEKLATRAKQAHNEAKEYRSWGMPEQAKLAEAQAEQLEQAIQAATGGKAATILFSRTWIEMVNELKEKADIRGPILQYNHYLKPEIFNENGGPLKLSEMLLFREFMRRPKRTNSLETQGLVQVGYQGLEKIHKMPVHWQEKGLTLDDWKDFLKVTLDLYVRESNFTQLDDELKNWIGSRFSSKFVRNPDTKDPEDNQNRRWPQIRNGNISHRLVKLLMLGVGFKTVNTATMDIINTWLKEAWTQLTGPLAVLKPDGNRFYLPKEHMTFSLITDAWICPVTNKILDTAFKGLTPYLPTHISFEHLTKTQYDAFVAQKVTMPEIWKLDRSQEDYAPGLAKVRDWVSKEPLIAQLRSENVWTDINDRVVEGGFYYRTAEHSAQQSSERLQSYEKMFKNGQLNVLNCSTTMEMGVDIGGITAVVMNNVPPHPANYLQRAGRAGRSQESRAISYTLCKGNPHDQQVFANPLWPFETMIPAPMVAMNSARLVQRHVNALLLSDFLCHVIGETDKEKTSLDSLWFFGEDDGQSKCEHFKVWLERPVLDIDAALERLVKGTALHGARPDLLRDKTIHAITFLQQRWLSVYRDLVAQERESQPQTPYRKRIELEKKRHCGEYLLRDLAARTFLPGYGFPTDVVTFDNFTMEDYIREKSQKSRDKKDREDNVSRYKGLPSRNLGVAIREYAPGAEIILDGRVFRSAGVSLHWHNINADTNEAQRLDCAWRCHKCGTIGYEEGLSSSGTLFCTNSACGEKIIMDNRRQVLQPAGFVTDAHAPVTNNIETMKFIPVVPAWVFVKAEPVSLPNPIMGYMASGADGHVFQQSLGEGGHGYALCLSCGRAESMLNANDAPKSMEAHYPPRPGKADRDSQNQRLICPGSTALMKNVTLGALARTDVFEMVLRKPQNGEYLPDSTEEGRIVAMTLAVALRQALAGVLGISAAELGYAVRPVRLEDGQSVLAVQLYDVISGGAGFASSAPMHIEAILLGMVKQLGCHHCDTACSECLLDSQTRHDHDLLDRKAAQAWLGDDFSYYIGLPDDETFSLPDARYCPGAIGDTLRRAINEGAEKLTLWMNGPLNEWDLYARQFRAAIQNYRIKDNVAVDLVIPAGVDDPELLHELSQFTALGVRLCHSEQALELPIVAQVAFADRVMTLASRSQQATIPGPGWHLNDELVVRSLGYNTVKLNEFVLPGKAANSVERVKDIEIHKQLNGALSQFGQRFWDTLFNSHEEAQSLMKNQRITSVHYTDRYLQNPVALALLGAILKPLKTKLTDDAELELDTLFKPKDRPGNRPFHDWMSDADFQDFADQWFTAAMGRAVELTVFDSPRDIPHHRKLTVTFEDGQTLKIRFDQGMGYWRIDFPNAWRNFDFTDDVTYQLVKMAQACQEGKVLNSEDSWATDVLVEVMSS

SEQ ID NO: 26416 - protein, 1095 aa, Klebsiella pneumoniae; identical to SEQ ID NO: 26392

SEQ ID NO: 26417 - protein, 2106 aa, Klebsiella pneumoniae; identical to SEQ ID NO: 26415

SEQ ID NO: 26418 - protein, 1095 aa, Klebsiella pneumoniae; identical to SEQ ID NO: 26392

SEQ ID NO: 26419 - protein, 2106 aa, Klebsiella pneumoniae; identical to SEQ ID NO: 26391

SEQ ID NO: 26420 - protein, 1095 aa, Klebsiella pneumoniae; identical to SEQ ID NO: 26392

SEQ ID NO: 26421 - protein, 2106 aa, Klebsiella pneumoniae; identical to SEQ ID NO: 26385

SEQ ID NO: 26422 - protein, 1095 aa, Klebsiella pneumoniae; identical to SEQ ID NO: 26386

SEQ ID NO: 26423 - protein, 2106 aa, Klebsiella pneumoniae; identical to SEQ ID NO: 26385

SEQ ID NO: 26424 - protein, 1095 aa, Klebsiella pneumoniae; identical to SEQ ID NO: 26386

SEQ ID NO: 26425 - protein, 2106 aa, Klebsiella pneumoniae; identical to SEQ ID NO: 26385

SEQ ID NO: 26426 - protein, 1008 aa, Klebsiella pneumoniae
MWDPIYRALGVSLTSTELRIIIPKGMEGYWNRPIRFYESERRNFLGTLFSEGGLPFRLLKESDSHFQNVFSRILNQYGQAQLAGFSILSLVRTVIEKSALPTVFSEDTSVELISHIAEKLSSLVLMYNLSNHTEPVKQLDKVHPKWRDEFPMPLDDETGTRFLNGLLCTASVEAKSHLQKNKGSGCQFYWSENHPNQIQAIISLPDELTFPIISTPSTTRFELAIYEDGEEVTCLGPAYASLENAHAKVRLRKSESRFVRRQPAASLTIVARTGGMIVGTIKLEDSEIAVGEVPLTFVDDEERWLLQGQASCTVRNSNVLIALPQEKTTISGCEGSPGTASLLGLRTLSVKGRQDITISGDETYRIRTGREQSNQSGFDFDGKHVTWNCHPDETFLGVPKVTAKNLNAEDIQFKRYLSGISLDECQVQEMMGTQYVSVRNTHNETLLRRKIGILPADFNIEIKGGELANEGSIVISTQHPCMSVLKDKTLEVARKRSAGQTEILLKAEGIPPAFVSLQIYPNLGAAPVEMTLPFPAKGCLALDANGCTLDKNITLHDLLGSRAFLFGKNGDPTRFSLELHLRSKSGLQAWHEWCYTAGEHPVELNLYSLREHIENLLSLETGIDQVVEMQIKGAGAVMSWQIRRYKYSLRYDYERELLVSQSTHYRTEQMSSPVIMLLSEPERKITPLSSRMSEGVPTGEYELSSVINKNGPWLVVPKQGEEMAFRPCFIRGEPSLPVDESSIRSLQKATQLFNPQSEVNTITLVLEQMANDPAHSGWQFMRCLYDQFGYLPLATFEVWRALVQHPRALAMSLFKFEMSAEYLSRIENEFPILWEFFPIFEIKTAADRFKLFLSQKGAPEETQNLLVKSLYQRLGLVFPTYADEIEKWLSYGQFPPPIPEFFIREWYQELLREHSEARWPEYGSKRLHSWMTSQKNPVISINPDAEYRYSVAWLPVFAAAVASGNTSFEAVFDRKPGAVFFLRQVRDFDSRWFKAIFQCSLLRYFAQK

SEQ ID NO: 26427 - protein, 2106 aa, Klebsiella pneumoniae; identical to SEQ ID NO: 26391

SEQ ID NO: 26428 - protein, 1095 aa, Klebsiella pneumoniae; identical to SEQ ID NO: 26392

SEQ ID NO: 26429 - protein, 2106 aa, Klebsiella pneumoniae; identical to SEQ ID NO: 26385

SEQ ID NO: 26430 - protein, 1095 aa, Klebsiella pneumoniae; identical to SEQ ID NO: 26386

SEQ ID NO: 26431 - protein, 2106 aa, Klebsiella pneumoniae; identical to SEQ ID NO: 26385

SEQ ID NO: 26432 - protein, 1095 aa, Klebsiella pneumoniae; identical to SEQ ID NO: 26386

SEQ ID NO: 26433 - protein, 2082 aa, Klebsiella pneumoniae 303K
MGVTNPQLREHLAQQMGADCGKSGSFLASPVFQQMFGWKASNKTMRSLTEGKALLSKAVVDSLDDQNNGRYRFGADWKPFTHQLASWKALLEKKHSVVVTSGTGSGKTECFMVPVLEDLYRELHENGNNPLIGVRALFLYPLNALINSQRERLDAWTRGFGSGIRYCLYNGNTENLHAAVKSEQVKRPNEVLSREKMREEPAPILVTNGTMLEYMMVRQIDAPIIQQSKSQKSLRWIVLDEAHTYVGSQAAELALQLRRVMTAFGVTPDDVRFVATSATIAGSDAEKQLKKFLSELSGIPQERIDVLDGSRVIPELEPCKHVFIPLEEIEQIPDTDMKGVSPERFDALTHSPEAYYLRDMLVTQPNPMKLDDMTQRLNSLTKQHYSQQDVLRWIDVCSGTQPNTKDPAFLKVRAHIFQRNTQGVWACVDKECRLKHGTPLEKGWPFGYVYVNKRQNCDCGSPVYELAFCNECNEPHLLARDKKGKLVQWENKGGDEFSLQDDVHIEHDAAEEKVDKESRFQPPLIIAAEKTSAAGYTQQRLDRQTRRIGVINNDSIPLIINDIEQVCSASSCGYRGTSGKQPFRRALLGGPFYVTNIVPTVLEYCQDFISEEGKEGVGPDSLPGRGRRLITFTDSRQGTARMAVRMQQEAERSRLRGSVVEILSWHQRTQTSATPNANADLEKLATRAKQARHEAKEYRSWGMPEQAKLAEAQAEQLEQAIQAATGGKAATILVSRTWIEMVNELKEKADIRGPILQYNHYLKPEIFNENGGPLKLSEMLLFREFMRRPKRTNSLETQGLVQVGYQGLEKSHKMPVHWQEKGLTLDDWKDFLKVTLDLYVRESNFTQLDDELKNWIGSRFSSKFVRNPDTKDPEDNQNRRWPQIRNGNISHRLVKILMLGAGFKTVNTATMDIINTWLKEAWTQLTGPLAVLKPDGNRFYLPKEHMTFSLITDAWICPVTNKILDTAFKGLTPYLPTHISFEHLTKTQYDAFVAQKVTMPEIWKLDRSQEDYAPGLAKVRDWVSKEPLIAQLRSENVWTDINDRVVEGGFYYRTAEHSAQQSSERLQSYEKMFKNGQLNVLNCSTTMEMGVDIGGITAVVMNNVPPHPANYLQRAGRAGRSQESRAISYTLCKGNPHDQQVFSNPLWPFETMIPAPMVAMNSARLVQRHVNALLLSDFLCHVIGETDKEKTSLDSLWFFGEDDGQSKCEHFKVWLERPVLDIDAALERLVKGTALHGARPDLLRDKTIHAITFLQQRWLSVYRDLVAQERESQPQTPYRKRIELEKKRHCGEYLLRDLAARTFLPGYGFPTDVVTFDNFTMEDYIREKSQKSRDKKDREDNVSRYKGLPSRNLGVAIREYAPGAEIILDGRVFRSAGVSLHWHNINADTNEAQRLDCAWRCHKCGTIGYEEGLSSSGTLFCTNSACGEKIIMDNRRQVLQPAGFVTDAHAPVTNNIETMKFIPVVPAWVFVKAEPVSLPNPIMGYMASGADGHVFQQSLGEGGHGYALCLSCGRAESMLNANDAPKSMEAHYPPRPGKADRDSQNQRLICPGSTALMKNVTLGALARTDVFEMVLRKPQNGEYLPDSTEEGRIVAMTLAVALRQALAGVLGISAAELGYAVRPVRLEDGQSVLAVQLYDVISGGAGFASSAPMHIEAILLGMVKQLGCHHCDTACSECLLDSQTRHDHDLLDRKAAQAWLGDDFSYYIGLPDDETFSLPDARYCPGAIGDTLRRAINEGAEKLTLWMNGPLNEWDLYARQFRAAIQNYRIKDNVAVDLVIPAGVDDPELLHELSQFTALGVRLCHSEQALELPIVAQVAFADRVMTLASRSQQATIPGPGWHLNDELVVRSLGYNTVKLNEFVLPGKAANAVERVKDIEIHKQLNGPLSQFGQRFWDLLCNNHEEAQSLMKNQRITSVHYTDRYLQNPVALALLGAILKPLKTKLTDDAELELDTLFKPKDRSGNRPSHDWMSEADFQDFADQWFTAAMGRAVELTVFDSPRDIPHHRKLTVTFEDSQMLKIRFDQGMGYWRIDFPYAWRNFDFTDDVTYQLVKLAQACQEGKVLNSEESWATDVLVEVMPS

SEQ ID NO: 26434 - protein, 983 aa, Klebsiella pneumoniae 303K
MEGYWNRPIRFYESERRNFLGTLFSEGGLPFRLLKESDSHFQNVFSRILNQYGQAQLAGFSILSLVRTVIEKSALPTVFSEDTSVELISHIAEKLSSLVLMYNLSNHTEPVKQLDKVHPKWRDEFPMPLDDETGTRFLNGLLCTASVEAKSHLQKNKGSGCQFYWSENHPNQIQAIISLPDELTFPIISTPSTTRFELAIYEDGEEVTCLGPAYASLENAHAKVRLRKSESRFVRRQPAASLTIVARTGGMIVGTIKLEDSEIAVGEVPLTFVDDEERWLLQGQASCTVRNSNVLIALPQEKTTISGCEGSPGTASLLGLRTLSVKGRQDITISGDETYRIRTGREQSNQSGFDFDGKHVTWNCHPDETFLGVPKVTAKNLNAEDIQFKRYLSGISLDECQVQEMMGTQYVSVRNTHNETLLRRKIGILPADFNIEIKGGELANEGSIVISTQHPCMSVLKDKTLEVARKRSAGQTEILLKAEGIPPAFVSLQIYPNLGAAPVEMTLPFPAKGCLALDANGCTLDKNITLHDLLGSRAFLFGKNGDPTRFSLELHLRSKSGLQAWHEWCYTAGEHPVELNLYSLREHIENLLSLETGIDQVVEMQIKGAGAVMSWQIRRYKYSLRYDYERELLVSQSTHYRTEQMSSPVIMLLSEPERKITPLSSRMSEGVPTGEYELSSVINKNGPWLVVPKQGEEMAFRPCFIRGEPSLPVDESSIRSLQKATQLFNPQSEVNTITLVLEQMANDPAHSGWQFMRCLYDQFGYLPLATFEVWRALVQHPRALAMSLFKFEMSAEYLSRIENEFPILWEFFPIFEIKTAADRFKLFLSQKGAPEETQNLLVKSLYQRLGLVFPTYADEIEKWLSYGQFPPPIPEFFIREWYQELLREHSEARWPEYGSKRLHSWMTSQKNPVISINPDAEYRYSVAWLPVFAAAVASGNTSFEAVFDRKPGAVFFLRQVRDFDSRWFKAIFQCSLLRYFAQK

SEQ ID NO: 26435 - protein, 2106 aa, Klebsiella pneumoniae BIDMC 11; identical to SEQ ID NO: 26385

SEQ ID NO: 26436 - protein, 1095 aa, Klebsiella pneumoniae BIDMC 11
MSQSECISWVKCTSWLSNFLNRRGLRQPDSRPLYEYHATNDEYNNLTQLLRAVGQVQSYIDDKGYAACFVLFCSEWYRRDYERHCGWMWDPIYRALGVSLTSTELRIIIPKGMEGYWNRPIRFYESERRNFLGTLFSEGGLPFRLLKESDSHFQNVFSRILNQYGQAQLAGFSILSLVRTVIEKSALPTVFSEDTSVELISHIAEKLSSLVLMYNLSNHTEPVKQLDKVHPKWRDEFPMPLDDETGTRFLNGLLCTASVEAKSHLQKNKGSGCQFYWSENHPNQIQAIISLPDELTFPIISTPSTTRFELAIYEDGEEVTCLGPAYASLENAHAKVRLRKSESRFVRRQPAASLTIVARTGGMIVGTIKLEDSEIAVGEVPLTFVDDEERWLLQGQASCTVRNSNVLIALPQEKTTISGCEGSPGTASLLGLRTLSVKGRQDITISGDETYRIRTGREQSNQSGFDFDGKHVTWNCHPDETFLGVPKVTAKNLNAEDIQFKRYLSGISLDECQVQEMMGTQYVSVRNTHNETLLRRKIGILPADFNIEIKGGELANEGSIVISTQHPCMSVLKDKTLEVARKRSAGQTEILLKAEGIPPAFVSLQIYPNLGAAPVEMTLPFPAKGCLALDANGCTLDKNITLHDLLGSRAFLFGKNGDPTRFSLELHLRSKSGLQAWHEWCYTAGEHPVELNLYSLREHIENLLSLETGIDQVVEMQIKGAGAVMSWQIRRNKYSLRYDYERELLVSQSTHYRTEQMSSPVIMLLSEPERKITPLSSRMSEGVPTGEYELSSVINKNGPWLVVPKQGEEMAFRPCFIRGEPSLPVDESSIRSLQKATQLFNPQSEVNTITLVLEQMANDPAHSGWQFMRCLYDQFGYLPLATFEVWRALVQHPRALAMSLFKFEMSAEYLSRIENEFPILWEFFPIFEIKTAADRFKLFLSQKGAPEETQNLLVKSLYQRLGLVFPTYADEIEKWLSYGQFPPPIPEFFIREWYQELLREHSEARWPEYGSKRLHSWMTSQKNPVISINPDAEYRYSVAWLPVFAAAVASGNTSFEAVFDRKPGAVFFLRQVRDFDSRWFKAIFQCSLLRYFAQK

SEQ ID NO: 26437 - protein, 2106 aa, Klebsiella pneumoniae BIDMC 36; identical to SEQ ID NO: 26391

SEQ ID NO: 26438 - protein, 1095 aa, Klebsiella pneumoniae BIDMC 36; identical to SEQ ID NO: 26392

SEQ ID NO: 26439 - protein, 2106 aa, Klebsiella pneumoniae CHS 66; identical to SEQ ID NO: 26385

SEQ ID NO: 26440 - protein, 1095 aa, Klebsiella pneumoniae CHS 66
MSQSECISWVKCTSWLSNFLNRRGLRQPDSRPLYEYHATNDEYNNLTQLLRAVGQVQSYIDDKGYAACFVLFCSEWYRRDYERHCGWMWDPIYRALGVSLTSTELRIIIPKGMEGYWNRPIRFYESERRNFLGTLFSEGGLPFRLLKESDSHFQNVFSRILNQYGQAQLAGFSILSLVRTVIEKSALPTVFSEDTSVELISHIAEKLSSLVLMYNLSNHTEPVKQLDKVHPKWRDEFPMPLDDETGTRFLNGLLCTASVEAKSHLQKNKGSGCQFYWSENHPNQIQAIISLPDELTFPIISTPSTTRFELAIYEDGEEVTCLGPAYASLENAHAKVRLRKSESRFVRRQPAASLTIVARTGGMIVGTIKLEDSEIAVGEVPLTFVDDEERWLLQGQASCTVRNSNVLIALPQEKTTISGCEGSPGTASLLGLRTLSVKGRQDITISGDETYRIRTGREQSNQSGFDFDGKHVTWNCHPDETFLGVPKVTAKNLNAEDIQFKRYLSGISLDECQVQEMMGTQYVSVRNTHNETLLRRKIGILPADFNIEIKGGELANEGSIVISTQHPCMSVLKDKTLEVARKRSAGQTEILLKAEGIPPAFVSLQIYPNLGAAPVEMTLPFPAKGCLALDANGCTLDKNITLHDLLGSRAFLFGKNGDPTRFSLELHLRSKSGLQAWHEWCYTAGEHPVELNLYSLREHIENLLSLETGIDQVVEMQIKGAGAVMSWQIRRYKYSLRYDYERELLVSQSTHYRTEQMSSPVIMLLSEPERKITPLSSRMSEGVPTGEYELSSVINKNGPWLVVPKQGEEMAFRPCFIRVEPSLPVDESSIRSLQKATQLFNPQSEVNTITLVLEQMANDPAHSGWQFMRCLYDQFGYLPLATFEVWRALVQHPRALAMSLFKFEMSAEYLSRIENEFPILWEFFPIFEIKTAADRFKLFLSQKGAPEETQNLLVKSLYQRLGLVFPTYADEIEKWLSYGQFPPPIPEFFIREWYQELLREHSEARWPEYGSKRLHSWMTSQKNPVISINPDAEYRYSVAWLPVFAAAVASGNTSFEAVFDRKPGAVFFLRQVRDFDSRWFKAIFQCSLLRYFAQK

SEQ ID NO: 26441 - protein, 2114 aa, Klebsiella pneumoniae IS22; identical to SEQ ID NO: 25853

SEQ ID NO: 26442 - protein, 1096 aa, Klebsiella pneumoniae IS22; identical to SEQ ID NO: 25854

SEQ ID NO: 26443 - protein, 2106 aa, Klebsiella pneumoniae JHCK1; identical to SEQ ID NO: 26385

SEQ ID NO: 26444 - protein, 1095 aa, Klebsiella pneumoniae JHCK1; identical to SEQ ID NO: 26386

SEQ ID NO: 26445 - protein, 2082 aa, Klebsiella pneumoniae KP-11
MGVTNPQLREHLAQQMGADCGKSGSFLASPVFQQMFGWKASNKTMRSLTEGKALLSKAVVDSLDDQNNGRYRFGADWKPFTHQLASWKALLEKKHSVVVTSGTGSGKTECFMVPVLEDLYRELHENGNNPLIGVRALFLYPLNALINSQRERLDAWTRGFGSGIRYCLYNGNTENLHAAVKSEQVKRPNEVLSREKMREEPAPILVTNGTMLEYMMVRQIDAPIIQQSKSQKSLRWIVLDEAHTYVGSQAAELALQLRRVMTAFGVTPDDVRFVATSATIAGSDAEKQLKKFLSELSGIPQERIDVLDGSRVIPELEPCKHVFIPLEEIEQIPDTDMKGVSPERFDALTHSPEAYYLRDMLVTQPNPMKLDDMTQRLNSLTKQHYSQQDVLRWIDVCSGTQPNTKDPAFLKVRAHIFQRNTQGVWACVDKECRLKHGTPLEKGWPFGYVYVNKRQNCDCGSPVYELAFCNECNEPHLLARDKKGKLVQWENKGGDEFSLQDDVHIEHDAAEEKVDKESRFQPALIIAAEKTSAAGYTQQRLDRQTRRIGVINNDSIPLVINDIEQVCSASSCGYRGTSGKQPFRRALLGGPFYVTNIVPTVLEYCQDFISEEGKEGVGPDSLPGRGRRLITFTDSRQGTARMAVRMQQEAERSRLRGSVVEILSWHQRTQTSATPNANADLEKLATRAKQAHNEAKEYRSWGMPEQAKLAEAQAEQLEQAIQAATGGKAATILFSRTWIEMVNELKEKADIRGPILQYNHYLKPEIFNENGGPLKLSEMLLFREFMRRPKRTNSLETQGLVQVGYQGLEKIHKMPVHWQEKGLTLDDWKDFLKVTLDLYVRESNFTQLDDELKNWIGSRFSSKFVRNPDTKDPEDNQNRRWPQIRNGNISHRLVKLLMLGAGFKTVNTATMDIINTWLKEAWTQLTGPLAVLKPDGNRFYLPKEHMTFSLITDAWICPVTNKILDTAFKGLTPYLPTHISFEHLTKTQYDAFVAQKVTMPEIWKLDRSQEDYAPGLAKVRDWVSKEPLIAQLRSENVWTDINDRVVEGGFYYRTAEHSAQQSSERLQSYEKMFKNGQLNVLNCSTTMEMGVDIGGITAVVMNNVPPHPANYLQRAGRAGRSQESRAISYTLCKGNPHDQQVFANPLWPFETMIPAPMVAMNSARLVQRHVNALLLSDFLCHVIGETDKEKTSLDSLWFFGEDDGQSKCEHFKVWLERPVLDIDAALERLVKGTALHGARPDLLRDKTIHAITFLQQRWLSVYRDLVAQERESQPQTPYRKRIELEKKRHCGEYLLRDLAARTFLPGYGFPTDVVTFDNFTMEDYIREKSQKSRDKKDREDNVSRYKGLPSRNLGVAIREYAPGAEIILDGRVFRSAGVSLHWHNINADTNEAQRLDCAWRCHKCGTIGYEEGLSSSGTLFCTNSACGEKIIMDNRRQVLQPAGFVTDAHAPVTNNIETMKFIPVVPAWVFVKAEPVSLPNPIMGYMASGADGHVFQQSLGEGGHGYALCLSCGRAESMLNANDAPKSMEAHYPPRPGKADRDSQNQRLICPGSTALMKNVTLGALARTDVFEMVLRKPQNGEYLPDSTEEGRIVAMTLAVALRQALAGVLGISAAELGYAVRPVRLEDGQSVLAVQLYDVISGGAGFASSAPMHIEDILLGMVKQLGCHHCDTACSECLLDSQTRHDHDLLDRKAAQAWLGDDFSYYIGLPDDETFSLPDARYCPGAIGDTLRRAINEGAEKLTLWMNGPLNEWDLYARQFRAAIQNYRIKDNVAVDLVIPAGVDDPELLHELSQFTALGVRLCHSEQALELPIVAQVAFADRVMTLASRSQQATIPGPGWHLNDELVVRSLGYNTVKLNEFVLPGKAANSVERVKDIEIHKQLNGALSQFGQRFWDTLFNSHEEAQSLMKNQRITSVHYTDRYLQNPVALALLGAILKPLKTKLTDDAELELDTLFKPKDRPGNRPFHDWMSDADFQDFADQWFTAAMGRAVELTVFDSPRDIPHHRKLTVTFEDSQMLKIRFDQGMGYWRIDFPYAWRNFDFTDDVTYQLVKLAQACQEGKVLNSEESWATDVLVEVMPS

SEQ ID NO: 26446 - protein, 1095 aa, Klebsiella pneumoniae KP-11
MSQSECISWVKCTSWLSNFLNRRGLRQPDSRPLYEYHATNDEYNNLTQLLRAVGQVQSNIDDKGYAACFVLFCSEWYRRDYERHCGWMWDPIYRALGVSLTSTELRIIIPKGMEGYWNRPIRFYESERRNFLGTLFSEGGLPFRLLKESDSHFQNVFSRILNQYGQAQLAGFSILSLVRTVIEKSALPTVFSEDTSVELISHIAEKLSSLVLMYNLSNHTEPVKQLDKVHPKWRDEFPMPLDDETGTRFLNGLLCTASVEAKSHLQKNKGSGCQFYWSENHPNQIQAIISLPDELTFPIISTPSTTRFELAIYEDGEEVTCLGPAYASLENAHAKVRLRKSESRFVRRQPAASLTIVARTGGMIVGTIKLEDSEIAVGEVPLTFVDDEERWLLQGQASCTVRNSNVLIALPQEKTTISGCEGSPGTASLLGLRTLSVKGRQDITISGDETYRIRTGREQSNQSGFDFDGKHVTWNCHPDETFLGVPKITAKNLNAEDIQFKRYLSGISLDECQVQEMMGTQYVSVRNTHNETLLRRKIGILPADFNIEIKGGELANEGSIVISTQHPCMSVLKDKTLEVARKRSAGQTEILLKAEGIPPAFVSLQIYPNLGAAPVEMTLPFPAKGCLALDANGCTLDKNITLHDLLGSRAFLFGKNGDPTRFSLELHLRSKSGLQAWHEWCYTAGEHPVELNLYSLREHIENLLSLETGIDQVVEMQIKGAGAVMSWQIRRYKYSLRYDYERELLVSQSTHYRTEQMSSPVIMLLSEPERKITPLSSRMSEGVPTGEYELSSVINKNGPWLVVPKQGEEMAFRPCFIRGEPSLPVDESSIRSLQKATQLFNPQSEVNTITLVLEQMANDPAHSGWQFMRCLYDQFGYLPLATFEVWRALVQHPRALAMSLFKFEMSAEYLSRIENEFPILWEFFPIFEIKTAADRFKLFLSQKGAPEETQNLLVKSLYQRLGLVFPTYADEIEKWLSYGQFPPPIPEFFIREWYQELLREHSEARWPEYGSKRLHSWMTSQKNPVISINPDAEYRYSVAWLPVFAAAVASGNTSFEAVFDRKPGAVFFLRQVRDFDSRWFKAIFQCSLLRYFAQK

SEQ ID NO: 26447 - protein, 2106 aa, Klebsiella pneumoniae KP-7
MTTRYFSSLIEQSLSRSTEATLSIMGVTNPQLREHLAQQMGADCGKSGSFLASPVFQQMFGWKASNKTMRSLTEGKALLSKAVVDSLDDQNNGRYRFGADWKPFTHQLASWKALLEKKHSVVVTSGTGSGKTECFMVPVLEDLYRELHENGNNPLIGVRALFLYPLNALINSQRERLDAWTRGFGSGIRYCLYNGNTENLHAAVKSEQVKRPNEVLSREKMREEPAPILVTNGTMLEYMMVRQIDAPIIQQSKSQKSLRWIVLDEAHTYVGSQAAELALQLRRVMTAFGVTPDDVRFVATSATIAGSDAEKQLKKFLSELSGIPQERIDVLDGSRVIPELEPCKHVFIPLEEIEQIPDTDMKGVSPERFDALTHSPEAYYLRDMLVTQPNPMKLDDMTQRLNSLTKQHYSQQDVLRWIDVCSGTQPNTKDPAFLKVRAHIFQRNTQGVWACVDKECRLKHGTPLEKGWPFGYVYVNKRQNCDCGSPVYELAFCNECNEPHLLARDKKGKLVQWENKGGDEFSLQDDVHIEHDAAEEKVDKESRFQPALIIAAEKTSAAGYTQQRLDRQTRRIGVINNDSIPLVINDIEQVCSASSCGYRGTSGKQPFRRALLGGPFYVTNIVPTVLEYCQDFISEEGKEGVGPDSLPGRGRRLITFTDSRQGTARMAVRMQQEAERSRLRGSVVEILSWHQRTQTSATPNANADLEKLATRAKQAHNEAKEYRSWGMPEQAKLAEAQAEQLEQAIQAATGGKAATILFSRTWIEMVNELKEKADIRGPILQYNHYLKPEIFNENGGPLKLSEMLLFREFMRRPKRTNSLETQGLVQVGYQGLEKIHKMPVHWQEKGLTLDDWKDFLKVTLDLYVRESNFTQLDDELKNWIGSRFSSKFVRNPDTKDPEDNQNRRWPQIRNGNISHRLVKLLMLGAGFKTVNTATMDIINTWLKEAWTQLTGPLAVLKPDGNRFYLPKEHMTFSLITDAWICPVTNKILDTAFKGLTPYLPTHISFEHLTKTQYDAFVAQKVTMPEIWKLDRSQEDYAPGLAKVRDWVSKEPLIAQLRSENVWTDINDRVVEGGFYYRTAEHSAQQSSERLQSYEKMFKNGQLNVLNCSTTMEMGVDIGGITAVVMNNVPPHPANYLQRAGRAGRSQESRAISYTLCKGNPHDQQVFANPLWPFETMIPAPMVAMNSARLVQRHVNALLLSDFLCHVIGETDKEKTSLDSLWFFGEDDGQSKCEHFKVWLERPVLDIDAALERLVKGTALHGARPDLLRDKTIHAITFLQQRWLSVYRDLVAQERESQPQTPYRKRIELEKKRHCGEYLLRDLAARTFLPGYGFPTDVVTFDNFTMEDYIREKSQKSRDKKDREDNVSRYKGLPSRNLGVAIREYAPGAEIILDGRVFRSAGVSLHWHNINADTNEAQRLDCAWRCHKCGTIGYEEGLSSSGTLFCTNSACGEKIIMDNRRQVLQPAGFVTDAHAPVTNNIETMKFIPVVPAWVFVKAEPVSLPNPIMGYMASGADGHVFQQSLGEGGHGYALCLSCGRAESMLNANDAPKSMEAHYPPRPGKADRDSQNQRLICPGSTALMKNVTLGALARTDVFEMVLRKPQNGEYLPDSTEEGRIVAMTLAVALRQALAGVLGISAAELGYAVRPVRLEDGQSVLAVQLYDVISGGAGFASSAPMHIEDILLGMVKQLGCHHCDTACSECLLDSQTRHDHDLLDRKAAQAWLGDDFSYYIGLPDDETFSLPDARYCPGAIGDTLRRAINEGAEKLTLWMNGPLNEWDLYARQFRAAIQNYRIKDNVAVDLVIPAGVDDPELLHELSQFTALGVRLCHSEQALELPIVAQVAFADRVMTLASRSQQATIPGPGWHLNDELVVRSLGYNTVKLNEFVLPGKAANSVERVKDIEIHKQLNGALSQFGQRFWDTLFNSHEEAQSLMKNQRITSVHYTDRYLQNPVALALLGAILKPLKTKLTDDAELELDTLFKPKDRPGNRPFHDWMSDADFQDFADQWFTAAMGRAVELTVFDSPRDIPHHRKLTVTFEDSQMLKIRFDQGMGYWRIDFPYAWRNFDFTDDVTYQLVKLAQACQEGKVLNSEESWATDVLVEVMPS

SEQ ID NO: 26448 - protein, 1095 aa, Klebsiella pneumoniae KP-7; identical to SEQ ID NO: 26446

SEQ ID NO: 26449 - protein, 2108 aa, Klebsiella pneumoniae MGH 18; identical to SEQ ID NO: 26409

SEQ ID NO: 26450 - protein, 1117 aa, Klebsiella pneumoniae MGH 18
MKTPVNPLLRWLNAFFSSRSLPGADGRALYAYRCHDAEYESLAALLRAHVPRNYPKTIFISYSDVLFSIYAAEFIRRNHTAGHPRWDVILESIGWKVPYAHRQKLVNDGIRYWKRKVRSLGQASGYLHTLACEGGLPIRMIENESGYLITYFKRVYQALRGQSSRRPAEIIAQELGDTIPATMQNELVYEIAGEFCETLHTLLNEHPTHGQDPVSSLRKQYPDWHLQLPLVLPEENASEIVRRLLSQSSEPRISSNVLVERIWVDVDDSWYCDARFRFPATMRTEQLISLFESNIQPEQTRLIISAKWRNGGARLAMLSRYEQQDWRVELLPFAMQKLSGADAMTEISLSLHEGPILLGHVIPKGGYELTEDLPWVFEAMNESESQLKLVGMGSVSSRQNSLFISLPTNSHLDISGEGEFDIPRLLKNSERSLTKISGVFSVVLHDGAVCTIRTQQLYDSAIEYYIKPTEIDLVKSDYPVHRAWPKIGWKKDMQHGIVPENELFWRSIRSGNNSWFSVASVMPKGQIEVRRIVNGEVLFSGKVVILPADFDIQIIPETAQQGVIVLSGITDARVDKYSNNEKVTLKSDYLQNECVIDCNSSQMLESTINLRVSWKDGSNLKLLLPKPVSGGRFVSNDGSVHFDGVASIAHLHGVDAELLTISCAGKGYLNIELLDENPMSEKFHYLHADIPLLSGRNEKLQQISLYENYNLLNAMLVCAWKNDSTLRVDFYSDRFGKDKTTLNIKRYDGRFIEGDERLLVDIKDSIVFPYHKIDDMVVEAISLNTPDLCTVLLKKDESGYDFSTLNNQGGPWLIVGKIDGAIRIAPVIKWMLPTLQTDDLFLNAICNASPEQRKEYCNALFLEMKNNPLQNTCYLLVEYIKKYKLNNSLPLLELDLFREISSNYYVVVQLLISSCLSGDSDAIYDIQEELPFSWGWIPVSIWKDVFEQCWYSLEKQINDKAFALNILQPFIAFINHQAHIDRRLVPIANMLLTHSEILPAGCTVLPSVSREQFNDAKQMLLRNPDSFGRVSIFSKELWDSAITPDLKSVFNKFWIENTYHTRFEKRFNLMLVAALLSQRNNKLMHQLTALFEFHYQQAPQQLGVIYQYYFEQAGVCH

SEQ ID NO: 26451 - protein, 2106 aa, Klebsiella pneumoniae MGH 35; identical to SEQ ID NO: 26391

SEQ ID NO: 26452 - protein, 1095 aa, Klebsiella pneumoniae MGH 35; identical to SEQ ID NO: 26392

SEQ ID NO: 26453 - protein, 2106 aa, Klebsiella pneumoniae MGH 46; identical to SEQ ID NO: 26385

SEQ ID NO: 26454 - protein, 286 aa, Klebsiella pneumoniae MGH 46
MAFRPCFIRGEPSLPVDESSIRSLQKATQLFNPQSEVNTITLVLEQMANDPAHSGWQFMRCLYDQFGYLPLATFEVWRALVQHPRALAMSLFKFEMSAEYLSRIENEFPILWEFFPIFEIKTAADRFKLFLSQKGAPEETQNLLVKSLYQRLGLVFPTYADEIEKWLSYGQFPPPIPEFFIREWYQELLREHSEARWPEYGSKRLHSWMTSQKNPVISINPDAEYRYSVAWLPVFAAAVASGNTSFEAVFDRKPGAVFFLRQVRDFDSRWFKAIFQCSLLRYFAQK

SEQ ID NO: 26455 - protein, 2108 aa, Klebsiella pneumoniae MGH 74
MNVQQLHYAPLLNQLHQRAVRSVVSQLALRSKSLSQYLESQYFQPPGLGGSLLADPVFESTFGWMPADETMEDLRDKLISSPLVDALSNAPVPFRHQLTAWRTILEDKQSLLVSSGTGSGKTECFMVPVLEDLIRQQNLTRQSLTGTQAIFLYPLNALINSQQERLREWTRGFKGKIRFALYNGETRHTKYEVQEDQLKVPEQALSREAIYEAPPSIMVTNTTMLEYMLIRRKDAPVIEKSQGMLKYIVLDEAHSYIGSQAAELALLLRRVMQAFNVGPGTDKPVQIIATSATIGEDSPEGNKELAKFVADLAGVTERDVKVVRGYRQIPPISESLIRHEYPTSLASLNSLSSQELYQQLCHYRVAQQLRQALTRPGRLAVRLSELLNVARRTWPDINHRELLQLLDLMAKSREGESKFSLAFTPLRMHGFIRTLAGLWACSNKQCAHKASELGESDWPFGQVWFEQRQYCDCGAPVFEILRCSGCGSAYLSAKEEVRGDGTSWLVAQPAAAEEDEFALDLDVYSEDEDNNELENNSQFDRLIASDGEKYIISLEEATAGKIDREAQKHYEINLLRPESRGEGRNNSFACVCCGDTQRKNNPLFRPLRLGAPFFLNEIIPTLLEFSPLPQTREEQLGPFNGRRLLTFTDSRQGTARISARLQQDADKATLRTLCYQELANINEPSVKLSPAHCALLESFITQFSIPPLKNSIDALRKAMVSNEKLSPADVQALRIIEPMVSSLSQEHAEAMQILLVNSGNQQKKTMSWHTLSEQLVGSVDLADRMRGSFKDLSGLELTKQQFADFCLYSEFGRRPKNAWTLESLGLVAIHYPFIDKVTTCPQDWKTLLPDPDKQLPEWRNLLKITLDFFIRENSAVFYENEEYPRWMGARFPVKMLQGPDKKYKGQKRDQLWPQIRDRHYNRVIKLLIAVFPAIQPEQAHWKALVNYLMNEVWEAIRPCLRQFESGYQLDIKQQAEFYSPKQVWRCPYTRRALDVTLLGYSPYLPGSKEIAPEKAVLIEMPELPARHWRLSGGGEMAREERLHWLECNERIQHAREEGVWSNRSDRLALKDSWYRLEEHSAQRTPEKNQFNEKQFKAGKVNVLNCSTTMEMGVDIGGMSLVAMNNVPPAPANYLQRAGRAGRRGESASAAITLCKNTAHGMEVFKDPLWAFNTVASAPRVRFGSSSIVQRHVNALVLGAFLRAEVPDATKLSCKWFFEGDESQCLRFLHWLNHQADQLADKLKRLTQGTVLMSLTPPQLLTRTQTMMQLVDTRWRSQLAILLENIEALKADNSAWEETPAGKAITYQLRDYRGAYLFSKLISEAFLPGHGFPVGVVNFNYLTADELERRRAIKATQADPNEGGENFSRRIEKLPSRDLPTALREYAPGADVVLGGKVYRSSGIMLGKVLASGQELSGDHHIPWFWHCRKCGAGATSATRPVECCHCKADIQQLDVKRYLQPVGFATDIRYQAHNDVSMPAQLPWKDPRVLVPSSVWVSLPDAGLGRYRFSHSGELFHFSEGEFGHGYAICLSCGRAESQTQPQRTPENLKNPEKENTHYLLRGGSNDRQGNNKLCHGHVHKDLWLGYSSRTDMVELQLSDDSGLLIRDDVAARSLAVALREGLAHKLGIENTELGVTTQQARDIDGFTGYSIFIYDNNAGGAGYAVQLIDNWSDVFNYARKLLDCSCDKFCHHCLLSYDSQHYVGKLDRHQALTLLTNLRLQRLNLAPEYQYFGESSRVETNPLSLRIAQCLNSEVYDSCSLVLAGSQEQWSFAQWPLFKELLQFASSGGNVELLIATQLENLADSTRHQLSALAAIPGECLQVKSIDTAQLVQGNGHLLAQVTREGQTQQWAAADSATVSPGELWGQSSASPVVTIKGASRKTFSGQTLSAEDLLPALPAGAVRINLSQQLDGQVEGFGSRFWALIAQQHADWKKVFTNGREITHVHYSDRYLNSPFTVRLLGEILTELVEQGLAERAELTVSVKKLEYSSRQHDSLYNAWLDEQDRQQVMTTLLEEGYLGPAWSGKISWLAGDNQNTDHGRELTVTFSDGSEHYVLLDMGLSYWRCTGDTFFDFSGRIPNQVERLATCRALVIAPDNGLKSYIIAG

SEQ ID NO: 26456 - protein, 1117 aa, Klebsiella pneumoniae MGH 74
MKTPVNPLLRWLNAFFSSRSLPGADGRALYAYRCHDAEYESLAALLRAHVPRNYPKTIFISYSDVLFSIYAAEFIRRNHTAGHPRWDVILESIGWKVPYAHRQKLVNDGIRYWKRKVRSLGQASGYLHTLACEGGLPIRMIENESGYLITYFKRVYQALRGQSSRRPAEIIAQELGDTIPATMQNELVYEIAGEFCETLHTLLNEHPTHGQDPVSSLRKQYPDWHLQLPLVLPEENASEIVRRLLSQSSEPRISSNVLVERIWVDVDDSWYCDARFRFPATMRTEQLISLFESNIQPEQTRLIISAKWRNGGARLAMLSRYEQQDWRVELLPFAMQKLSGADAMTEISLSLHEGPILLGHVIPKGGYELTEDLPWVFEAMNESESQLKLVGMGSVSSRQNSLFISLPTNSHLDISGEGEFDIPRLLKNSERSLTKISGVFSVVLHDGAVCTIRTQQLYDSAIEYYIKPTEIDLVKSDYPVHRAWPKIGWKKDMQHGIVPENELFWRSIRSGNNSWFSVASVMPKGQIEVRRIVNGEVLFSGKVVILPADFDIQIIPETAQQGVIVLSGITDARVDKYSNNEKVTLKSDYLQNECVIDCNSSQMLESTINLRVSWKDGSNLKLLLPKPVSGGRFVSNDGSVHFDGVASIAHLHGVDAELLTISCAGKGYLNIELLDENPMSEKFHYLHADIPLLSGRNEKLQQISLYENYNLLNAMLVCAWKNDSTLRVDFYSDRFGKDKTTLNIKRYDGRFIEGDERLLVDIKDSIVFPYHKIDDMVVEAISLNTPDLCTVLLKKDESGYDFSTLNNQGGPWLIVGKIDGAIRIAPVIKWMLPTLQTDDLFLNAICNASPEQRKEYCNALFLEMKNNPLQNSCYLLVEYIKKYKLNNSLPLLELDLFREISSNYCVVVQLLISSCLSGDSDAIYDIQEELPFSWGWIPVSIWKDVFEQCWCSLEKQINDKAFALNILQPFIAFINHQAHIDRRLVPIANMLLTHSEILPAGCTVLPSVSREQFNDAKQMLLRNPDSFGRVSIFSKELWDSAITPDLKSVFNKFWIENTYHTRFEKRFNLMLVAALLSQRNNKLMHQLTALFEFHYQQAPQQLGVIYQYYFEQAGVCH

SEQ ID NO: 26457 - protein, 2106 aa, Klebsiella pneumoniae subsp. pneumoniae; identical to SEQ ID NO: 26391

SEQ ID NO: 26458 - protein, 1095 aa, Klebsiella pneumoniae subsp. pneumoniae; identical to SEQ ID NO: 26392

SEQ ID NO: 26459 - protein, 2082 aa, Klebsiella pneumoniae subsp. pneumoniae PittNDM01; identical to SEQ ID NO: 26433

SEQ ID NO: 26460 - protein, 983 aa, Klebsiella pneumoniae subsp. pneumoniae PittNDM01; identical to SEQ ID NO: 26434

SEQ ID NO: 26461 - protein, 2106 aa, Klebsiella pneumoniae subsp. pneumoniae WGLW2; identical to SEQ ID NO: 26385

SEQ ID NO: 26462 - protein, 1095 aa, Klebsiella pneumoniae subsp. pneumoniae WGLW2; identical to SEQ ID NO: 26386

SEQ ID NO: 26463 - protein, 2106 aa, Klebsiella pneumoniae UCICRE 4; identical to SEQ ID NO: 26385

SEQ ID NO: 26464 - protein, 1095 aa, Klebsiella pneumoniae UCICRE 4; identical to SEQ ID NO: 26386

SEQ ID NO: 26465 - protein, 2106 aa, Klebsiella pneumoniae UHKPC179; identical to SEQ ID NO: 26385

SEQ ID NO: 26466 - protein, 1095 aa, Klebsiella pneumoniae UHKPC179; identical to SEQ ID NO: 26386

SEQ ID NO: 26467 - protein, 2106 aa, Klebsiella pneumoniae UHKPC57; identical to SEQ ID NO: 26385

SEQ ID NO: 26468 - protein, 1095 aa, Klebsiella pneumoniae UHKPC57; identical to SEQ ID NO: 26386

SEQ ID NO: 26469 - protein, 2103 aa, Kosakonia radicincitans DSM 16656
MTTRYFSTLIEQSLSRSTEATLSILSITNPQLREHLAQQMAAECGAEGSFLASPVFEQTFGWEESAFTMRQLATEKTLLSKEVVASLDSEENGRYRFGASWKPFTHQLASWKALLEQKHSIVVTSGTGSGKTECFMVPVLEDLYRELRGNGNKPLVGVRALFLYPLNALINSQRERLDAWTRSFGTGIRYCLYNGNTKEKHAAVKSEQEKKPNEVLSREKMREEPAPILVTNGTMLEYMMVRQVDAPIIQQSKAQKSLRWIVLDEAHTYVGSQAAELALQLRRVMNAFGVTPRDVRFVATSATIAGSDAEKQLKKFLSELSGVPLEQIDVLGGKRIVPELEASLNRAVSLDVLEAIPDAGEKEVSPERYSALTHSPEARHLREMLVSQRAMKLDALTARLNELTKQRYSQQDTLRWIDLCSGTRPNEQDPAFLKVRAHIFQRNTQGLWACADKHCAAKHGTALEKNWPFGYVYVNQRQNCACGSPVFELAFCNECNEPHLLAREKRGRLVQWENKGGDEFSLQDDIPEEIEPVAEKVEKEIVIKTPHIIAAEHNEAAGYTLQRLDRQTHSIGVVHDNSISLAINDIDQVCSAQGCGYRGVKGISPFRRAILGSPFYVTHIVPTVLEYCPDFAGKNEKGDGQQTLPGRGRRLITFTDSRQGTARMAVRMQQEAERNRLRGSVVEILSWYQKQQSTGDVVAADIDPQKFRELADKARKEAKEYRDMGMPGEAAEAEEKALRFEQRLKQALGEKVSAPLVSLSWREMVGELQKTFDIKGPILRYNKYHKPEIFREHDGPVKLSEMLLFREFMRRPKRSNSLETQGLVKIGYQGLDKAQIVPDHWQEKGLSLQDWQDFLKISLDFYVREGSYIQLEDDWRQWIGSRFAPRSLRSPESDEHDEYQIKRWPQIRHGNVSQRLIKLLLLGAGLNVKRTADIDLVNAWLKAAWKALSGNLAVLRSDGNRFYLPREHMTFSLVTKAYICPVTNKLLDTAFKGLTPYLPTHIDFDNLSDTQRLSYHAEPVMLPEVWHFDRSQDDYDNGISKIRQQSAADDLVQKLRSQNLWTNINDRAIEGGFYYRTAEHSAQQSAERLEEYETMFKEGGINVLNCSTTMEMGVDIGGISAVVMNNVPPHPANYLQRAGRAGRSKESRAISYTLCKGNPHDQQVFANTLWPFETTIPAPMVAMNSERLVQRHVNSLLLSEFLCHVIGETEKERTNLNSQWFFGEEHEQSICNRFKVWLERTTLPVDGALEQLVKGTALHGVSPDNLRRNTLGSISSLQKRWLDIFQDLSRQERESQPDTPYRKRLEMEKKRHCGEYLLRDLAARTFLPGYGFPTDVVTFDNFNMEDYIREKTFRSRDKSDREDNVSRYKGLPSRNLGVAIREYAPGAEIILDGRVFRSAGVSLHWHNLNADTNEPQRLDVAWRCHKCGTLGYGEGISGQGELFCTNAACGERIISANKRQVLQPAGFVTDAYYPVTNNIETMKFIPVVPAWVFVQAERVPLPNPLTGFMASGPDGRVFQQSMGEGGHGYALCMICGRAESMINETDAPKSMEAHYPPRPGKGDRDSQNHRLICPGSTALRTKVTLGAVAQTDVFELILRRPQSGEYIQDGSDEGRSVAMTLAVALRRALAGVLGVSAAELGYSIRPVKLDNEQSVLAIQLYDVISGGAGFASSAPLHIDALLRGMVKQLGCSHCDTACSECLLDSQTRHDHDALDRKAALAWLGEDFTHYIGLPEEEKLSLVDAQYCPGSIEDAIRRVINEGATSLTVWLNEPLSEWDLYASEFRRAILRYRLTDNLGVTLVIPAGITDADVLGELAQFAATGIRICCNKVALTVPVIAQLLRGESVITLATRDMQSAIPGSDWHQTQALVVRSQTFAPVELDAVDLARWSEPAGERVKDLSLSTELNGPIAQFGRRFWAELEKANEETAALLKNNQITRVYYTDRYIQNPAALVLLGSIMNQLKPRLSGHAQVAINTLFKAKEKPGFKAAHDWANEDDFQGFAEQWFTTLMGKPVDVTLNYSNRDIPHHRKLLVEFDNGKALKIRFDQGMGYWFIQFRPDSYNFMAEVEDQIFNMARSLEQARVSNKEERWPTDVLVEIQQQ

SEQ ID NO: 26470 - protein, 997 aa, Kosakonia radicincitans DSM 16656
MDGFWERPIRFYESERRNFLGSLFSEGGLPFKLLKETDSRFQSVFSRILNQYEQASSLGYSTSMLVQMMVEKSSLPQGFREDTSIEFIARMAEQLISLVQLYELSTHAEPVKELERVHPKWRDSFPIPLDDDTGTSFLNGLLRTASVENKPRQRKSKIIECFFSWSEQKPDALHTYISLPEEMVFPLLSEPSTTRFELAVCEDGEDMVSLGSAYATLEHMQARLRLRKSDVRFHRRRPATTLSLVARAGGVIIGIVNIAESEIPVGDVPLVFVRQGDDWSLQGIASCSVRSSDMLIILPEGGTLSAENTPSDFTCRAFGYPALVVQGGQDILIEGEETYRIRAGLEQVRLPGLELQGKRLNWTTFPEEVFLGTPRVMRKMGVPEVRYRRFLSGKDIDVCELHDTMGTHFLSIRNENNETLLRRKIGILPADFQVEIKSGERANEGIIAISTQHKCWYALKDKTLEIGRKRSGNRTEILIKAEGVPPSSVQLQVTPSLMEAPVGIVMPFPSSGCLAFDAEGRPLAKNITITDLLGSRVFLFGKNGEPTRFTLELRLRSNSGQQAWHEWRYNAGERPLEINLYSLKEHIENLLSLGSGIDQIVDMRISGVGGTGNWQIRRYKYSLEYDPASQILRSNSIHNASGKVPSPVIMLLSEPERKSIPLTSRMSEGVPVGEFELGSIVSKNGPWLVLPKPGEETAFRPCFIRGEQLPEAEAGTIHSLQKATQLFKPGAEVNTISLVLDQMANDPAHSGWQFLQNLYSQFSYLPLATFEVWRALFQHPQALTLSLFKFEMSAEYLGRIESEFPVFWEFLPIQQIKNAAAKMQAFMVSKGASIEMQSNFLNKMYQRLGMLFPTYASDVHSWLSEGKAPRLFPQPVMKEIIQGWYQELLREHGESRWPEYGGPRLSRWIQSQADPIIEISSDTHFRYAVAWLPVFAAAVASGKTTFTSVFGNEPGAVFFLRQVRDFDSRWFNALFQYCLLRNVTENKNDYTLFFDTH

SEQ ID NO: 26471 - protein, 2103 aa, Kosakonia radicincitans UMEnt01/12
MTTRYFSTLIEQSLSRSTEATLSILSITNPQLREHLAQQMAAECGAEGSFLASPVFEQTFGWEESAFTMRQLATEKTLLSKEVVASLDSEENGRYRFGASWKPFTHQLASWKALLEQKHSIVVTSGTGSGKTECFMVPVLEDLYRELRGNGNKPLVGVRALFLYPLNALINSQRERLDAWTRSFGTGIRYCLYNGNTKEKHAAVKSEQEKKPNEVLSREKMREEPAPILVTNGTMLEYMMVRQVDAPIIQQSKAQKSLRWIVLDEAHTYVGSQAAELALQLRRVMNAFGVTPRDVRFVATSATIAGSDAEKQLKKFLSELSGVPLEQIDVLGGKRIVPELEASLNRAVSLDVLEAIPDAGEKEVSSERYSALTHSPEARHLREMLVSQRAMKLDALTARLNELTKQRYSQQDTLRWIDLCSGTRPNEQDPAFLKVRAHIFQRNTQGLWACADKHCAAKHGTALEKNWPFGYVYVNQRQNCACGSPVFELAFCNECNEPHLLAREKRGRLVQWENKGGDEFSLQDDMPEEIEPVAEKVEKEIVIKTPHIIAAEHNEAAGYTLQRLDRQTHSIGVVHDNSISLAINDIDQVCSAQGCGYRGVKGISPFRRAILGSPFYVTHIVPTVLEYCPDFAGKNEKGDGQQTLPGRGRRLITFTDSRQGTARMAVRMQQEAERNRLRGSVVEILSWYQKQQSTGDVVAADIDPQKFRELADKARKEAKEYRDMGMPGEAAEAEEKALRFEQRLKQALGEKVSAPLVSLSWREMVGELQKTFDIKGPILRYNKYHKPEIFREHDGPVKLSEMLLFREFMRRPKRSNSLETQGLVKIGYQGLDKAQIVPDHWQEKGLSLQDWQDFLKISLDFYVREGSYIQLEDDWRQWIGSRFAPRSLRSPESDEHDEYQIKRWPQIRHGNVSQRLIKLLLLGAGLNVKRTADIDLVNAWLKAAWKALSGNLAVLRSDGNRFYLPREHMTFSLVTKAYICPVTNKLLDTAFKGLTPYLPTHIDFDNLSDTQRLSYHAEPVMLPEVWHFDRSQDDYDNGISKIRQQSAADDLVQKLRSQNLWTNINDRAIEGGFYYRTAEHSAQQSAERLEEYETMFKEGGINVLNCSTTMEMGVDIGGISAVVMNNVPPHPANYLQRAGRAGRSKESRAISYTLCKGNPHDQQVFANTLWPFETTIPAPMVAMNSERLVQRHVNSLLLSEFLCHVIGETEKERTNLNSQWFFGEEHEQSICNRFKVWLERTTLPVDGALEQLVKGTALHGVSPDNLRRNTLGSISSLQKRWLDIFQDLSRQERESQPDTPYRKRLEMEKKRHCGEYLLRDLAARTFLPGYGFPTDVVTFDNFNMEDYIREKTFRSRDKSDREDNVSRYKGLPSRNLGVAIREYAPGAEIILDGRVFRSAGVSLHWHNLNADTNEPQRLDVAWRCHKCGTLGYGEGISGQGELFCTNAACGERIISANKRQVLQPAGFVTDAYYPVTNNIETMKFIPVVPAWVFVQAERVPLPNPLTGFMASGPDGRVFQQSMGEGGHGYALCMICGRAESMINETDAPKSMEAHYPPRPGKGDRDSQNHRLICPGSTALRTKVTLGAVAQTDVFELILRRPQSGEYIPDGSDEGRSVAMTLAVALRRALAGVLGVSAAELGYSIRPVKLDNEQSVLAIQLYDVISGGAGFASSAPLHIDALLRGMVKQLGCSHCDTACSECLLDSQTRHDHDALDRKAALAWLGEDFTHYIGLPEEEKLSLVDAQYCPGSIEDAIRRVINEGATSLTVWLNEPLSEWDLYASEFRRAILRYRLTDNLDVTLVIPAGITDADVLGELAQFAATGIRICCNKVALTVPVIAQLLRGESVITLATRDMQAAIPGSDWHLTQALVVRSQTFAPVELEAVDLARWSEPAGERVKDLSLSTELNGPIAQFGRRFWAELEKANEETAALLKNNQITRVYYTDRYIQNPAALVLLGSIMNQLKPRLSGHAQVAINTLFKAKEKLGFKAAHDWANEDDFQGFAEQWFTTLMGKPVDVTLNYSNRDIPHHRKLLVEFDNGKALKIRFDQGMGYWFIQFRPDSYNFMAEVEDQIFNMARSLEQARVSNKEERWPTDVLVEIQQQ

SEQ ID NO: 26472 - protein, 1095 aa, Kosakonia radicincitans UMEnt01/12
MSQSELVSVFKCTPWLTKFLTRRGLKKADSRPLYEYHATSDEYADLKRLLREIGQPEKLKNDKGYAACFTLFCSEWYRRDYGRDCKWSWDPIHAALNISLSHSELGLVVPKGLEGFWERPIRFYESERRNFLGSLFSEGGLPFKLLKETDSRFQSVFSRILNQYEQASSLGYSTSMLVQMMVEKSSLPQGFREDTSIEFIARMAEQLISLVQLYELSTHAEPVKELERVHPKWRDSFPIPLDDDTGTSFLNGLLRTASVENKPRQRKSKIIECFFSWSEQKPDALHTYISLPEEMVFPLLSEPSTTRFELAVCEDGEDMVSLGSAYATLEHMQARLRLRKSDVRFHRRRPATTLSLVARAGGVIIGIVNIAESEIPVGDVPLVFVRQGDDWSLQGIASCSVRSSDMLIILPEGGTMNTPSDFTCRAFGYPALVVQGGQDILIEGEETYRIRAGLEQVRLPGLELQGKRLNWTTFPEEVFLGTPRVMRKMGVPEVRYRRFLSGKDIDVCELHDTMGTHFLSIRNENNETLLRRKIGILPADFQVEIKSGERANEGIIAISTQHKCWYALKDKTLEIGRKRSGNRTEILIKAEGVPPSSVQLQVTPSLMEAPVGIVMPFPSSGCLAFDAEGRPLAKNITITDLLGSRVFLFGKNGEPTRFTLELRLRSNSGQQAWHEWRYNAGERPLEINLYSLKEHIENLLSLGSGIDQIVDMRISGVGGTGNWQIRRYKYSLEYDPASQILRSNSIHNASGKVPSPVIMLLSEPERKSIPLTSRMSEGVPVGEFELGSIVSKNGPWLVLPKPGEETAFRPCFIRGEQLPEAEAGTIHSLQKATQLFKPGAEVNTISLVLDQMANDPAHSGWQFLQNLYSQFSYLPLATFEVWRALFQHPQALTLSLFKFEMSAEYLGRIESEFPVFWEFLPIQQIKNAAAKMQAFMVSKGASIEMQSNFLNKMYQRLGMIFPTYASDVHSWLSEGKAPRLFPQPVMKEIIQGWYQELLREHGESRWPEYGGPRLSRWIQSQADPIIEISSDTHFRYAVAWLPVFAAAVASGKTTFTSVFGNEPGAVFFLRQVRDFDSRWFNALFQYCLLRNVTEK

SEQ ID NO: 26473 - protein, 2106 aa, Legionella pneumophila str. Lens
MNKEYFSKLLPQIAERSGSAALSRLGFSHVPLYRHLKQQFSRPFGEVGSFLADPSFEATFGWEIAKLKMCDLANTLLTTDLVRAMDQPPKELAKDYRFASNLYPYMHQLESWQILANEIPQSLVVASGTGSGKTECFMVPILDRLTRLHQEQKSRLIGVRALFLYPLNALINSQRERLRAWTYVYGENLRFCLFNGNTPNKIPAHLKQEYPSEVMDRDSLRASPPPILVTNATMLEYMLVRTDDAPILEKSQGKLEWVVLDEAHTYIGSQAAELSLLIRRVLHAFGVSPDTVRFVATSATIGDPNGEAGEKLKCFLADVAGVSLDRVHLVSGKRHIPLLPPEEIYTNSLEELSVLSDSDTSKDLYNILARHKTARDIRSSFIESEKKNKEKGGSGMVARLSDVCRNIFGNSDWFTLEQQINALRWLDLLSGTCDKNHSAFLPLRAHLFHQTISGIWACADPNCNEKCGSKLEDKEWPFGQIYFEMRKHCRCGSPIYELVACDDCGTPHLIAAQRGDQLVPPINIKVIDEFELDIDANEEELNQDDTNVVNDRYNDAESSVLIVNRNINGVIEEVIDKQTRQLIEPTSGNEHLRLRVLGDSGSGLICPCCQGGSHGNRHRKLFQEARIGAPFSLGIILPSLLEFAPDGDDPAEHPYRGRRLLTFNDSRQGTARIAAKLQQESERDRIRGLVYHLALRDGLMQSDFEAKQLKDEIQELENIREHVKEEGKTHIENLLVNRKKQLASLSKPKPISFEEMSQKLTNQSSDFERMLSHYRNDISYENFKGPEGSLSLARMFLIREFGRRPKRLNNLESMGLVSVQYPALNNITRAHEGFNLIDWISFLKIALDFFVRAGGSLEIPEKIKSWLGMPFPQTRLVDQDRVDKEKTDRRWPRAYYTLPNGNKRLNYQSTLVRILACALKVDIETSLGADKVDAALTSAWRALTEGSGILYSNSGGRRVLPLSQIAFTPITNAWICPLTRRFLDTTIQDITPYLPLHYTNETVKCQKIEIPLYDQPFGGDASDLAQVIRARDWLSKQESIIQFKEEGLWPVLNDRAIELSPYFVTAEHSAQQPAYRLDRYEKAFKSGDLNLLSCSTTMEMGIDIGGIATVAMNNVPPHPANYLQRAGRAGRRQEARSISLTLCKSNPHDQLVFSKTDWPFVTALPAPAVSLNSELIIQRHVNSLILKHFFSTQITGSEQDVLKLTCGWFFISEDNNSFAERFIAWCIAFNDANSRLLDGIRQLVRRSRYEGVDAKILIRESGKMMHNLYTSWFKEWDALERQKINMKCLGVNSPAYKAVQNQLDRTTGEYLLKELATGGFLPAYGFPTHITVFDNLTISQIKRNKLEKEKIKDREDNNYRHRELASRDRITALREYAPGAEVVMDGLVYRSAGITLNWKIPATEKEAQEIQAIRYAWHCDKCNHSGSSLLLDETRFCLECGTKIKLDDPKYHKTFIEPAGFAVDFLMDPDNDVSTQDFIPVELPWVSANGEWISLPNPALGRYRVTTRGHMFYQSSGLHGKGYAICLACGRAEPMVDENIPNKLQSHYKLRGGNDQNEKSKICIGSHENWAIKPGITLGHQCYTDVLEIQLKSELGIWIKDKEITMTLAVALRSALADLIGIQTTELGCDVKSARTEDNSICRSILIFDRYAAGYSSSASQYIENLFRKARNNLNCPVDCDSACPSCILDFDQRFVSESLNRLTALEVITENWLSTLRLPERYQFFGVNSRVECSNVVEAVLRTSRKFPESNITLFAGGAGDELDFGASNLRNLIYQIAASNRSVSLVIEKDSLSSMDMVERHLLAGLIEYPGRKISLHTVTELPKTKDAIILAEICIKGQTYRWGVNERSAINMGLLWGNTDGPLIVGNKLEPLNLKLESLLVEQLRLSDSTLGDIEIEILKDLDGSLQGFGQRFWKLVSSSSPNVASLFSNTSLDIEAISYHDRYLFSPLPVALLLELITGIRTLVGTSRWNNPFIEITTNNESANLNKRSCFIWDNWLDLEARNGAIINSLDYLGIEGKIKLLDKNKSLHGRMLEVKFSSNYVLTVRLDQGVSYWKANNYSKQKIFNFGDPDLSNQGIQLAELNVDIESNYFPTHVFIKVRQQ

SEQ ID NO: 26474 - protein, 1130 aa, Legionella pneumophila str. Lens
MDHSHSEFWEWKKGLFAQLNIPNADGRPLYAYRLTEHQFNELEKLLRKNLTKNTKYGILGMLVDSSAQFCSLFVLYAAEWWRRRFDGSRWSWEPILLDLGVDKDSWSASQRENCIIEGLKRWRLRLSNTDGLRYLGTIAVQGGLPMQLLADAKGSIGRILRNVLKLATHGTELNIILNWVESLHEELPKSYQKKDVYLLLAEVIAILLALKKEAQLTNSLEAVDKLNKIIPNWRERFPLPIDDNEIKGLLEQLIRDVASERNDRCQPLFSVERYLDCQNEEIWQLRSTVFLPDKISTNDIYKQFDINEEIILPRILEIVIEVSNWHRSVTARRIAGQNLYFLNQSPFELKGDFAADEHMMSLRTMDGARWIIALRNGSELNSGLPWVFEKMKETFPRLIRQGGGGVKSVEAFIAVPCGWILNALSGSRCIQISYIEEPEREVYLVNGEVRVLDGLGRFWTIKTGRADSNDESFYWSGDRMWGEFIRPPLAFLGKPKLYKFSGETSYPIQDTSVTWTQGRILGFIEAYYAEHHEEKVRSKMVILPSEAKIDIKPESLDHGVIYLRHWRVANANLSKDSKIELCVKNEGDSLVLSCNSITNRPPEWFEVNLSWESNTATAKVRLPFPAKGARCFDPSGAVLPSESWVSIKHLAGYRIIIISPPHAFVELCLRLRHTSDPHKDHEFRRPLRSFGSNSVQKEIRLQDYSEDIENLLAADELLDAWVEASILIERQTSLVLKISRYDCPLERDDSLIKLGITSAKKFNINDIASLPLLALKLEQPADEAIILPQRYSEGVPVGSWEFSPSEKEPGSWLIFPMEGSAILFRPTLWVVAGETHTSRSLAKALSVENRLDRAKVLDQVIMEMSFNYLDPNWSYFEHLAEHLGHLPLASLDLWKRFIRSPQAMAALALRMNKLPDHFLHRFSLELPFIWEIITFECWKNATEYLKMQCIEWFGEIFAPKQLYNHITERVAEFTMVNEQPELRNLLGVVKSTALGEQCSEILMMKRTGSDSFFEHQLFIGEDCALQKLLREHSGTQWPNDSELFYLVKNYRKHHDFHQLFPTPLDDHKDGVIGLPILLAAQVATSSIHEWFRQSENIHKLRTYKRFDPEWFELAFDLTIARTVSCGLMKI

SEQ ID NO: 26475 - protein, 2108 aa, Legionella shakespearei DSM 23087
MNKEYFSKLLPQIAERSGSAALSRLGFSHVPLYRHLKQQFSRPFGEVGSFLADPSFEATFGWENAELQMCDLANTLLTTDLVRAMDQPPKELAKDYRFASDLYPYMHQLKSWQILANEIPQSLVVASGTGSGKTECFMVPILDRLTRLHQEQKSRLVGVRALFLYPLNALINSQRERLRAWTYAYGENLRFCLFNGNTPNKIPAHLKQEYPSEVMDRDSLRASPSPILVTNATMLEYMLVRTDDAPILEKSQGKLEWVVLDEAHTYIGSQAAELSLLIRRVLHAFGVSSDSVRFVATSATIGDPNGEAGEKLKCFLADVAGVSLERVHLVSGNRHIPLLPPEEIYTNSLEELSELGDSDTSKDLYNILARHKTARDIRSSFIENEKKNKEKGGSGMVARLSDVCRNIFGNSDSFTLEQQINALRWLDLLSGTCDKNQSSFLPLRAHLFHQTISGIWACADPNCNEKCGSKLEDKEWPFGQIYFEMRKHCRCGSPIYELVACDDCGAPHLIAAQRGEQLVPPININIIDEFELDIDANEEELNQDDTNVVNDRYNEAESSVLIVNRNLNGVIEEVIDKQTRQFIEPTSENEHLRLRVLGDSGSGLICPCCQGGSHGNRHRKLFQEARIGAPFSLGIILPSLLEFAPDGDDPAEHPYRGRRLLTFNDSRQGTARIAAKLQQESERDRVRGLVYHLALRDGLMQSDLEAKQVRDEIQELENIREHFKDKAEGKTYVENRLVNLKKQLVSLSKPKPISFEEMSQKLTNQGSDFERMLSHYRNDISYENFKGPEGSLSLARMFLIREFGRRPKRLNNLESMGLVSVQYPALNNITLAHEGFSLIEWISFLKIALDFFVRAGGSLEIHQNIRFWLGMPFPQTGLVDQDRVDKEKTDRRWPRAYYTLSNGNKRLNYQSTLVRILACVLKVDIESSSGADKVDAALTSAWRALTEGSRILHSNSGGRRVLPLSQIAFTPITSAWICPFTRRFLDTTIQDITPYLPLHYTNETVKCQKIEIPLYDHPFGGDAGDLAQVMRARNWLSKQESIIQFKEEGLWPVLNDRAIELSPYFVAAEHSAQQPAVRLDRYEKAFKSGDLNLLSCSTTMEMGIDIGGIATVAMNNVPPHPANYLQRAGRAGRRKEARSVSLTLCKSNPHDQLVFSKTDWPFVTALPAPAVSLNSEIIIQRHVNSLVLTHFFATQIISGEQDVLKLTCGWFFISEDNNSFAERFIAWCIAFNDANSRLLDGIRQLVRRSRYEDVDAKILIKESGKVMDNLYTSWFNEWDALERQKISMKCLGVNSPAYKAVQNQLDRTTGEYLLKELATEGFLPAYGFPTHITVFDNLTISQIKRTKLEKEKIKDREDNNYRHRELASRDRITALREYAPGAEVVMDGLVYRSAGITLNWKIPATEKEVQEIQAIRYAWHCDKCNHSGSSLLLDETRFCLECGTKIKLDDPKYHKTFIEPAGFAVDFLMDPDNDVSTQDFIPVELPWVSANGEWVSLPNPALGRYRVTTRGHMFYQSNGLHGKGYAICLACGRAEPMVDENIPNKLQSHYKLRGGNDQNEKSKFCIGSHESWAIKPCITLGHQCYTDVLEIQLKTESGTWINDKEITMTLAVALRSALADLIGVQTTELGCDVKSARTDDNSICRSILIFDRYSAGYSSSASQYIENLFRKARYNLNCSADCDSACPSCILDFDQRFVSESLNRLSTIEVITESWLSSLKLPERYQYFGEKSQVEFSNVVEAVLRTSRKSPESKITLFAGGTGDELDFAASNLRNLIYQLAASNRSVSLVIEEESLSSMDMVERYLLAGLLEYPGGQVSLYTITELPKIKNAIVLAEVCIADQTYRWGVNDSSAIAMDILWGNTEEPLIVGNQLEPLNLKLKSLVVEQLRTSDTYLGDMEIEILQDLDGSLQGFGQRFWKLASMSSPTVASLISNTSLDIEAISYHDRYLFSPLPVALLLELLTGLRTLVGTSRWNNPCIEITTNNESTNLNKRNCFIWDNWLDLEARNGAIINSLDYLGMEGKIKLLDKNKSQHGRIFEVRFSSKYVLTVRLDQGVSYWKASNHSNQKIFNFSDPDLSNQGIQLAELNVDIESNSFPTYVFIKVRQE

SEQ ID NO: 26476 - protein, 1129 aa, Legionella shakespearei DSM 23087
MDHSHSEFLEWKKGLFAQLDIPNADGRQLYAYRLTEHQFNELEKLLRKNLTRNTRYGILGMLVDSSPQFCSLFVLYAAEWWRRRFNGSRWSWEPILMDLGVDKNSWSASQRETCIIEGLKRWRLRLSNTDGLRYLGTIAVQGGLPMQLLADAKGSIGRILRNVLKLATHSTELSIIFNWVESLHEELPKSYQKKDVYLLLAEVIAILLALKKETQLTNSLEAVDKLNKLIPNWRERFPLPVDDNEIKGLLEQLIRDVASERDDRSQPLFSVERYLDCQNEEIWQLRSTAFLPDKISTNDIYKQFGINEEIILPRILEIVIEVSDWHRSITARRIAGQNLYLLNQSPLELKGDFAADEHTMSLRTMDGGHWIIALRNGSELNSSLPWVFEKMKETFPRLIRQGGGGVKSVEAFIAVPCGWILNALSGSRCIQISYIEEPEREVYLVNGEVKVLDGLGRFWTIKTGRADSNDESFYWSGDRMWGEFIRPPLAFLGKPKLYKFSGETSYPIQDTSVVWTQGRILGFIEAYYAEHHEEKVRSKMVILPSEAKIDIKPESLDHGVIYLRHWRVAHANLSKDSKIELCVKNEGDSLVLICNSIANRPPEWFEVNLSWESNTATAKVRLPFPAKGARCFDPSGAVLPSESWVSIKHLVGYRIIIISPPHVFVELCLRLRHTADPHKDHEFRRPLRSFGNSIQKEIRLQDYSEDIESLLAADELLDAWVEATILIERQTSLVLKISRYDCPLERDDSLIKLGITTAKKFNINDIASLSVSALKLEQPADEAIILPQRYSEGVPVGAWEFSPSEKEPGSWLIFPMEGASILFRPTLWVIAGETHKSRSLSEALSVENRHDRAMVLDQVIMEMSFNYLDPNWSYLENLAGHLGHLPLASLDLWKRFIRFPQAMAALALRMNKLPDNFLHRFPLELPFTWELITFECWKNATEYLRKQCIEWFGEVFAPKQLYNHITERVTAFTMLNEQPALRSLLSLVRSTVLGEQCRDILMLKHSGSDSIFEHQLFIGEDCLLQKLLRVHSGAQWPNDSELFYLVKNFRKDHNFHQLFPTQLDDHKDGVIGLPILLAAQVATNSIDKCFSHSENIHKLRTYKRFDPEWFELAFDLTIARTVSSGLMKI

SEQ ID NO: 26477 - protein, 2097 aa, Marinomonas ushuaiensis DSM 15871
MRPYFSSLVTQAISRAKESSLSILSITNPSLRNHLSEQMSVTAGQGDAFLADPVFEHMFGWEKAEPLMSDLEGSLLSHELVNSLDQKQIMNRNDSDKQQFKKNKYRFGKEFQPYAHQLKAWQYLIEEEKKSVIVTSGTGSGKTECFMVPVLNDLCREQKETKAPLVGVRALFLYPLNALINSQEERLDAWTQAFGDKIRYCLYNGNTPNDEAKVYQAQKKCKNQILSRELMRKEPAPLLVTNGTMLEYMLIRQIDSPIIEASRQAQSLRWIILDEAHSYMGSQAAELALQLRRVIYAFGVEAKNVRFVATSATIANKDAEKQLKTFLSNIAGVGIDQIEVIGGQRIIPEINDTANLSQSLEAIESIPADLDPSDKEYDEKVSLARFSALEMSPIAKALRSVMTANSQGPMTLNDIARAMGKMLNQEPIEQKILLRWIDILTGTVKDTKFDSQAFLKLRAHFFQRMTQGLWACVDSHCPAKKDTHLATNWPFGMVYATQRSRCECQAPVLELSSCLECNEPHLLGENKGGKIIQWNTRTHNEFALENDELDEDEDEEQKAPVHLEGKSVLPDIYASCYTKSESFNLIGLDKEGNQVHQKEGYILAQADPKVMCCSACGYQPHHGGLPFKRALLSAPFYVTSVVPTVLEYCPDFEIDKDDKTKNIGRLSLPGRGRRLITFTDSRQGTARLAVKMQQEAERSKLRGAVLESLKQAQNKQPIEDVLNDDVTPEALLEQAKILRNLGAISNAEDLEQKALSLKSGVKSLKPIELSWSEMAQELAGLSDFKGSILISNKQLSPEIFDQTDGAYKLADMMLFREFSRRPKRQNSSETQGLVKVGYQGLSRIKKVPEYWEQYGLDLNDWIDFLKVSLDFFVRENSYVKLEDDGWKKWIGQRFSSKELIIPSSEEANEMRVKKWPQVNRKGAQGRLVKLLMLGAGLDLQHLLHVELINAWLKQAWLDLTQTSKVLSHDGNRFHLRRHEMTFSLTNKVYICPITHKLFDTCFKNLTPYLPRKIDGHNIICEEVSYPLLSDFDLSQKDYDEGIDTIRDSVSEDENIQVLRSQNLWTDINDRAVEGGFYYRTAEHSAQQSSSALSKYEDMFKKGQINVLNCSTTMEMGVDIGGISAVVMNNVPPHPANYLQRAGRAGRSKESRAISYTLCKSNPHDQQVFSKPKWAFETDIAAPYVAFNSPRLVQRHVNAILLSIYLKEEVGDTSTDKTSLKLEWFFSGQDSICSRFILWLKAGSNRVNKAILGISKGTDLSELPASKLRENTAKAIEVHMQKWQKDHEYLITEQVSAEKGSPFSYRIEIEVKRLCNEYLLKELAAKAFLPGYGFPTDVVTFDNNNIVDFKRSKNRGKGKTSQERREDNLARVRGLPSRNLAVAIKEYAPGTELVLDGRVFKSGGVSLSWHNMVDTDIKEAQQFDMAWRCGHCGQTGYEKGVTQASKNLVCSNSTCAKPIKSANTRKVLQPTGFVSEFYAEPNNDISVQSYVPIEPAWLSTRGEKHALPNPAMGHMTADVDGTIFYHSSGVSGKGYALCLSCGRAASLDKDGNPPSTFNTGVRHHPLVPNRQSKETESDSYCHGEATIQEGIHLGYHTNTDVFELVLRHPVTQEYIAEDKDGRIIATTLAVALRSALAEKLGISTGELGYATRPAIVDETNTATVIQLYDAISGGAGFATSAPERIQTLLEMMASKLICEKCEACCNDCLLESDSRHDVDKLDRMKALEWLGADFLNHNGSSEVLNLLNDGQYYHSSIGEFIKTYMDRGLSSINLWLSDNVTDWDLNALEFKNILLRYMYEDNCQVNLVVPENALNDQLKEVIYRLNIQGFEFFTGKPDKHEIVAQFECKNKTITIANTELGVNCPSKDWHASNGVVIFSNTEKAVALKKIDMSDWNVPDTTHLILKNDCDGSIKQFPEKFWHAINRRIKSNLFEKGMIKEIYFRDRYLVTPLHASLLFNLLNGLTEQINQYSLIEIETANFAYNTNAQSFNDNWDTLEARKQAVKCVLEDITGKSIRFDSSRKTEVAHSRIMQITFDSGEILKLYLDEGLGCWETRSSKTFDFKASVMSQARAIKSCSENINIRSRTKGTSIFIVNEK

SEQ ID NO: 26478 - protein, 1143 aa, Marinomonas ushuaiensis DSM 15871
MGDVTNGLSQINVAVKVDIIKPKLWLKQFFIKRALSGVTGKPLYQYQVSADEYLSLKCCVSKADAQNSFGDLCPDWSAAFVLFCSEWFRREYTNQWSWQPIWQSLSFQLNPVDVKNIVEKGLSDYWQRSVLQYQSEHNNYLGSVFSEGGLPFKLLIDKNNHFQKLFKQVLSRYQHATLLGKTTHELVEECVNKLPQAFKENTSIKLIGDMADKLLSMVDVFELENKEDPAKHLDQVNGHWRSQFPLPLDDQIGSDFLNNLLTSATKEVKKQGIKRGELQAKHFLFLQSDVIKSEVTLPTNLTFGFSKEDVNSARIELAVYEGDVCLANAGVFHGHFEGLHTRLKMRLEKFQVTRQNTDKNLYLVAMQAGQQLAKMLIPYSWLEIGQVPVGFIQKNDMLIYAGQASFKVKTPNVWLLLPENCQVTNVVDTHLNDLNSLDKNSNDVEPSMIQEGQYLGLSLVKCQGKVCFENETKECFTIETNAPNDTGDQLSLQGKFLEWSSEPSHVFVGIPSYQWATNVPFEQRESLNLFLNGQAQNNLSLAENYGRQSLSYRNAKNQTLLRKRVGVLPQDFELSLTSADKPNEGIVTLKTRSLCCYQIKGVTEVRRDKSEANTQHIHLKGEGIPPDYFKLVVFVNLASDPIVLTLPFPSKGAVAYDKEGQVLKRQISLDALLGSRLHLFSDAGQSNYFELEISLKDYQVNYANTPTFQWRYRVENEPKVISLYALKEYIQELMSLKPELDSEVLVTVRGPAKNLDIIVKRYEAVLDHDRARNLICLQEGSGFDSSKIKPQLFKLAAPEERAYLLDSRRSENAATGDYELPRQLEDTGPWLVIPQAGSKISFRPKFILGRPQKFDVGQVLKHISQAVMAYHPQFCPDAFTPIIACMADKPSHSSWQYFITLKKQFYHLPLTTFQAWGELVKQPKALCLAILKFDADAGLIARLEKEYPIVWELIGIEDWRYAIEHYKSDLLEAKLPEAVVTQVIGGLIDRICTQIGVYEGAYQAYLKDGSKPQAFPTQIMQGLIIDNEDSWYQKLLQQHLDAKWPEKYDQELRRWFNFDSNFNLSIHTFHRHHQAVVLLPIYAAAVAAGKLDSEALFNKNNRVNNKLDATKAFHLRTIRDFDMDWFKPMYQFAVFQFLNKDIK

SEQ ID NO: 26479 - protein, 2007 aa, Mesorhizobium sp. LNHC220B00
MRPFETLSRLRQRMAEAVIAQSGLRHPALTAHLRETLPNPHHEGALIPPPVLEGAFPFVTADETLAALSGRLLDERTVAALAGDNSGEGYSFPHKRSPYQHQLEAWRVLGDPKPRSAIISAGTGSGKTECFFVPILDSLYRRRARVSGVEAIMLYPLNALIASQQERLDAWTKPANGAIRYCLYNGNLREKLKANEQREALSRAPQNVPDRQALRRDPPPLLVTNLTMLEYMLVRPQDRPILEASRGRLKWIVLDEAHTLVGSAAAEVALLLRRVMEAFEVDPTTVRFVATSATIGEGADVEDKLRRFLANIGGIQLDQVTMITGHRRLPRRPGTGGVAPKVADLGTMSPQALFDALGSHNPVWSLVEGLKDRSVPAAELERLAGAIGVNGETLAMALARAQNANGETLAPLRVHSFHRASPGLWSCTNPDCPAKMGEGWSAGSVLYEREETCPSCGMPVAELFTCNECGEAFMIAEEKGDRLTPPRNLPPSDEFLFEAVREVEDDGEDQAIEEVPALDMPSVRHCFSLQDAGLLPLFIDKATGRTADSGGEGRYRLTSHGDGTGPCPSCSARNKSGDKLYPFRFGAPFIIGNAAPMLLAAMPPADKVVVPLLPQTPPDLPASGRQLISFTDSRQGTARMAARLQIESERAFVRSFIYQAVQLKAAGDGESEKTIELRGNIARVKEREGWQDDALFASLVAGWEKELGQQSGDGTISWPDLRASLADRIEIREWLPQVWGDRADIFKASGSSPASQLANALLLRELLRRPRMANTPETMGLARLVYPTVERIVDAPRGFLQRGATLEDWKAWLGSILVFAVRSPFAVAVSRDLLRWIARKGFPKKLSSPGLEPARRQQAWPRASTSAKIPQVVELLRLGLGLNPGSKEDRMEMNDWLEKAWNQLLPLFPANESGERALDFDLLQLASLKKAFLCPVTRRIVDVAPFGLSPYARIAKDRAEPIKLPTCPVDGDEAIRRAFTEDDATVAELRARGLWTNVHDRIALFSPYARSAEHSAQLSPARLRRYEARFKAGEINFLNCSTTMEMGVDIGSVNGVMMTNVPPSIANYRQRVGRAGRRGQPLSLAFTFAKDRPLDREAFRDPATYLKREIAAPRVALDSRPIVLRHVGAFFLGRFLEANSGNALKMAAGDFFGCPEVPRAARAVKAERPVARFLDWLGLATTANDNEAALHRLVRGTVLDGRRDLADLTAEAMAGVESEFADEWRALQEQLPGATEIGAAKSLELHLKRLCGEFLLSDLADRGFLPGHGFPNNIVSFELGGSLPDDDVPDGRIGQRHGGPKRPLDIAIRDYAPGSETVVDGQVYRVGGVTLNWHRPSSEQGMREIQALRWAARCAHCGDSWTGAGSWPEQCRTCADAAIKVDDYLKPAGFLRDSHIETHADIDQVAYVRPEPPRISAGSAPWEALTKPTAGRLRLNRRGTVYYHTKGPGSQPSGYGLCLYCGRMEPMKPGEMVCSGLDDHKPLRSPENFMEPCEGNEKPFTIKTGLHLGYEIHTDVLELQPAATPDIGAANALAIAMREALARHLGIDPDEMGYGIGASRNAMTSTTLSIFLYDRAAGGAGYVVRAADDIGAMLKSARAILDCPRKCAHACSACVLVSDAPEKEEELDRKKAITFMDAHLCLPDVISPEDVFAPRADISGRPLAEIDEWLNGRGQSKLFFWAQLRDLVALEDWPPTSLFRRWAGNGRAVTLVLPRGTVDALDASQLLYLRDYSSRHQVVIAEGDTVRFSNGGILFAYATDGQGGHAWASRDDAIQLAAPDWGASHSLPVARAPLKLEPGVATVSPERLAPKSGAAVVILDRTFDGPISAFGEKMSKDIRKAAADCGVSGKDRPIQVSYRDRFARSPLVLRLLVDTVSVLAGGETIPLSIETASHKDSGYSRDEVASDITDNDMLDAFAGAYGDRRNLDVKLTVGQPPHKRSLILVYESDRKLTVDLDQGFGWLVYEGPDRSFDAGAAPHSAASRIANLSGRLRRRHDHDSQMVVWRS

SEQ ID NO: 26480 - protein, 1033 aa, Mesorhizobium sp. LNHC220B00
MHRYRISDAQYRCGLDLVQRNSALLDPENRPLCAIFALVTSEWFRRQADTLWRRWQDVGVVPERISVGERNEIALAGLRWWGLKLIVTEGLYRTRNEYLMTLARNGGLPSTLLVGERANAVRAYFENVMADSLALPWSSAHTDYLTIARRHAEGLPVSYQDDGILDLAAELIAGLIECRRVLPKDQLNNNPAGWLDAQAKGWRERLPIYLPEDQAACSRLFNDLLTVEPKSRGGGIGLRRLLARDPEGRWREGFVVQADGPLQFDALRDQKEGRFRAYFAGSAARLTSREFALIYRSETDSKGRFEVTSQSLGHPGFVGPFAFSEMATVALSREGRTLPTVCWPGGRAVASACHVLRSTEREDRLELVGTGSVRSTAEVLHVWVSGQSRVLGHDGGGVECLWQSDGRALWRVEGMALVETEEGERYRVQAGASSDDERRLDLETIFVSGLSFEDGSIQPVAAPLRPRTRGSGGEPRLRFLREGREVNARGAAEGLVTVQWLDDEGFLIERARVLALPPGFSLEGRIETGGARVSWQGLQGWQVAAVDAFGTQIETERLDAGLVAPWQGQPTAQLRIRLIDPYGSAVMAMLDLAANETVLVDASGRIRKDAPELSLANLRGAVLLTGRAVTIDLDLRGAASARALIARRVEGETPMIKFGALAESLLGLSAERGPSVVIRDDRNRPLCTIRRSQTVPFVNDGKALFASLAADAFAVARSLLLPETELALTQIGSGLFQLPTQPDGPYLVYCRKGDAVVTRPWLIDAPVAGGSSSTTTRLQANSLISKEDERRLAIQEELSSIAHRTASSAELSHLIRVVASLKGLSPRALDLTRELTSCPKLLCRLLLAASPERLEAILTLERDLPFLWMALPVDAWKQAAGAEWDRAVQELSTVFDSAQASKQATMQMQKRFETLAERTLWFAGVSRSIGIGKTLPQDLRSVAQNYVRLRHDQVDDLPRSLAEYAARLGAPAGLQGFDYNHFPMLLMPLCLAGIACGKLEMTPDVAAGLRNALDFDSTYIATAYPHCLEFLSK

SEQ ID NO: 26481 - protein, 2034 aa, Mesorhizobium sp. LNHC232B00
MTQFDVLDEVKRRTAEAVVAQSGLAHEGLRRHLRELLGGNNPASGALMQQAIIEGAHPFVAADKTMQDFSGSLLHRDLISALDGLPDGHDYRFPRSRKPFQHQVEAWQLLAEKDPQSVLVTSGTGSGKTECFLFPILSDLAAQAGTQREPLQGVQAIMLYPLNALIESQRERLSAWTKPFGGKLRFCLYNGDLPRDAKESDRRRSPERVVDRVRLRSSPPPVLVTNVTMLEYMLARAEDQPIIDVSKGKLRWIVLDEAHSLVGAAAAEIALLLRRVLLAFDVKPEDVRFVATSATIGSGEQVREQLQSFLADVAGIPDGRVHVIEGRRVMPRRPEGRHSPISDDIRTADPNRLYEALGRDPQTWSLVEKLFEGSVPLADFELPARAYSISAPELVSAMSRATRKAPGGEVEPFAPMRLHAFERAVAGIWSCINTDCPGRPSDWPFGGILSDRSDHCPLCLAPVLEIISCTECGEVFLEGTERGERLAAPLRNPPRDEFAFENARENDAGSEAGDEIEEEVPEEEAVFQRDRLFATNPTAAARGFWLDRKSGWRVSDAPAEGGASLLSEEHAGPRHCPHCSPEGRKRSEMLRPLRFGAPFILGNAAPILLEGVEPARPTDGEKLPSAGRRLLSFTDSRQGTARMAAKLQVEAERNFVRSFVYHQLIASTQPQAGADEEIARTTTEIEQLEAAFAATRLPALENLIAEKRRTLAGLTSGNLDGVAWPDLVNRLSERVEVAEWIKSIWQVRDEALFADAGKVAEFLLLREFSRRPRRANSLETMGMARLRNPAVDRLTELPDALRRRGKTIAEWRSYLDAVLTHFVRANGAVSISRQLQHWISPKAKLKSLIGPEEHTDGDQSLQAWPNGYFRAHPRSRPVALLVHGLGLELSDPGDRADLNECLSMAWRQVQHTFSADPERRVFDFSKTFVAPVTNAFYCPSTRRILGAAPFGMTPYGLESKLGDRRQAVPVVMPLHPEALLGLLDMDIARQAVSQWIESDAAVVGLRNLGAWNNISDRVALFADYARSAEHSAQQTGGRLRRYERDFKAGRINILNCSTTMEMGVDIGSVSSVMMTNVPPSIANYRQRVGRAGRRGQAISLAFTFCKDRPLDREAFRNPHAFLRRNLSAPKVTLSSRPIVQRHVNAFLLSGFMRERGGDSLKMQIGAFLGCPTEPSETRPLKSDRPVETFIEWLERPAVATAYEMGLAALTRRAILWGDQTLVEHTRSAIVDLSKAFVAEWEGLVALAKDEGVREAGKSRMAIELKRMCGEFLLSGLADRGFLPGHGFPTDVVSFIPGKEFKSPEDTQDGTRQFRTVGPQRSLDLAIRDYAPGSEVVLDGLVHKSAGVTLNWKRPASEENLAEVQSLRFHWRCSECGASDTKRGSGPEQCQACGAEHPLSHEFLRPAGFSVDPRARVHADTDTLSYIPPEDPVVSARDTAWRSLPIPELGRYRCSREGLVYYSNRGGQKGFGYAICLQCGRAEPDTDNRGLASPPPALVDHKPLRYRQGQELCPGNEKPFSIKRNISLGYEITTDVFELQPQHPLRRAAANAFVIALREALSQELGVEADEMGFAVAESRNALGASTASLFIFDRATGGAGFAVSFEYLMRPILRRAEQILDCKTPGCEKACAACVLTSDAPDGKDDLDRKAALNFVRNHFTFPDDLYPADCFVPGAELSLAPIDEIDRELRRSAQSKLTIYLPHQSISASIQDWPLAGQFQRWGMRGHLVRLAVPSGEVEKLSSADRLGLRDFAIGHNVDLISADAPIFENGASALAAVDKGDLGSVWASRELEPSLPGKRWGSPKIHPVVVGNVSVESQFATIDLKTLLPAPGAQFVQIDSELNCDIAAFGANASKIMVDLLTRCGAWSKAGIKKATYQDPYVSSPLVARLLVDTISQVVLQSGASDASLTLETRSTRINEQRGQPWQIVHDWRDAGDQKAVIDLFGQHRGIRVSVVHKDVPHGRYLDIEFKDGSRATIVLDQGFGAWSAPRHIPVRHDFGADAATQVRRLATTNVVLQRNGIGKTYFVAAPR

SEQ ID NO: 26482 - protein, 1047 aa, Mesorhizobium sp. LNHC232B00
MADGEFDQAKELLRYLAAQGRLTVPDDRSGALFVAFCSEWFRRESDSTFLKWNDPAPDLFPAIPDSAKRDLADRGLRFWRRELRRSESGREFLLTVALEGGFPVRILTSGARSWLRDYLRSIMRRAVASRVDTLQEILDISEEERGRMRKSYQSADFVALCSELVERLLDLRRAAEAEGVSNISNSTLLDIRRPGWRENLPIYVPAKDEALVAELLTGLLDEKMAGLSTEGVETRRYLVKCDGKWVPAIQLLADGEIAPQKLPNLPTQGRVRAVPTGELGNHLSGELALFEAPIGEQRRWRVLPFTRTGKLLKNFPFTSPVTATLTSPNVAPCPWTWPHGEPLRSDLLVFREDEGSTAATPLLRFFRSGSASSAIKTLHVLFPDDWTIEPTSESAVVEIESLPYLNRKLARLVGTAYFRSGESDAIRFRVEPDTEGREHDLEFPSGSPTGFELADEQCELAVSPADPLIRDGGKQPRPPRAGELFSRRPGGKWVPLSSRIDSVGLTEFSLRDPEAGVQIERRLVALFPIGARISGTMNDARRGQIRLEGLPGWTASIANAACEVDQVNSTTLSFKFLGRPLYRLPMMVRPAVGQPFEIVVPLIGRDAAIALADGSVLEPGAQVDLGTLRGAVAISPRRTVLHVTGKGAKSGGLSAAVDGELPLGVLRSAIDEILTTLPGQDDLAELEFVGDTRLPIRISRYRNKQLAHDGGIVSWSEGSSSPKVLPVARMVLDPRHEHALEQEAEGLWRIPERCKGLCLVYLRHGVDVVSRPLPVPQPGSPVAHTGNLVSALAIADYETRQAEIGNALHHIVEDVGGFRFLLEAATTLNGLPANAFDALKLLPSCPQALVGLLLSARDAGERGTIWSLQNELPFLWLGLPLSAWRAALEADYAAVFVALEPLLGAGKAGAEALGRVATLRAELNALEPALAWIFSLAGIATVEATRFPSLNDLTGTYIASQIHRSSEGRNDLAARLELAGLKLPSEILTKSHEDFDGLFAPILLAASAQGRLTIKRDLALLARRTLRENPAYVSGAYAHLLKFYDSK

SEQ ID NO: 26483 - protein, 2037 aa, Mesorhizobium sp. LNJC384A00
MIDFDRMMKRLPEQAADAILGMLRPKSRTLVSHLRTKWGAPAGSADSLIAEPFVEGAFPWLTLEGGWQALKPGLLDPRTIDVLRSVSFPPYEHQVEAWQHLTAERPSSVIVSSGTGSGKTECFLVPILDRLVRQSDGGRRSLKGVRALMLYPLNALISSQEERLNRWFEPFGGTLRYCLYNGETPETARAAVRANKPWQVGDRRALRSSPPPILVTNATMLEYMLIRQNDAPILAASQGKLDFIVLDEAHSYMGAQAAEISLLLRRVALAFGRTPDQIRYVATSATIGGASARADLLRFLQDLSGAPAQAIHVVEGQRAPLPPEPPHYDDRPLQPSALAELRPLDSGRLLAQSAQLRATREELRTGKIYSWRAWNETASTLAGGVVDATQLLIEAARAKDPHADPVMAASGGDAILPNRIHLFHRTVAGLWACINPVCAESPSRQQGSDWAYGPIFSEAREHCPCCASIVLEWVCCTLCGDGALRAEEYDGGARIAAWSDGDNEDEFEQTLERENPIDAADDEEGDTRSADAPTIVSRRYLSLPIKPGSPHLSVEPTTGIADSEAERQIIYSASRDISECPSCNKAPNRVDPERGAMRPVVAGAPFLMAQITPGFLADLSPEPVSGDPLPFEGRRLITFTDARQGTARHAANIQIASERTFVRGFIYQFVQERSAVDAEALAAIDKKIARLREHPDDAMFAGMADDLERERAKMVGGNARPWRDLVRRLAGHTTVDHFLRELWTTTNRDDRFQDTNTLAEFLLYREAMRRPVRANSAETLGLFRFELPGIDDAPPHVPASALAVGMTGEEWRDLLRLLVTHFLRTNVALDFPRWWLNWIDRRQSHIEVKPWAPGEKSSLYVRLWPNPYGMRMTRVVRLLFQALQLDPDNQVDKDKVGEILSDAWRSLQRYMTSTDNGFRLKLGDLAVAKVEKAFWCPTTRRVLDTTMRGRSPYDVDGIHPMAEPITLPRLPFPWRRSPDGHNVNEDAMDAWLATDPAVVALRKAGQWGDQQDRTAKFSPWLRAAEHSAQQASTTLRRYEREFKAGKINVLGCSTTMEMGVDIGSIEAVLNTNAPPQIANYRQRVGRAGRQRQPIAVGLTLCKDRPLDRMAIANPLDYLERQVRTPRVSLESPTIATRHAAAFLLARFLASLGSELHKLSNGTFFALTVEATMETGAPPAVSFLAWLDAVPSDPALTGALSTLLAGTPVAPGWDLIEVLRTRMEGITAELRAEWEALASATSESPAGDVELAAVNKARELQRRRLERGYLLGELAGRGFLPSYGFPTDVVQFVTETASEKSAKERLSDDGGEPQERSFGRGYPSRSREVGIYEYAPGRAIVVDGVVRESAGVTLNWQRPVSEAGLREIQSLRTMWSCKTCGALSSKPSAIEQTPCAQCGSSSLIPTRYLSPGGFSVDVRFKIHDDPSDVGGGKVVDPWVSAREAPWRSLPDPSVGRVRASPNGTVFWFNPGENGLGYALCLHCGRAEAEANDSEGPGLSEHKPLRGAPTAIDGFTCTGAPEFAPYAVTRNLMLGHEIRTDLCEIQLYDCRTRDIALTIALALREAVAKRLGVDADEMGFAAPAAPNVRGRDNWSTVIFDRASGGAGFSATVARDPVGLLYDARTFLNCGLPGRCGDPNAERVCPRCVLAPDAQHAVEATDRAGAFALLTDTLSRIALPEEHRLFGHATAYESAPLADALNERMATNPAAELYVILHGEPADWDFDAWAVAPVVERWGARGRSVTVEVDQAALERADAVTRRRIALWIERARASLRVLPKADVDMLAIVTAADQVTAWRSLDRGAYGIGSDWASTSDAPVVRGPTEQKRLLPATIDSRSLLVERVRETIFELAAELDGPVSGFGQRLRAFLIGRNETLATFFSEPCIELRYSDRYLFSPLVVRLVTELFAGFSDPSTTLSVETLIQRRDNRRPRIGKTLKDDWPDVADRNVVFQHLLARVAPTARLVLHQDVPHRRRLDFRTSKGSGTIFFDQGVGSWRTAGDVAFDPLAPTADQLRAVDVPFIVENGPSGTFFASRLD

SEQ ID NO: 26484 - protein, 1088 aa, Mesorhizobium sp. LNJC384A00
MGAEGELEAGLKSLLRSSGLTHPDGRPLYAYRFARADFDRIGATLRRYGFSAIHDRNGAALIVSHVAEWFRRERSGGHWDWIRPLRTIGLDYGPHARVQYRDVESLVSLGLRVWRRPEPKGGERLLAIVREAGFPVASVREDPRISSWLKNSVLCAERGFSTHDAVGAEAWRVSDRLAQALFDPAIDLCDRIIELRASLPPPEARGDPVDYLDQLRPGWRVELPFDVESEDIRSMVEQIVRLRDDSAAALDVVRHLVRAGDAWLGRATLGLSGRIDLRRLPPSVVESIREGRRVRIFPRPPFSEELMAVAAIETFQKDDAPVHELRAFVAKFDAPLALEDEARLLVQSGNTSVGEFIANGGEALPDAVIALQIEQIDENESPTSLRVLGSSPAQTSRPALVLAVRDELFNAVSFSAGFTDLGRCAGSDRRLVSFSGSAAFDLDGARWSWRTGAERDIDARPVLVGNLLPKVRESVFIGLPQLWIERDGHLAAPRRQALHWRPRGRGTWRPVDGSKPWGRVELAVIENGELRLAIGASIVPPAFDVVVDRGRRELRITGLDTRVLAARGATNLDVRFEGELAVVRLGPPAGMATITLRPRWDAELALTITDPSYDLRLIDGNDVLVSPRSTFSVDGVKGLRILATREVSLCMELRANDAPRLTIARRISGEIPLSAFTDAITQLLGSSESLDARVGLCTIGGTADIAEVRWYAEDIDPFASAQPNSSSVLAATHGLELHGIAVAHPAAGAVSLVGPQSQATMRAELSRMLPPGPWLIYGRRRQGAKIRPRIVPATARAPREEETLLERAIGVDGYAARETAFIQAYARPDQISPRDRRIIFDLLTLARREGLPISSIDALKALGRSPGFAVLLLASCDSLDERAGLLDLQRDLPFLWSSTIVGDWLRAFSIRIDHARARLTEVGIDSSIVYRSLISALGDIVGLRPELAGHAKAVFLMQIAPEMARENKAVDGASVHFMQIGSGGPRREIDRLIGRHDDADLPPQGLLGPRSRAAQQLHWGPYDPSFADVIAAPFVVADHASGRTTLDRGELRRCRDAWLYDPEYFEAMVPIGIDEVLRGLARVGERRS

SEQ ID NO: 26485 - protein, 2042 aa, Mesorhizobium sp. Root102
MGPFETLRQIRRRASEAVIAQSGLSHAGLRSRLRELFDSADAGEGALLQRPVIEGAHPFLSCDQTMAELTGSLLHSDFVQALDRTDDAEYRFPRERKPFRHQLEAWNQLLKPGEPQSVLVSSGTGSGKTECFLFPILSDLARQIEPNNARLEGVQAIMLYPLNALIESQRMRLSAWTKPFRGKIRYCLYNGDLEQNTPASEHKLRPEEVPDRVDLRRSPPPILVTNITMLEYMLARDDDRPIVEKSKGKLKWIVLDEAHSLIGAAAAEIALLLRRVLMAFEVKPAEVHFVATSATIGGGENVRSQLKRFLADVGGIPDAQVHVIEGARRMPLRPSGSATPMPKNIASADANELYGALASRDDIWRLVERLYKGAVSLDDFEAAAKAQELTAEELALALSRATRTDPRTPEGERLAPIRIHAFERAVPGIWGCINPQCQQATLEWPYGGILAQRADQCPHCSAPVLEIINCTSCGEPFLEGLERDGRLTTPVRTPPRDEFEFDSDAYPVADDDTDPDDAQPDDGDLGLDRLFAARPSPSARPFYLNRKDWTVCDQATEATLTVVSDEKRGGACPCCGKGPTREIPRVLRPLRFGAPFMIGNAAPLLLQGVEATPLSHTGDRRPSGGRRLLSFTDSRQGTARMAAKLQIESERNFVRSFVYHAVQKSMHAGTGATVEAESVRFEIASLESILNDQSRLIIEPIIKQKRAALEKLIGGGTDGIEWGDLVDNLSRSIEVDEWIKDVWQGRDIDPTLFADSRNLAEFLLLREFARRPRAANSIETLGLARLRFPYIDSRGEGDLPRPFRDRNKTAADWQSYLSAVLTFFVRANSAIAVKRQTQFWLLPKAPVKTLKGPGVDVSAERNSLGWPQAAGKGRRPRPVSLLVEGLSLNLADPTHRDDLEECLDRAWRDIQPCLADDPRGLSFRKAFVAPVTDGFLCPVTRRVLDAAPFGLTPYGLDQLDAGLKRATAVQMPRHPLLGEDPIGREEARAKIDEWLNADKTIVGLRELAYWNNLSDRIAFFADYARAAEHSAQQPSKRLRRYEGEFKDGRINILNCSTTMEMGVDIGSVSSVMMTNVPPSIASYRQRVGRAGRRNQATSLAFTFCKDRPLDREAFREPEKFLQRAMAAPKVALNSRPIVQRHVNAFLLSAFIHSLRGDALRMTIGAFFGCPADPSMNRTLKAERSSALFAGWLDKPSTRQLTMESINTITRRSVLDGDVTLVDEALVALDTVEKRFLEEWEGLRLMAREEGIQEAGRTRMGIELQRHCDEFLLSGLADRGFLPGHGFPSDVVTFIPARQSGKESDHSTRDGRRQFRSLGPQRSLDLAIRDYAPGSEVVIDGLVHKSAGVTLNWKRPANEDNLVEVQSLRQHWRCLDCGTAETRSGRKSDSCADCGSRSIERSKYIRPAGFTVDSRTVAHAETDIVDYVKPQEPVVSARNAPWRGLPDPSSGRYRSSRDGLVFYSNKGPTGHGYAICLHCGRAEAETAPEPNSPLPGQMAGHLPLRRRKGDLSDICAGNDLTWKIQRHFALGHEITTDVVEIQLAQNCTRAVATALIIAIREALAHELGVEADEMGFAATESTNAASGKSVSLLLFDRASGGAGFSVALEQHLAAVLRGAEDILDCATPGCIHACSSCVLTGDAPDGVDALDRTGAYIFLKTFLRIPELLISDDLFVPGAIISTGIYDEIDSTLRATTATQLTLFLHGAFDPADLVDWQGANQLSKWTSSGRKISIGLPRNAVASMDDASRLVLRDFAVRHGISLMEVDPPRFPNGAAPIAAIEASLAPTHLWVSRDRTAARLGRGWGDPLDHPIARAAYNLTLDKSELDDRLFLPTQGAEFVEIDSELDVTAAEFGKTAAAMLRAKLRNCGAWRDEPIERICYEDPFVLSPLVTRLLIDTVAELGLGSDGSLRLSIETRAPKPYDAGKFPFQLAQDWPDPGIQTATILAYGSLRNVKVDIAHKNVPHGRFMTICFSSGLEAKVIFDQGFGAWAIAHGIRVRHDFTAPAPAQAEQMLHGSYVLARRGVGKTYLVCNRGKTVSIK

SEQ ID NO: 26486 - protein, 1774 aa, Mesorhizobium sp. Root102
MTRATEIADALGRYALALQNWGAPDDHPFNGVYASSVDVVERDGLQTRQRNLVTRIGALLTNYEKVGSFLKIATAPTLAAIARLDPILRLAASGADLDHDLLIRIVNSGKHREIAAAAAAGIAWRVLYNQSQAIFQRSAHVAEIVHLRKPLEAGRSSLIRRIGPAYRHASMELASHLNGRLPASALDRIGLVERLAAIQAAKSVLSQQETLLERTLGQHYRGEATDFEQVAAACDWVASLDSTRLLPNPLKLIALSAKREIVAKSISYFKDQSARIERELSILAKAYSLDPLAFFGASEFSAARLDKVAFRFERMAAEMHRLPEWLELQRLKKAIDDLGVDELVSAGELKRKAPDLVEAIDGAFIEDELPTPTEEVLPVPKDTEVASPAKVDDPEDVPPETSEQAVLTSAGESIPAELTAARHEHFDRSESRDLLEDNGLSPSNVEESIGPSGHSANLDVIVAEPTDESATSPRLTTSWADQESDADNEQLAVRPTASEEAALADHASTGALRLLDPLSPEEPDSPTLATSVSELDEGGVDIQSAAYDTGSSFDAPATEISDAADFESPEEDELSHLIESTDNPDELAGEIDEPVGTSLDASEAEASAAPQIAWSTSESSTPFDLSRLSDLGLAQHFVMHRESSEELRKLNEVLKSRNSDAASDLHIEVQQALRQLRHLDNRQQRPAIVATGSGPVRDWIREFLSARGLTYADGRPLYRYRMSDEEYAKAKSTLVKLGRDGRLNRPDDRSGALFVIYCAEWFRRESSSTFLRWNDLAPDIFDTLAQNKKADLTSRGLIHWRRDLRMNGSTHEYLLTLALEGGFPVRLLDESSRGWLKEYLRSILRGALGLLQPETSEIESIAHEEKGQMRKSYRHNEFVALCAELVERILFWRRKAESEAQANLPHAQLLDLKHPEWREDLPLYIPAGETGIASEILSGLMNEPAAGLPTSGIEATRFLVKIDGMWQPAIQIRADGDMPAARIPHASTGLGRLRAVASGALANKVSGEFALFEPPSGTQKRWRVRPLVRLDKIIPDIPFSMPILANLTTNGVNCPIVWPRGEAVNSEILVLRKVPTEAGSAEALSLAGRGSHRSSAHRLYVLYPEGWAVRPADPDTIPDIELLPHLHRCLATISGATYFESGESGAARYRVEPNSDERDAELDLGGKPSGQFESADPDCDLIEGPLAPSIVENGGLRQPRKGEIFWRRPGDKWTEYVRPIKAVGRIDVSWRDPEASIQLEKRQVAMITPLAGISGRMTSAQACEISVRGLDDWTIQFPQDLFEQSVTSANQMKMRFRSRPAYRIRAVLIPPEGHGFSVWLKIAGRDAAIVLSDGTVLAAGQSIDIGMLRGAVAVSPSRTALDVTLKGSRSSGLTVQVDEEYPLGALRNGIDEILAGATEHDAVAEMVFLGQQMPFRIGRYRYPPPAYVDGQIRFSTFGLNDTTRPVARMILSPRHDHALDPAGDNTWTLPERCVGPCLVYLRDGTEVISKPIVIGKSEAMPSSSILLTAMAKSAHAERQTAVLSALADIAGSTSATLDINWLTELIAHLNGLPASAFDVLRLLPRSPVALIRLLLGCRDDVERNLIWSLQNQLPFLWLQFPKDSWKAALTAEYHTYESAISGLADDLRLKLCGERMIALISAVCDLEPALSSIFQSLGFIRAQVAARSVRDLAQDYIRDQRLRDADGPARRTQGSAVIAENLVISKVTLPEELHPRFDLQSFEGLLVPVLIAACANGRMAIDAQCLLIARRMIRESPAYVSGAYPHFLKKYEVI

SEQ ID NO: 26487 - protein, 2080 aa, Methylobacterium mesophilicum SR1.6/6
MNLVRPAAAFGTLDRIAARSTAAVLGWSALRSQALRAHLLATMPAGGDPNAFLAEPIIEAAHGWAMARETFGSLAGTLLSESVVAALDGRDLPDPDGRERYRLPRDRHPYTHQLAAWRHLLADTPRSVLVTSGTGSGKTECFLVPLLEHLAQAAAARGGPLRGVQALMLYPLNALINSQRERLSDWTRPFKGDLRFCLYNGETKDQIPAAEQAKTPEEVRSRHLLRRDPPPVLVTNITMLEYMLIRKEDQPILQRSQGQLRYIILDEAHSYVGSQAAELSLLLRRVIRAFGVEPEQVRFVATSATIGRANDPRTLDALAAFLAEVAGVSRDAVSVVEGHRQPPTLPPVRDALALPTPEELAVADPLSLFDRLGSTPAFQRGFASLVAGPRTAAEWFKTVGVSPNHGDALLAAAARARKVLSGETPTHLQPLKVHGFHRTQGGLWACADSNCRGRAGTLLDGPDWPFGAVFQERLDRCTHCEAPVFEVVFCNQCGETALDALREADREGIERLTPARAARTEDEFLTELVEETPEANSEDPFATKETVDPHRVLITAPAASKARPVVLARATGTILDAGEPGTLALPLTSADQCPHCGVPFDGKGLRLQNFRVSGPFLLGSIVPELVSGAEPLAGNRETPGVLPAAGRQILTFTDSRQGTARLAAKLQRDAERNHVRALLYHGVQAQPFLTSDLRQTLEAKQAELAQVDAAIAANPALASVLSLGRRPIVDEIARLQPSEMRLTWADALQMIQKDEICRRWIREAIWTEREAAFSDETTFARFLVLREIIRQPRTANSLETMGLLRLCFHHIEERVTTSPSAFARHGGTLADWRDFLTLALTRVFRGNVAVDTDREILHWIMPDVPKRFIVPPGSNTYGDKKLRAWPQPYATSARRPIIVSLLAAGLKLDFDNPAHRDDLIACMGHAWEAIWPLLKADSVSGTQLDPEKITLAPVRAAYLCPITRRIVDRTFRGLSPNPRAPGDVFLPAEPIAMPSFPFAFGRSGVSAVEPDAIEAWLNEDTDVRALRQRGHWSDLHDRIARQDAFFRSAEHSAQQPGRRLRAYETAFRRGHINVLNCSTTMEMGVDIGSIGTVLMTNVPPSAASYRQRVGRAGRRGQAIALSLTLCKHRPTELSVFRNPLSLLTRTIAAPTVSLDSAVIAQRHVNALLLARFLAATGAELPKLEVGYFYGLYADGTRAAPGESPAEGLLGWIDAPTTRADAGLVADLSVLLRGTPFEARAEVAIDGTRDQLSELRSAFEQEWDVVRADLLVAAKERSAAHTALKIAMQRLTGEYLLAELASHSFLPAHGFPTDVVPFDNSNAFIKERRAPDQDDDASKRLRHRDAPSRQLDLAIRDYAPGSEIVLDGIVYRSAGVRLDWKRPASESSVPEIQSLRFAWRCERCGATDTAHRQPEACPSCGEAGRALKWHRYLRPSGFTCDPVTKPHSEIESVAFVPPRLPWVAARGGAWTSFSDPEVGRFRASRNGMVFHYTTGATEHGYAVCLCCGRAAPETGPREDAPPLPGEMLAHRPLRTSRKEQPICDAQDRPFAIQRHHYLGHETITDVLELQLTGLEGPAIGYPIAAALRDALAQKLGVEPGEIGFGITQTREAEGTEPRWSIFLFDRAAGGAGFSVWAGPHLVELLGSTRAILDCRHGQHCRQGCVDCVLSRDLENQTIDRIGALSFMKERVLPRLAIPAEDRLFAPAETFAEMQPLADAIMREMEKKPDVGLTLWIDGDPKDWDVARWPAVSLVRRLALRDRKVEIVGPKALLQGADESLRLTIFGLLMRSGATVRQVTKPRTVGAGVALAQVGDATSGILWASRSREGCLPGPAWGGDAEAPIVRGHSEGLMDSGDVIDATAFLRPAPDTVLIDVGSELNGAIEAFGSSFWQLLIAKVPVLAHYARGQTPLTSMDYSDRYLLAPLPLRLIIEVLAHAPGRTSQTTIRVATAQGGLNRHATSPSYIEHDWQHDPHCHAVTGTLLRGLSTRAVLHRGDKRNLPHGRTLTLRYADGTSVRIVLDQGVGYWRPLQRGTRFGFQLSAAGQAENLRTAKLQVQASSTHRTWIVVTRTAAASSSKPG

SEQ ID NO: 26488 - protein, 1141 aa, Methylobacterium mesophilicum SR1.6/6
MNPATLNPFAFTAKQFLTQHGLDQPDGRQLYKYRLSDEAFLALRTLIGRWPARSQMVDSSSRYIGAVFCLFVAEWFRRDFQEGQWSWDGPCGAVGLAKDFPTLHGLTATGLGFWRQGLLRGVDNSREYLHSLIVQGGIPTAFAARGEGWLSAYVRAVMGDLEAGADLSSEQALRHARFHDHRVPVSFRVAPFVEIVAQLSARLTELRREARAGAGQSDVVGWLDGFSPGWRESLPIAMADGSAARMIEGLVRLRPDAEANGSVTVERLLLRDPACGGYRFAARLALDGTLDLTQPLPPDVFADLARQTRARLFPSGSTAERVTGCLAILEPPESDETTRRADGRRPWSARAVLSEARRLLAPFPFDADVEVRLHADNRDVATFVLPAGRRVLESVLSFRAIDDEDTPRELRLIGSGSVRTREAALYFTVADAADAQITCDAGTAETIARFAGLTLHRLTGQARITTRDGVIYRLRTASDDEVALRLDLSGPAPDDLSATVPLFCGLPAIRVLRPGNVMTSAPVGGLRWRPLGVGAGWQTLDRGSSPIGLIEVGLFEDDALQDRVRLAIVPAGARVRRPRPPRDAAAIVLEGFGAVTFEPRPRDPQITVTQSRDPVADSVALTARSDRPLPQRLHIELRRPGRAGFEVQVPLIGCEVAFYAASGRRLRERAEIGLADLRGLTVEASAPGRIDGEVHARGSRGEILRFTRRFERSLPAAALRAEIEALLAASDDLDAVMRLTASVGPTECRLDVRRYALAFEPDPAGLRVEARSGQAWRARPEDEGGAIALVARRFADLCGPEIPLSVLASADFAATAIGLADVEGPVLYYARRCADGRVASRPLLAAGGRAPETDAAPASDRLAQALLMPARNLREEAVRACLLDLGRGRYPEAADAILALVRTFSDVLAPQTFDLLRHLSAEPRAMVEVMAHAQADDLPLVLSLEEQLPFAWVSSPLTAWMKAFVRRRERLEAALSAASSDPTWRADLATREACGFLDGLEAIAPALAIHVRAAKLGLGVGDAAEVFGRGLDGRVLAQRVRTLASACVGRNQGRDDWPRHAWIRGDSAIKNLLPLELSVFAEMALPMLDAPYVAAALALGQAKPSADLERRLRVCRFYDPAYFELAFPHAVRCLWARLSAA

SEQ ID NO: 26489 - protein, 2080 aa, Methylobacterium mesophilicum SR1.6/6; identical to SEQ ID NO: 26487

SEQ ID NO: 26490 - protein, 1141 aa, Methylobacterium mesophilicum SR1.6/6; identical to SEQ ID NO: 26488

SEQ ID NO: 26491 - protein, 2079 aa, Methylobacterium sp. Leaf121
MNLVRPAAAFGTLDRIAARSTAAVLGWSSLRSQGLRAHLLASMPAGGNPNAFLAEPIIEAAHGWATAPETFGGLAGTLLSESVVAALDGHGLPDPDGRERYRLPRDRHPYTHQLAAWRHLLAGTPRSVLVTSGTGSGKTECFLVPLLEHLAQAAAARGGPLRGVQALMLYPLNALINSQRERLSDWTRPFKGDLRFCLYNGETPNDVPAVDQAKTPEEVRSRHLLRRDPPPVLVTNITMLEYMLIRKEDQPILQRSQGQLRYIILDEAHSYVGSQAAELSLLLRRVIRAFGVEPEQVRFVATSATIGRANDPRTLEALAVFLADVAGVSRDAVTVVEGHRQPPTLPPVRGDLVLPTSEELAVADPLSLFDRLGSTPAFQRGFASLVASPRTAADWFETVGVTPTHGDALLAAAARARKVLSGDTPTPLQPLKVHGFHRTQGGLWACVDAGCIGRAGTPLDAPDWPFGVVFQERLDRCPHCEAPVFEVVFCNQCGETALDALREADREGIERLTPARAALAEDEFLAELVEEATEAGVDDPFSGRETVDPHRVLITTPVSSKARPISLARATGAILDAGESGALALPLTSADQCPHCGVPFDGKGLRLQNFRVSGPFLLGSIVPELVSGAEPLAGNRETPGTLPADGRQILTFTDSRQGTARLAAKLQRDAERNHVRALLYHGVQAWPYLTADLKAQIEAKQADLARLEAAIVSSPSVAGALEPVRQTLVAEIARLQPSETRLAWADVLQMIQKDETCRRWIREAIWTEREAAFSDETTFARFLVLREVIRQPRTANSLETMGLLRLCFRHIEETIATPPEAFARHGGTLADWRDFLTLALTRVFRGNVAVDTDRESLHWIMPDVPKRFIVPPGSNTYGDKKLRAWPQPSATSARRPIIVALLAAGLKLDFENPAHRDDLIACMGHAWEAIWPLLKSDSVSGTQLNPEKITLAPVRAAYLCPITRRIVDRTFRGLSPNPRAPGDVFLPAEPIVMPSFPFAFGRSGPAAVEPNAIEAWLDEDADVRALRQRGHWSDLHDRIARRDVFFRSAEHSAQQPGRRLRAYETAFRRGHINVLNCSTTMEMGVDIGSIGTVLMTNVPPSAASYRQRVGRAGRRGQAIALSLTLCKHRPTELSVFRNPLSLLTRTIAAPTVSLDSAVIAQRHVNALLLARFLAATGAELPKLEVGYFYGFYADGTRTAPGESPAEGLLGWVDAPTTRADAGLTADLSVLLRGTPFEARAEVAIDGTRDQLSELRSAFEREWDVVRADLLVAAKERSTAHTALKIAMQRLTGEYLLAELASRSFLPAHGFPTNVVPFDNSTPFIKERRNPEQDDDATKRLRYRDAPSRQLDLAIRDYAPGSEIVLDGIVYRSAGVRLDWKRPASESSVPEIQSLRFAWRCERCGATDTAHRQPEACPSCGEAGRALRWHRYLRPSGFTCDPVTKPHSEIESVAFVPPRLPWVAARGGTWTSFSDPEVGRFRASRNGMVFHYTTGATEHGYAVCLCCGRAVPETGSREDAPPLPGEMLAHRPLRTSRREQPICDAQDRPFAIQRHHYLGHETITDVLELQLTGLEGPAIGYPIAAALRDALAQKLGVEPAEIGFGITQTREAEGAEPRWSIFLFDRAAGGAGFSVWAGPHLVELLGPARVILDCRHGQHCRGGCVDCVLTRDLENQLVDRIGALAFVTERVLPRLAVPVEDRLFAPADTFAEMQPLTDAIMREMERPAAGLTLWIDGDPQDWDVARWAAVSLVRRLTLRDRKVEIIAPKTALQGADESLRVAIFGLLMRSGATVHMGANPCAVGAGVALARVGDATDGVIWASRAKEACLPGPAWGGASQTPIVRGRSQGSFDAGEAVDASAFLRSTPDTVLIDVGPELNGAISAFGSSFWRLLIAKVPALAAAARGQTPLAGMDYSDRYLLAPLPLRLIMEVLAHAPGRTAQTTIALSTAQGGFNRHTASPNYIEHDWQHDPHCRAVTEALLKGLSPSATLRRSDRRDLPHGRTLTLRFADGTGLRIVLDQGVGYWRPLHRGTRFDFQSSAAGQAEGLRSAKLQVQASSTHRTWIVVTRLPPRSSPRVG

SEQ ID NO: 26492 - protein, 1141 aa, Methylobacterium sp. Leaf121
MNPATLNPFAFTAKQFLSQHGLDQPDGRPLYNYRLSDEGFLALRTLIGRWPARSQMVDPSSRYIGAVFCLFVAEWFRRDFQEGHWSWDGPCGAVGLAKDFPTLHGLTATGLGFWRQGLLRGADNSREYLHSLIVQGGIPTAFAARGDGWLSAYVRAVMGDLEAGADLSSEQAVRHARFHDHRVPVSFRVAPFVEIVAQLSARLAELRREARAGAGQSDVVGWLDGFSPGWRESLPIAMADGSAARLIEGLVRLRPDAEASGSVTVERLLLRDPTSGGYRFATRLALDGTLDLTQPLPPDVFADLAGRTRARLFPSGFTAERVTGCLAILEPPGSDETTQRADGRRPWSARAVLSEPRRLLAPFPFEADVEVRLHADNRDVATFVLPAGRRVLECVLSFRAIDDEGPPRELRLIGSGSVRTREAALYFTVADAADAQITCDAGTTETIARFAGLTLHRLTGQARITTRDGVIYRLRTASDDEVALRLDLSGPSPDDLSATVPLFCGLPAIRVLRPGNVMTSPPAGGLRWRPLGVGAAWQALDRGSPPIGLVEVGLFEDDALQDRVRLAIVPAGARVRRPRPPRDAAAIVLEGFGAVTFEPRSRDPQIIVTQSRDPVADSVALTARSERPLPQRLHIELRRPGRATLEVQVPLIGREVAFYAASGRRLRERAEIGLADLRGLTVEASAPGRIEGEVHARGSRGEILRFTRRFERSLPAAALRAEIEALLAASDDLDAVMRLTACVGPTECRLDVRRYALALEPDPAGLRVEARSGQAWRARPEDEGGAIALVARRFADLCGPEIPLSVLVPADFAATAIGLADVEGPVLYYARRCADDRVVSRPLLAAGSRAPETDAAPVSDRLAQALLIPVRNMREEAVRACLHDLGRGRYPEAADAILALVRTFSDVLAPQTFDLLRHLSAAPRAMVEVVAHAQADDLPLLLALEEQLPFAWVSSPLTAWMKAFVRRRERLEAALSAASSDATWRADLATREACGFLNGLEAIAPALAIHVRAAKLGLGVGDAAEVFGRGLDERVLAQGVRTLASACVGRNQGRDDWPRHAWIRGDSAITTLLPSELSVFAEMALPMLDAPYVAAALALDQVKPSGDLERRLRVCRFYDPAYFEQAFPHAVRCLWARLSAA

SEQ ID NO: 26493 - protein, 2002 aa, Methylobacterium sp. Leaf86
MLGQSGLNHVALVAEIRRRFACTDAEAGALVQQPVVEAALPYVTSAETLADIAGDRLHPAVVDALTAVGPDRRYSFPRDLKPYRHQLKAWALLSDPTPQSVLVTSGTGSGKTECFLVPLLDDLAREADKVGRLKGVRAIALYPLNALIASQQERLREWTAPFAGRIRFGLYNGEMPEDAAVGVSRPEQVGDRRTLRTDPPPILVTNVTMLEYMTVRHQDRPLIEASRGQLRWIILDEAHSYVGSAAAEIALLIRRALLAFGVTPSQVRFVATSATIGEGKELLGKLRMFLRDVAGVPEERVHVVVGERRLPALPNPDTHRTLTANDLEDTATLSRHPGIQALIRGLTAGPLTWASFTTTARAAGVEPEALLGALARRGADQREPLLPLRIHGFMRAVPGLWVCLRGDCLGRPSGDWPFGALLHERADACPHCAGPVLEMISCSECGEPYLDAVERNGRLRCNTGLAEEDEFASASETEGVVESSAEEEAAVGAAGEANVSAQRRPDIARLVAVRGLPGGRPLHVTAADGLVRDSVGENSLTLSVHDRGPPEYCPACTASARPDQARGTVLRPFRYGAPFLIGNAAPVLLDGVAPREADPDLTVPPPAGGRQLLSFTDSRQGTARFAAALQAASERNAIRAIIYHAVQDSLRPPAIDGTVAAKLDDEIRQLEAVAVPALADLLKEKRDQRAVLGRPSDDGLPWRSVRDILVRRPEVEHWMRQVWRVRDRRFDQDPEEFTNFLLLRELARRPRRANALEPLGLARLRFAVIEGLDEKRLPNTFRVRGRSIIDWRDFLHLLITVHIRNPFAVRINPADQHWLIRQGFPRILVGPNRKKVVARDLPWPKARLVGRPSMAVRLLSQGLGLDVSQAEHRAEIDDVLSAAWDALLPLLACPGEGSIYALDFATAHIAPIVQAFACPVTRRLLDTTFLGLSPYATERGDRPAGERCASIVMPAHPNPYLLPERGGAEVVQTWLGTDERVAALRARGLWSDLHDRIALGSPYARAAEHSAQQPPSRLRRYEDAFKRGEINILNCSTTMEMGVDIGSVSSVMMTNVPPSIANYRQRVGRAGRRGQGLSTALTYARDTPLDCETFRDPAAYLGRRIEAPKVTLDSRRIVQRHVNALLLAAWFREAQGQVLKTRAGDFFGCPPTVPAGRVQDPPSALFRAWVVLPSTAQAHMPAVETLLRGSALAGHPDVCAAAAAAVQEAETAFATEWDAIQTQAAGLDRDAARKALGMQVKRMCGEYLLGELADRGVLPGHGFPTAVVPFVHKEDPDEEAAPQGDGNRFHRRGYPTRNLDLAIRDYAPGAEVVVDGLVYASAGVTLNWQRPAAANAVAEVQSLRWFWECGHCGTADTTRLFPEQCAACGQTLGGGDTHRFLQPAGFTVDPREKPHAEIEQVRFVEPEPERVVARGAAWKPFLTPARGRMRASHEGLVFYASSGEHGAGYAVCLECGRAEAHDHPIDPAARPLRDHRPLRFTKADAEGFCPGNDRSFAIQTGLALGHDIATDVAEIQPMALASDGAAWALASGLREALTRRLGIETGEIGLSVVRRSSALGGATHSVYLYDRAAGGAGFAPRLVEMFEELLRDARAILDCLRPGCDGGCSACVLASDLHRQAEILDRRAALDFVKSELEAIAGPSHEDRASEGAVLARDVANEVATQAGAGSEVAILWPAAPFDPASLSQPRLLSLLRRLIDSGSAITLCVQGDLLNALDPAQRLALRDAAVRYGLHLATGDALRYPNGARAIAALSGGRIWASRDDASARFGDNWGLGREAPVVTFLGQPPVYQPFDPDSLLPRHGTRFIEPGRRLDGPIRGLGDRFLTLLRPELDAAGLWRPGQLTAISYSDRYVRSPLVALLVTRVAARLAAALSGPQRRPLLLMTTPLKYSDSVPHRLSHDWRTEADRAVVIRHLCQTAGLDLELKIEPCSHSRRLTLSYADGPDAVLVLDQGFGFLKPAASVPRFDFQEAAQMQAKRLSGMDVSCSSDGASYMVVVAG

SEQ ID NO: 26494 - protein, 1161 aa, Methylobacterium sp. Leaf86
MSGDTLRETADRITACAGDAAALATIDSLLIHRPEPEARRLRIKIANLRRMLRDRGAQSSACPPRTPVHSGVIRQRGCLPERWVVILTRAGLSSPDGRPLHRYRLDDREHAAIGEEIRRRARSNLADADRETGALFVLWAAHWFHRDYRGGIRRWDDLGAALGVHLDGTAARHLTRQGLSAWRRPPQKSEAALHQWLMTLAVEGGFPAGVLEHAEAWAPRYLTRVVGALLSVDPLDEDTALAAARTQGDHAPRAYRQEVFFALAADLGATIVRLRRVVEADARARGVPASAWLDAMRPGWRDDLPVRAGSEAAARLVDGLLVAEALHTAGDGRIGCERVLWRRDGLWRPALKLALDGVAHGGVCQTLLGQRQRLRAHPTGPFARYAAGELAIFEPPTDPDDGWRVRPSRRDVLLSGVPFAVPVCVELRDDGRPVATTAWPGGEAVRGRLAILAPEDGVDGVLTLIGEGSGQYRPEPLIVVVPQSWTISPHGEASTRDALPDLAEDGRQLWRVTGAVILRSPDGDVYRVAAGQGGTRRDRLSLGGPEPRGLVSAEPDVELFAGPPSIRVCEGQNVRAARPEEIRWRPEGERGWRRGPYGTGRIVIAWRDPETGYIRDRRHVALLPPDARLACRRDGAGAVYTPEGFTAAVLTSPDADLLLELRGDEVVARFTGRPCRNATFDLALGGGKPVRVSAPFPLEAGIARWSGACVRGGPRPAVAARLSLSDLADCVAFGRGVCTLQAMLLDRDRRPLRGGAARWTFDEELPLRGVADDLAALLRPFSDIDVVADLTFDNGAEYWQVGQFETSLVLHGGRLVHVAGWVEDADLPLVGRSLDNLAVEVTLGTSTAADRINQRAPPLVEGLAGIWLLYLRRGDAVIARPSIVCLGPHRSTEAEGLPAAVMIAHTEDREVRLQSRLAEMADGAPGTQSDVGWLATLAAGLNGLPPATLDVLKLLARFPGALARLALHAGEAERSAVLALADALPFAWATVSHADWAKASAVAEAELVAQLQGAVADAAPLARAAVRHAAERLARAEPLLGWPLYAAGLIPPPAAHGPGLLEAARDHIRRHGDRVSENGPRGSMFRTADAGELPREFLEAFHPVHLETLDAPCAAACAAAGRGRPSDDAVRRIKTAARADTLYFTAAFDAQFMRLARSRKL

SEQ ID NO: 26495 - protein, 2035 aa, Methylobacterium sp. Leaf90
MVRFPVSSPRFITPVATLDAVRERATEAVLGQSGLNHPALAAEIRRRFACTDAEAGALVQQPVVEAALPYVTGTETLAALAGDRLHPAVVDALTAPGPDRRYAFPRDLKPYRHQREAWALLSDPTPQSVLVTSGTGSGKTECFLVPLLHDLARESDRIGRLKGVRAIALYPLNALIASQQERLREWTAPFAGRIRFGLYNGDMPEDDKFTASPPEQVGDRRTLRLDPPPILVTNVTMLEYMTVRHQDRPLVEASRGQLRWIILDEAHSYVGSAAAEIALLIRRALLAFGVTPAQVRFVATSATIGEGKELLGKLRRFLRDVAGVSDERVHVVVGERRLPDLPNADGPRTLTADGLADASILARNPGVQALIRGLTAAPLAWESFTMTARATGVEPQALLEALARRGSDGREPLLPLRVHGFMRAVPGLWACLGRDCAGRPPGDWPFGALLHARADACPHCSGPVLEIVSCSECGEPYLDALERDGRLRCGTGLSEKDEFASASETESMPEPVEDEDAAAADPNEAGVLARSRPDIARLIAVRGLPGGRPLHVTAADGLVRDGAGEDSVTLSVHDRGPPEHCPACAASARPGQPRGTVLRSFRYGAPFLIGNAAPVLLDGVAPRDADPALPVPPPAEGRQLLSFTDSRQGTARFAAALQATSERNAVRAVIYHAVQDSLRPPAIDLTVAERLDAEIRKLEPVIAQFPNLAEMLQDKREQRAALARPSSDGLPWRRMRDILVQRPEVETWMRQVWRVRDRRFDREAEAFATFLLLRELARRPRRANALEPLGLARLRFADIDRLEARHLPDAFRARGRTIADWRNFLHLLVTINIRNPFAVRIDQADQHWLIRQGFPRILVGPDRKKAAAHELAWPKARPVGRPAIAVRLLAQGFGLDVSQAEHRAEIDEVLRAAWNALTPLLARPGEGALYALDFETAHIAPVVEAFACPVNRRLLDTTFLGLSPYATERRDRSAGERLAPIPMPVHPNPYLLLERGGVEVVQTWLDTDERVATLRARGLWGDLHDRIALGSPYARAAEHSAQQPPTRLRRYEDAFKRGEINVLNCSTTMEMGVDIGSVSSVMMTNVPPSIANYRQRVGRAGRRGQGLSTALTYARDTPLDRETFRDPVGYLGRRIEAPKVTLDSRRIVQRHVNALLLAAWFREAQGQVLRTRAGDFFGCPATVPAVRDPDPPSARFRAWVVLPSTAQAHTAAIETLLRGSALAGHPDVCAAAADAVGEAETDFVAEWDAIQAQAGGLDREAARKALGMQVKRMCGEYLLGELADSGVLPGHGFPSAVVPFVHKDDPDEEAAPQGDRDGDRFRRRGHPTRNLDLAIRDYAPGAEVVVDGLVYASAGVTLNWQRPAAAAKVAEVQSIKWFWECNHCAAADTTRLFPERCAACGQALDGGDIRRFLQPAGFTVDPREKPHAEIEQVRFVEPEPERVVARGAAWKPFLTPARGRLRASHEGLVFYASSGEHGAGYAVCLECGRAEAHAHPIDPAARPLRDHRPLRFTKADIDGYCPGNGRGFAVQTGLALGHDIATDVAEIQPAALASEGAAWALASGLREALTRRLGIDTGEIGLSVVRHASSLGGATHSVYLYDRASGGAGFTPRLVEMFEELLHDVRTILDCRRPGCIGGCSACVLASDLHRQAETLDRRTALDFVKAELEAIAGPSPEDRITEGAVLARDVADEIATQAVAGGDAVVLWPAEPFDPATLVRPRLLSLLQRLREAGTALTLCASGDLLAGLDPAQRLALRDAAVRHGLRLATGDAPRFPNGARAIAALSGGRIWASRDDAAARFGDGWGLGGEAPVVTFLGRFPACQPFDPDSLLPRQGTRFIEPGRRLDGPSRGLGERFLALLKPELEAAGLWRPGQLTAMSYSDRYVRSPLVALLVARVATRLAAALSGSQRQPFLLTTTPLSQNDGLPHRLSHDWRTETDRAVVLRQLFQAGGLDLELKVGSCSHSRRLTLSYADGPDAVLVFDQGFGFLKPLASVPRYDFQATALIQAKNLSATDVSCSSDGASYIVVVASK

SEQ ID NO: 26496 - protein, 1161 aa, Methylobacterium sp. Leaf90
MLEETLRQTADRIAACADDAAALAAIDIRLIHRPEPEARRLRIKIATMRRALRDREPQGDASPQRTPMSPIIVRRHGCLPEAWAVILQRVGLDAPDGRPLHRYHLEDREHTAVGEEIRRRARSNLAEADRATGALFVLWAAHWFHRDYRGGVRRWDDLGTALGVQLDGNAARHLTRQGLAAWNRPTQRSEAALHQWLMTLAVEGGFPAGVLAQAEAWAARYLARVVGNLLNADLLDEDTALAAARAQADHAPRAYRQDVFFALAADLGTAIVQLRREVEADTRARGVPASAWLDAMQPGWRDALPVRAGSETAARLVDGLLQAEALQVAGDGRVGCERVFVRRDGLWRPALQLALDGVAHGGVCRILAGRQERLRAHPAALFARYAAGELALFEPPTEPEDGWRVRPSRRDTLLGGVPFTVPIHVDLRVDGRPVATTAWPGGEAVRGQLAVFALNEGTDGVLTLIGEGSGQYRPEPLVVAVPPSWTFIPHGEASSRNLLPERAEDGRELWRVTGTVILRSPDGDRYRVASGQGGTRRDRLNLDGPEPKGLTSAEPDIELFAGRPSVRVREGQNVRTARPGEIRWRPEGERGWRPEPFGTGRIVIAWRDPETGFIRDHRHIALLPAGACLTCRRDGVGAVYTPEGFTAAALTAPDAALVLEQRGGSVGARFTGRPCRRAEFNLSFGAGKPLRVSAPFPLEAGIARWSGACVRGGPRPRLAARLALSDLADCVAFGRGVCTLHEVLLDRHHRPLRGGTARWTFDGELPLRGVADDLAALLRPFADIDIVATLSFDDGAEHWQVSPFETSLILREGSLAQAAGWVGDADLPLVGRALDNLSVEVFLGMSTAEDRINQRAPAPPEGLAGTWLIYLRRGDAVIARPSIARLGPPRPTEAEGLPAAVMIAHNEDREARLQRRLTEVADGAPGTQADVVWLATLAAGLNGLPPASLDVLRLLAHCPGALARLALHAGEAERSAVLDLADALPFAWPTVSHADWARAASAVEAGILAQLEGVAVDAAPLAQAAVRHAAERLAHAEPLLGWPLYAAGLIPPPTARGPGLVEAARDHIRRHGDRVSENGPSGSMFRNADAGELPQEFQQLFHPAHLETLDAPCAAACAAAGRGRPSEDAVRRIKTAARADNLYFAAAFDAQFMRLARSVQS

SEQ ID NO: 26497 - protein, 1694 aa, Neisseria mucosa C102
MNTDTMQTLSGLIEQSLNRIKEATIGVLDITDNQLRSHLRQLISNELGNENCFLADPVVEHTFGWKSADCTFADLVRQNLFSTKLTDVLADADRYGFPKTARPYTHQLQAWKHLLGDAPKSAIITSGTGSGKTECFMIPILEDLIRRQTLEKTALIGVQALFLYPLNALINSQKERLDAWTKPFGNKIRFCLYNGNTKESAGTRDKDQPNQILSRELLRKEPPPILLTNATMLEYMLVRQVDAPILEKSRQTGSLRWIVLDEAHSYIGSQAAEIALLLRRVVHAFGKKPEDIRFVATSATIASDKAADELRCYLADLAGVPKEHVLVVSGSRDFLPISVADGRQSIADITSIKDETERFAALCQSVMATTLRNCLTANTQPYTLNQLIQATQAYLLSDSLYEQQREVLDWLDVMTQTKPSENAEPFLKLRLHLFQSMLHGLWACADRHCSKKEGYLKDWLFGQVYLNRRTKCDCGAPVYELVLCQDCGTPHLMAQEHDGILQQCDTYITDEFALNPEPAANDEEDSGDDANPISDGLQFISRNKVLAAPVDMQSEGYTVQKIDKETAQIGVQQGKTFELALDFSLQACCSACGKENQRMPFYHGQYLGAPFYVTHAVPTVLEFCSDAENDPQSLPARGRRLITFTDSRQGTARMAVKMQQEAEYSKLRGMVFDVLVQGTGKAEAMLPELVALMQANPDLVALMQANPALAEQILWKGSSGKKTHLTWDDMCRTLRDKAEMTQDLLPYNRETNPSIFNDPSGNGAEKLAELLLAREFIRRPRNANSLETLGLTMICYPSLDKISTVPDGWVETRVLNQADNPSKPLDLDDWKAFLKMILDFHVRENSFTNLDEQKKRWLGKRFSGKSLLPPDTREKQTLRKRAWPQVRDKGQQPRAVKILQAVTGLDIQNPLAKHKINSWLKTAWKQLTTGSNILYPDADAWKMPLSAMAFKLPEKEMWICPQSHRLIDTTLRGVSPYLPGNWQEMPSEKLFCSKTEIPDYYRFKQDATAEPRRSQMRRLLRQDKDVGHLRQEGLWSNLNDKIVEGGFYYRAAEHSAQIASTQLNRYEQMFKEGKINVLSCSTTMEMGVDIGGMAAVVMNNVPPHPANYLQRAGRAGRRSEAAAIAYTLCKNDPHNRRVFTNPKWAFTTAIAAPKVSLSSEKIVSRHMHSLLLAAFLAKRSDTGKDRTKLNTAWFFNPTQSVWQQFCDWMNSPECSAIDQALGKLAAGTALEGVPLTRIKASAKQRLLELAENWQADFHNINHKIKQTNSDSYKKALNREKQLHENENLLGYLAVNAFLPGYGFPTGIVEMKIRKMEDLRREREEREDNLFIRKENPSRSLDIALREYAPGSDVVLDGRVYRSAGINLRVKSDERGKNEDQRFDTAWRCKNCGTSGVTRYKYSCNDIQCSHCGENIPFDEQCTVLTPTGFLTDFFEKSSNDVSFQTFVPIQPPRVQLDDETVAFLKHECGEIRYGSDGRVLFRSSGKHEKGFAVCMRCGRADSMTDVGELPNVFLGEYHKTLGGGLDLSSNSKDCPNSNVQINIHLGHHISTDVLEIALKNPQTKAWLGSGDKTTARTIAVAVRDEIAAFLGIETTEMGYAVRADRDLETGAVRCLIQIYDKAEGGAGFVLSAVDDINGIISRALDRLNCPADCGSVCQHCLAGSDSNVEREELDRHHALRWLEEAQLKQHLNYQ

SEQ ID NO: 26498 - protein, 1115 aa, Neisseria mucosa C102
MKNLTNPFKSWLSHFFFNRDPLNPIPNGGPLYTYAVNENEYRELCALFYRKPFLISGSVYQEEWCACYCLAVSETYRREYSGGEWSWAFFDNVIGTQFDNEQQRYKYLKKGLAYWRREWKYDAAKNTRYLGTLVAEGGLPLKMLAADDNAIRNIIDYGLKKYQESMETFRPLEEYIAERVYRLAQVFRDTAAVILFADTVRALVKLAERFDLKNKRNLVEYLDQADSGWRSEFPFALDGKQVDAVINRWLGNAADERQKLEKQEFSCRHYVKEGGWCLHAKIGLPEKFSFPIQNYQGETVLQWQIFEGEEPVAQMGATVFASLSDTGGELTFKLPFGKQLDFVREKPSLPLSVRVFAGGRLLYTKLFGDTGFDEDAPLVFHSAQDQRWQLFSTNEYTRSKDRDILIHLPDGFRLSENENVSYLGGQWFKCSDGLTARHADGREIVVVQANQTEQSILHGRLFYHCQNTDGLPVYRGFPTLLTPPDLSPTHIKINGEVQSNICPNYYGTFQVAFYKGAICLLRRKITVLPEDFSYTWQAASNKDPAILNVNTSEKVFIDVFAKHLDITQIHSRFRFICQTEDSNYPSHIILAVGSNPVQAARLRLPLPFNGAYLYDEKGRIDDCRLNINQLLGKWIMVYSSASTDMRLVFKLSDNVHGRPISISERLSADGSVQQFFLDQWKPQLLQLLSCSSSQDAQVEITVCHMGSENPLIRLILSRYNGLVMWNNQFYRFGILAVTDALRKSFVIKRQAEDELTCREAVVNIMRLDAPEKGAQRLPESAMRINGHYQLSSEQYDEGLWLIYPAPESPVQFRPAIFENSSEKFIEPFQHHSLHIAARAFHPNHNPEAISRIITEMVGNPEHSGWLYFESLKQHFSHLPLSVFETWKALVQQPKALALAVLRLGLDGVFCERMRNELAVVWEWLALQDWFAAISTYKPYIRTKIAATGLNPDDFPLSENCIPTSVLCHDEILRNHVFKGFLSEIEMIVVENTLGEIFDKKHDSRYNRHYNALRQNKNQRIPETLSDGLQKWLEKQQDVFFNKVRSLSKVPFDRTVVWLPVFTACVKAGNAQPSDIMPLEMTAAQFADAFYRIYALDAEWFDYVCASLSCYLVSES

SEQ ID NO: 26499 - protein, 1959 aa, Novosphingobium pentaromativorans US6-1
MVSRAGIRHEGLNAFLRSTLAGTDPANGSLLSEQLFQAAPGYVSSGKSPNQLQALLHQRTIDAITQTSDTDLRFDYPAYAHQLSTWELLSTQEPQSVLVSSGTGSGKTECFLVPMLDDLVRESAEQGPLTGVRALMLYPLNALIASQEKRLTAWTKPLRGDVRFALYNGLMGTARKSNRDKAEHEIPHQVLYRETLRANPPPILVTNQTMLEYMTIRREDRPILDASKGKLRWIVIDEAHSYIGSAAAELSLLLRRVMNAFDVTPDQVRFVATSATIGSADDQKARDDLQRFLADIAGVPLERAHVVVGKPQPVDLSKVLTASDDPAASSVAERLEGEPQTLASLKALSPDAERILLDLSAHNASEAKPVLPMRAHSFTRAIAGLWTCINADCPGEMRPKDWPFGAVLFDHRDQCPHCQSMVFEIQNCLDCGEPFLPADDMGDRIVPRRSDHDADEFRENSYRDRDHDDDDEEDEHEGIGHPRLIAINPKSEATATAFDVSSGEFTGEAGHFHLTQLDEGRCPACLGNKRRGRPAVFPFRFGTPFLTQNAAPILLEGVSPHQAEHALPFDGRQLISFSDSRQGTARFAANIETNGERGFVRGFIYHAVQKAAQGSDLTDERREELLKKKAALANLVADMPAFKDDIAKIDAELAGGATTGISWKDLVSGLASEPAIGMMAKVWDLDRSERFHDNREALARFMLLRELARRPRNANAMETLGLARLRFPDIERIGPDKLPELIGQKGYSIEDWRGFLYYMVDYLRGQFALEVDDGDARWMPGRARPRNVIGPDQPPGAKRDVSWPLVNTKGRQPDSILLLASALNLDLTSQRDRHEINQVMHAAWNQLTPLLSGVGGTFSLRLEQKAEIEAVDRAWQCPLTRRVLPRLVFGRSPNLVGSGSKIDGKAVLPVEFSNVPRTRPLSLADKKEIRGWLVEDKQVQALRQLHLWTDLHDQAALATPYLRAEEHSAQQPPHRLREFEEQFKEGDINLLACSTTMEMGVDIGSIEAVLMTNVPPSIANYNQRAGRAGRRGQGFSTSLTIARNTPLDLETFADPAGYLRRKLASPRVSLDSDRIAQRHANAYLLAQWFREVEGEFARTKTGDFFGCRADLRPFEGLAPVDAFCEWLDLPTTASATEQGLLRLLRGTGLEYDTEIRGHAAEMFEQEAANFRRTWQRLKEDLDALEGPAKKAIEFQARRLCKEFLLKELANRSLIPGSGFPTSVVPFDTLCAETQKAQERNRPEEEGARDRRYECPTRNADIAIREYAPGAEVVVDGLVWKSAGVTLNWLSPIDSGQREPQNLRWAWWCDHCGGAGSDHQMPDQCAHCGERSITIEQFLEPAGFRVDWNAQPHADTDQAVYIEPKSPKVSVGDALWQPMLQPETGRIRASHEGYIYHHSRGPNDQGYEICLECGRAGDAGTDALKDHWPLTPRNRKAIDRCPGNDEGYAITSALALGHEVLTDVVELQLPGLESDGAAWALGAALRESLARWLGIEPRELGISVAARDGKLGRRVPSVYLFDEASGGAGYAPRLLDDIHHVFERAARVLDCPKECEMGCSACVLAADLYKQQGRLDRRSALLAVQAFLETNAELPQEDRAVPDARAINDAANTLLLRARSGDSISVLLPTVFDLAELTSTKMRTFFSAASARGVPVTLVLDPSSFNKLEEVERRFLRDASVRFEFSLALGKGEDAPFESKPLAELISSDRTTGFFSRDANAAQPGERWGLGDTHAVVAGTLSGPTAYNPINPDDLERQVAAGDQVELMQGFGQCPVGQFGKRFGSKLKQQMEAAGVWSPGSLVRITYADRYLNAPLPMLLFLRTCEALSSDLKADSPVEVDILVQPLKKDRPPHRIFHDWEYEDDRAEVAELLGERFGLDVDLQVTENSDHGRKLELEYADGQKVLVLLDQGFGYWRIAGSPPRHDFRSAPAAQASELLRSSAAVSGVGESYYAVKRSAK

SEQ ID NO: 26500 - protein, 1099 aa, Novosphingobium pentaromativorans US6-1
MEGRDFKSEIDAAQNDPVRLRKIADDIHASGGSRILMIRAIQLARAADSGPHPLGKTCGDLGLPRPTGLPLYRYKLAPGIFQRIEAKLAANLASDLLRPSLAPAFVMWAADWFRRSYQGGMQRWADIEAVLKLQLPQSEWRALADRGFDAWGVEPLITAHGNQRLSNLARHGGFPAAAIAGGASWPRRFLERAVGELLGADIQDIATAVSICERNEYLLPSIWRSPEMHAICGELALKIVELRAFIDKEVPVDGRPYSARLDHAYEDWRDELPMTLDGAAAGLIDTLLEARKLTGTGSIRVGRLMRSQDGEWRESLDFHLEGRWDDKDRVLSAGEYVRVFLQPSGALADRISGRLAYLEVESGNCWIARAMRSEAAIDFPLDLSVTAEFHARGERLAQSFVLPGGKAVGHGLRIFEQRTGDTELGAFSLIGQGSGGYRAEPVFVDIPHDWMLRGKDGNTEIEAEDFAFAPGRSLYRCAGQIIAEKPNGDAFLVRTGQSADRKDRLTIVAQEATGVQAPGGERLIKHPLHAEVEDGVSRRTATRGEVGWRFAGESTWRDDLVNAGPGHCEFAWLDGATKHVRDRTNALVLPAEFALSQRINAAHAEILLEGWTGEAVLSDETPIADRRWRVRIDPPRRALLGLRLTPDHGSTFELNVPLRSKEWLTTWDGELFRREAVLGLADLRDTVARAPGRAMLMGEVAHHAGASLEASWKVDVELGLSALRNDIAALMRPLGIDAQVRLDFHNGSNDNWYVTEFGNSLEWEPSGGLRPKTAIVGEDVRVGGRFLGAPEKEVDFGPFDGLLGGLGGQLIQLPRLRGPWLVYLREGARVLTRPKFIDGDPVHDVPQHRLGRAMAQPLLQAREDLVRLAEELAAEPMSSEATQTIRAVMDLALSLNGLPPQTFEIFSKFEIAGPLAPLLLYRCEEQHLSTILELFDGLCSSWSLLPIKAWDTAFQAQGNYLVSRLDDPQWALANITERQNEIAARAPQLAPLICRDFSPLSWEELRNHFTSHTSEGINMDAGGFNPFRPAFSELLPRENFVEALMRVFDAPFAAALSATGRASLEKEQVLTVKDVERRHPDYFAKAFGYALSELKNGRQ

SEQ ID NO: 26501 - protein, 1987 aa, Novosphingobium pentaromativorans US6-1
MAASDPLPTSRLSPMEVHQRLRTGLAEAVVSRAGIRHEGLNAFLRSTLAGTDPANGSLLSEQLFQAAPGYVSSGKSPNQLQALLHQRTIDAITQTSDTDLRFDYPAYAHQLSTWELLSTQEPQSVLVSSGTGSGKTECFLVPMLDDLVRESAEQGPLTGVRALMLYPLNALIASQEKRLTAWTKPLRGDVRFALYNGLMGTARKSNRDKAEHEIPHQVLYRETLRANPPPILVTNQTMLEYMTIRREDRPILDASKGKLRWIVIDEAHSYIGSAAAELSLLLRRVMNAFDVTPDQVRFVATSATIGSADDQKARDDLQRFLADIAGVPLERAHVVVGKPQPVDLSKVLTASDDPAASSVAERLEGEPQTLASLKALSPDAERILLDLSAHNASEAKPVLPMRAHSFTRAIAGLWTCINADCPGEMRPKDWPFGAVLFDHRDQCPHCQSMVFEIQNCLDCGEPFLPADDMGDRIVPRRSDHDADEFRENSYRDRDHDDDDEEDEHEGIGHPRLIAINPKSEATATAFDVSSGEFTGEAGHFHLTQLDEGRCPACLGNKRRGRPAVFPFRFGTPFLTQNAAPILLEGVSPHQAEHALPFDGRQLISFSDSRQGTARFAANIETNGERGFVRGFIYHAVQKAAQGSDLTDERREELLKKKAALANLVADMPAFKDDIAKIDAELAGGATTGISWKDLVSGLASEPAIGMMAKVWDLDRSERFHDNREALARFMLLRELARRPRNANAMETLGLARLRFPDIERIGPDKLPELIGQKGYSIEDWRGFLYYMVDYLRGQFALEVDDGDARWMPGRARPRNVIGPDQPPGAKRDVSWPLVNTKGRQPDSILLLASALNLDLTSQRDRHEINQVMHAAWNQLTPLLSGVGGTFSLRLEQKAEIEAVDRAWQCPLTRRVLPRLVFGRSPNLVGSGSKIDGKAVLPVEFSNVPRTRPLSLADKKEIRGWLVEDKQVQALRQLHLWTDLHDQAALATPYLRAEEHSAQQPPHRLREFEEQFKEGDINLLACSTTMEMGVDIGSIEAVLMTNVPPSIANYNQRAGRAGRRGQGFSTSLTIARNTPLDLETFADPAGYLRRKLASPRVSLDSDRIAQRHANAYLLAQWFREVEGEFARTKTGDFFGCRADLRPFEGLAPVDAFCEWLDLPTTASATEQGLLRLLRGTGLEYDTEIRGHAAEMFEQEAANFRRTWQRLKEDLDALEGPAKKAIEFQARRLCKEFLLKELANRSLIPGSGFPTSVVPFDTLCAETQKAQERNRPEEEGARDRRYECPTRNADIAIREYAPGAEVVVDGLVWKSAGVTLNWLSPIDSGQREPQNLRWAWWCDHCGGAGSDHQMPDQCAHCGERSITIEQFLEPAGFRVDWNAQPHADTDQAVYIEPKSPKVSVGDALWQPMLQPETGRIRASHEGYIYHHSRGPNDQGYEICLECGRAGDAGTDALKDHWPLTPRNRKAIDRCPGNDEGYAITSALALGHEVLTDVVELQLPGLESDGAAWALGAALRESLARWLGIEPRELGISVAARDGKLGRRVPSVYLFDEASGGAGYAPRLLDDIHHVFERAARVLDCPKECEMGCSACVLAADLYKQQGRLDRRSALLAVQAFLETNAELPQEDRAVPDARAINDAANTLLLRARSGDSISVLLPTVFDLAELTSTKMRTFFSAASARGVPVTLVLDPSSFNKLEEVERRFLRDASVRFEFSLALGKGEDAPFESKPLAELISSDRTTGFFSRDANAAQPGERWGLGDTHAVVAGTLSGPTAYNPINPDDLERQVAAGDQVELMQGFGQCPVGQFGKRFGSKLKQQMEAAGVWSPGSLVRITYADRYLNAPLPMLLFLRTCEALSSDLKADSPVEVDILVQPLKKDRPPHRIFHDWEYEDDRAEVAELLGERFGLDVDLQVTENSDHGRKLELEYADGQKVLVLLDQGFGYWRIAGSPPRHDFRSAPAAQASELLRSSAAVSGVGESYYAVKRSAK

SEQ ID NO: 26502 - protein, 1099 aa, Novosphingobium pentaromativorans US6-1; identical to SEQ ID NO: 26500

SEQ ID NO: 26503 - protein, 1985 aa, Novosphingobium sp. PP1Y
MAASDPLPISRLSPMEVHQRLRTGLAEAVVSRAGIRHEGLNAFLRSTLAGTDPANGSLLSEQLFQAAPGYVSSEKGPDQLQALLHQRTIDAITQTSDTDLRFDYPAYAHQLATWELLSTKEPQSVLVSSGTGSGKTECFLVPMLDDLVRETEEQGPLTGVRALMLYPLNALIASQEKRLTAWTKPLRGDVRFALYNGLMGTARKSNRDKAEHEIPHQVLYRETLRANPPPILVTNQTMLEYMTIRREDRPILDASKGKLRWIVIDEAHSYIGSAAAELSLLLRRVMNAFDVTPDQVRFVATSATIGSADDQKARDDLQRFLADIAGVPLERAHVVVGKPQPVDLSKVLTASDDPAASSVAERLEGEPQTLASLKSLSPDAERILLDLSAHNASEAKPVLPMRAHSFTRAIAGLWTCINVDCPGEMRPKDWPFGAVLFDHRDQCPHCQSMVFEIQNCLDCGEPFLPADDMGDRIVPRRSDHDADEFREDSYRDRDHDDDDEEDEHEGIGHPRLIAINPKSEATATAFDVSSGEFTGEAGHFHLTQLDEGRCPACLGNKRRGRPAVFPFRFGTPFLTQNAAPILLEGVSPHQAEHALPFDGRQLISFSDSRQGTARFAANIETNGERAFVRGFIYHAVQKAAQGTDLTEERREELLKKKAALANLVADMPAFKDDIAKIDAELAGGAATGISWKDLVSGLASEPAIGMMAKVWDLDRSERFHDNKEALARFMLLRELARRPRNANAMETLGLARLRFPDIERIGPDKLPDLVGQKGYSIEDWRGFLYYMVDYLRGQFALEVDDGDARWMPGRARPRNVIGPDQPPGAKRDVSWPLVNTKGRQPDSILLLASALNLDFTSQRDRHEINQVMHVAWNQLAPLLSGVGGTFSLRLEKSAEVEAVGKAWQCPLTRRVLPRLVFGRSPNLVSAGKMFANKPAREIEFPRLPRTRPLAVDGQKEIAAWLQTNEEVAALREGGIWMNWHDQAALATPYLRAEEHSAQQPPHRLREFEEQFKEGDINLLACSTTMEMGVDIGSIEAVLMTNVPPSIANYNQRAGRAGRRGQGFSTSLTIARNTPLDLETFADPAGYLRRKLASPRVSLDSDRIAQRHANAYLLAQWFREVEGEFARTRTGDFFGCRADLRPFEGLAPVDAFCEWLDLPTTASATEEGLLRLLRGTGLEYDSEIRGHTAEMFGREAANFRRTWQRLKEDSDALEGPAKKAIEFQARRLCKEFLLKELANRSLIPGSGFPTSVVPFDTLCAETQKAQDRNRSEEEGARDRRYECPTRNADIAIREYAPGAEVVVDGLVWKSAGVTLNWLSPIDSGQREPQNLRWAWWCDHCGGASSDHQMPDQCAHCGERSITIEQFLEPAGFRVDWNAQPHADTDQAVYIEPKSPKVSAGDALWQPMLQPETGRIRASHEGYIYHHSRGPNDQGYEICLECGRAGDAGTDALKDHWPLTPRDRRAIDRCPGNDEGYAITSALALGHEVLTDVVELQLPGLESDGAAWALGAALRESLARWLGIEPRELGISVAARDGKLGRRVPSVYIFDEASGGAGYAPRLLDDIYHVFERAARVLDCPKECEMGCSACVLAADLYKQQGRLDRRSALLAVQAFLETNAELPQEDRAVPDARAINDAANTLLLRARSGDSISVLLPTVFDLAELTSTKMRTFFSAASARGVPVTLVLDPSSFDKLEEVERRFLRDASVRFEFSLALGKGEDAPFGSKRLAELISTDRATGFFSRDVNAAQPGERWGLGETHAVVAGTLSGPSAYNPINPEDLERQVAAGDQVELMQGFGQCPVTQFGKRFGSKLKQQMEAAGVWKPGSLVRITYTDRYLNAPLPMLLFLRTCEALSADLQADSPVEVDILVQPLKKDRTPHQIFHDWEYEDDRAEVAELLGEKFGLDVELQITENSNHGRKLELEYADGQKVLILLDQGFGYWRIAGSSPRHDFRAAPAVQVGELIRSTAAVSGVGESYYAVARI

SEQ ID NO: 26504 - protein, 1099 aa, Novosphingobium sp. PP1Y
MEGRDFKSEIDAAQNDPVRLRKIADDIHACGGSRILMIRAIQLARAADSGPHPLGKTCGDLGLPRPTGLPLYRYKLAPGIFQRIEAKLAANLASDLLRPSLAPAFVMWAADWFRRSYQGGMQRWADIEAVLGLQLPQSEWRALADRGFDAWGVDPLITAHGNQRLSNLARHGGFPAAAIAGGASWPRRFLERAVGELLGADIQDIATAVSICERNEYLLPSIWRSPEMHAICGELALKIVELRAFIDKEVPVDGRPYSARLDHAYEDWRDELPMTLDGAAAGLIDTLLEARKLTGTGSIRVGRLMRSQDGEWRESLDFHLEGRWDDKDRVLSAGEYVRVFLQPSGALADRISGRLAYLEAEAGNSWIARAMRSEAAIDFPLDLSVTAEFHARGERLAQSFILPGGKTVGHGLRIFERRTGDTELVAFSLIGQGSGGYRAEPVFVDVPQDWVLRGKDNNTEIEAEDFAFAPGRSLYRCAGQIIAEKPNGDAFLVRTGQSADRKDRLTMVAQEATGVQAPGGERLIKHPLHAEVEDGVSRRTATRGEVGWRFAGESTWRDDLVNAGPGHCEFAWLDGTTKHVRDRTSALVLPAEFALSQRINAAHADIALEGWTGEAVLSDETPTADHRWRVRIDPPRRALLGLRLTPEHGSTFDLNVPLRSKEWLTTWDGELLRRDAVLGLADLRDTVARAPGRAMLMGEVAHHAGASLEASWKVDVELGLSALRNDIAALMRPLGIDAQVRLDFHNGSNDNWYVTEFGNSLEWEPSGGLRPKTAIVGEDVRVGGRFLGAPEKEVDFGPFDGLLGGLGGQMIQLPRLRGPWLVYLREGARVLTRPKFIEGDPVQDVPQHRLGRAMAQPLLQAREDLVRLAEELAAELMSPEANQTIRAVMDLAQSLNGLPPQTFEIFSKFEIAGPLAPLLLYRCEEQHLSTILELFDGLCSSWSLLPIKAWDTAFQAQGNYLVSRLDDPQWALANITERQNEIAARAPQLAPLICRDFSPLSWEELRNHFTSHTSEGINMDAGGFNPFRPAYSELLPRENFVEALMRVFDAPFAAALSASGRASLEKEQVLTVKDVERRHPDYFAKAFGYALSELKNGRQ

SEQ ID NO: 26505 - protein, 2108 aa, Pantoea dispersa
MNVQQLHYAPLLNQLHQRAVRSVVSQLALRSKSLSQYLESQYFQPPGLGGSLLADPVFESTFGWMPADETMEDLRDKLISSPLVDALSNAPVPFRHQLTAWRTILEDKQSLLVSSGTGSGKTECFMVPVLEDLIRQQNLTRQSLTGTQAIFLYPLNALINSQQERLREWTRGFKGKIRFALYNGETRHTKYEVQEDQLKVPEQALSREAIYEAPPSIMVTNTTMLEYMLIRRKDAPVIEKSQGMLKYIVLDEAHSYIGSQAAELALLLRRVMQAFNVGPGTDKPVQIIATSATIGEDSPEGNKELAKFVADLAGVTERDVKVVRGYRQIPPISESLIRHEYPTSLASLNSLSSQELYQQLCHYRVAQQLRQALTRPGRLAVRLSELLNVARRTWPDINHRELLQLLDLMAKSREGEYKFSLAFTPLRMHGFIRTLAGLWACSNKQCAHKASELGVSDWPFGQVWFEQRQYCDCGAPVFEILRCSGCGSAYLSAKEEVRGDGTSWLVAQPAAAEEDEFALDLDVYSEDEDNNELENNSQFDRLIASDGEKYIISLEEATAGKIDREAQKHYEINLLRPESRGEGRNNSFACVCCGDTQRKNNPLFLPLRLGAPFFLNEIIPTLLEFSPLPQTREEQLGPFNGRRLLTFTDSRQGTARISARLQQDADKATLRTLCYQELANINEPSVKLSPAHCALLESFITQFSIPPLKNSIDALRKAMVSNEKLSPADVQALRIIEPMVSSLSQEHAEAMQILLVNSGNQQKKTMSWQTLSEQLVGSVDLADRMRGSFKDLSGLELTKQQFADFCLYSEFGRRPKNAWTLESLGLVAIHYPFIDKVTTCPQDWKTLLPDPDKQLPEWRNLLKITLDFFIRENSAVFYENEEYPRWMGARFPVKMLQGPDKKYKGQKRDQLWPQIRDRHYNRVIKLLIAVFPAIQPEQAHWKALVNYLMNEVWEAIRPCLRQFESGYQLDIKQQAEFYSPKQVWRCPYTRRALDVTLLGYSPYLPGSKEIAPEKAVLIEMPELPARHWRLSGGGEMAREERLHWLECNERIQHAREEGVWSTRSDRLALKDSWYRLEEHSAQRTPEKNQFNEKQFKAGKVNVLNCSTTMEMGVDIGGMSLVAMNNVPPAPANYLQRAGRAGRRGESASAAITLCKNTAHGMEVFKDPLWAFNTVASAPRVRFGSSSIVQRHVNALVLGAFLRAEVPDATKLSCKWFFEGDESQCLRFLHWLNHQADQLADKLKRLTQGTVLMSLTPPQLLTRTQTMMQLVDTRWRSQLAILLENIEALKADNSAWEETPAGKAITYQLRDYRGAYLFSKLISEAFLPGHGFPVGVVNFNYLTADELERRRAIKATQADPNEGGENFSRRIEKLPSRDLPTALREYAPGADVVLGGKVYRSSGIMLGKVLASGQELSGDHHIPWFWHCRKCGAGATSATRPVECCHCKADIQQLDVKRYLQPVGFATDIRYQAHNDVSMPAQLPWKDPRVLVPSSVWVSLPDAGLGRYRFSHSGELFHFSEGEFGHGYAICLSCGRAESQTQPQRTPENLKNPEKENTHYLLRGGSNDRQGNNKLCHGHVHKDLWLGYSSRTDMVELQLSDDSGLLIRDDVAARSLAVALREGLAHKLGIENTELGVTTQQARDIDGFTGYSIFIYDNNAGGAGYAVQLIDNWSDVFNYARKLLDCSCDKFCHHCLLSYDSQHYVGKLDRHQALTLLTNLRLQRLNLAPEYQYFGESSRVETNPLSLRIAQCLNSDVYDSCSLVLAGSQEQWSFAQWPLFKELLQFASSGGNVELLIATQLENLADSTRHQLSALAAIPGECLQVKSIDTAQLVQGNGHLLAQVTREGQTQQWAAADSATVSPGELWGQSSASPVVTIKGASRKTFSGQTLSAEDLLPALPAGAVRINLSQQLDGQVEGFGSRFWALIAQQHAGWKKVFTNGREITHVHYSDRYLNSPFTVRLLGEILTELVEQGLAERAELTVSVKKLEYSSRQHDSLYNAWLDEQDRQQVMTTLLEEGYLGPAWSGKISWLAGDNQNTDHGRELTVTFSDGSEHYVLLDMGLSYWRCTGDTFFDFSGRIPNQVERLATCRALVIAPDNGLKSYIIAG

SEQ ID NO: 26506 - protein, 978 aa, Pantoea dispersa
MIENESGYLITYFKRVYQALRGQSSRRPAEIIAQELGDTIPATMQNELVYEIAGEFCETLHTLLNEHPTHGQDPVSSLRKQYPDWHLQLPLVLPEENASEIVRRLLSQSSEPRISSNVLVERIWVDVDDSWYCDARFRFPATMRTEQLISLFESNIQPEQTRLIISAKWRNGGARLAMLSRYEQQDWRVELLPFAMQKLSGADAMTEISLSLHEGPILLGHVIPKGGYELTEDLPWVFEAMNESESQLKLVGMGSVSSRQNSLFISLPTNSHLDISGEGEFDIPRLLKNSERSLTKISGVFSVVLHDGAVCTIRTQQLYDSAIEYYIKPTEIDLVKSDYPVHRAWPKIGWKKDMQHGIVPENELFWRSIRSGNNSWFSVASVMPKGQIEVRRIVNGEVLFSGKVVILPADFDIQIIPETAQQGVIVLSGITDARVDKYSNNEKVTLKSDYLQNECVIDCNSSQMLESTINLRVSWKDGSNLKLLLPKPVSGGRFVSNDGSVHFDGVASIAHLHGVDAELLTISCAGKGYLNIELLDENPMSEKFHYLHADIPLLSGRNEKLQQISLYENYNLLNAMLVCAWKNDSTLRVDFYSDRFGKDKTTLNIKRYDGRFIEGDERLLVDIKDSIVFPYHKIDDMVVEAISLNTPDLCTVLLKKDESGYDFSTLNNQGGPWLIVGKIDGAIRIAPVIKWMLPTLQTGDLFLNAICNASPEQRKEYCNALFLEMKNNPLQNTCYLLVEYIKKYKLNNSLPLLELDLFREISSNYYVVVQLLISSCLSGDSDAIYDIQEELPFSWGWIPVSIWKDVFEQCWYSLEKQINDKAFALNILQPFIAFINHQAHIDRRLVPIANMLLTHSEILPAGCTVLPSVSREQFNDAKQMLLRNPDSFGRVSIFSKELWDSAITPDLKSVFNKFWIENTYHTRFEKRFNLMLVAALLSQRNNKLMHQLTALFEFHYQQAPQQLGVIYQYYFEQAGVCH

SEQ ID NO: 26507 - protein, 2108 aa, Pantoea dispersa; identical to SEQ ID NO: 26505

SEQ ID NO: 26508 - protein, 978 aa, Pantoea dispersa; identical to SEQ ID NO: 26506

SEQ ID NO: 26509 - protein, 2109 aa, Pantoea sp. aB
MKVQQLHYAPLLNQLHQRAVRSVVSQLALRSKSLTEYLESQYFRAPGLQGSLLADPVFESTFGWMPASETMDGLRDKIISNHLVNALSHAPVPFSHQLTAWRTILEDKQSLLVSSGTGSGKTECFMVPVLEDLIRQQEAHRQPLIGTQAIFLYPLNALINSQQERLRDWTKGFKGKIRFALYNGETKHTKYEVQEEQKKVPEQALSREEIYESPPSIMVTNTTMLEYMLIRRKDAPIVDKSQGILKYIVLDEAHSYIGSQAAELALLLRRVMQAFNVGPGTDNPVQVIATSATIGEDSVEGNQELAKFVADLAGVTERNVKVVRGYRQIPPISDTHIRAEFPLSLTSLNNLTPKELYQQLCQYRVTQELRRALTQQKNPAVRLSELLVTARHIWPEISNRELLQLLDLMAKARVDTSDNSLAFTPLRMHGFIRTLAGLWACSNRQCDHKSPELQNKDWSFGQIWSEQRLFCDCGAPVFEVLRCSGCGTAYLSAKEELKNDGTTWLSAQPTVADEDEFALEIDLYRDDEDEDSEESGHQFDRLLADTGEKTFVSLEENSQGKIVSNSAVGYEVNLLRPENRDAGKSTFFTCICCGDAERKNNPLFRPLRLGAPFFLSDIIPTLLEFSPLPKNLEEQQGPFNGRRLLTFTDSRQGTARISARLQQDADKSTLRTLCYQELANITERSAGLSDEQKELLKPYISQFSVVPIFKSAVEALSKVITSHEVLSPNEILALNTITAAISSQSEAHAQAMEALLSGSGGQKVKSVSWQTLVEQLSGSVDLADRMRGSFKEISGLDLTKQQFADFCLYSEFGRRPKNAWTLENLGLVAIHYPFIDDVNRCPQDWKSLLPDPDKQLAEWRNLLKITLDFFIRENSAVFYENEQYPRWMGARFPVKMLQGPDKKYKEQKRDQLWPQIRDRHYNRVIKLLVAVFPAIQPDQTYWKDLVNNLMKEAWDAIRPNLRQFESGYQFDIKEQAYFYSPKEIWRCPYTRRALDVTLLGYSPYLPGSEGIAPEKAVLVEMPELPMRHWRLSGGGELPRDERLQWLEDDPQIKSARREGVWSTRSDRLALKDGWYRLEEHSAQRTPQQNQFNEKLFKAGKVNVLNCSTTMEMGVDIGGMSLVAMNNVPPAPANYLQRAGRAGRRGESASAAITLCKNTAHGMEVFKDPLWPFNSSSKAPQVRFESESIVQRHVNALVLGLFLRAEVPDATKLSCKWFFEGEDSQCQRFLNWMNGQSEVLANKLKRLVQGTILTSLTASQLLSRTNTMMKKAELHWRNQLAILLQNIESLKADNIAWEETPAGKAIAYQLRDYRSAYLFSKLISEAFLPGHGFPVGVVNFNFLTADELEKRKALKASQLDQKEGTENFSRSLEKLPSRDLPTALREYAPGADVVLGGKVYRSAGIMLGKVLGSGQELKGDHHIPWFWHCRQCGAGSTSATYPAGCSHCGAEKSLLTVRRYLQPVGFATDIRYQAHNDVSMPAQLPYQDPRVLVPSAVWVSLPDTSLGRYRFSNSGELFHFSDGEFGKGYAICLSCGRTESQTEAERTPATLKKPALENTHLLLRGGSNDRQGSSKLCHGHVHKDLWLGYSSRTDMVELQLNDENGLLITDDVAARSLAVALREGLAHKLGIENTELGVTIQQSRDSNNAYGYSIFIYDNNAGGAGYAVQIIDLFSEVFNYAKKLLDCSCDKFCHHCLLSYDSQHYVSKLDRHRALPLLTSTRLQMLKLAPEYQFFGPGSRVETIPLMLRLSQHLSSGRYGTLSLVISGVTEEWDFAQWPLLKDVLRFASSGGKVELLITTALAELPEKIRHQLSALSAMPGNTLCIRPITESQLAQNKGRWLAQIIGDDHCLQWAAGNDAITIPGESWGQSATTPVVSCQVSAAKDYPGNALSPEELLPKLPAGAVRIHLSHQLDGPLEGFGARFWALISSQHPFWKRAFTEKREIAQVQYSDRYVNSPFTARLLAELLTELVEQGMAERAALSISVKKLDYSSRQHDSLFNAWLNEQDREQVVRTLLEEGYLGPAWSGNISWFIGDNRTTDHGRELTVSFKDGSEGYLLLDMGLGYWRCQGDSFFDFEEHPSRQVEIVASSRANLIAPDNGLRSYIIVG

SEQ ID NO: 26510 - protein, 1117 aa, Pantoea sp. aB
MKTPTNPLLLWLKEFLKNRTLTVTDGRALYAYRCEDIEFAKLALLLHNHVPKTYPKTFFISYSDVLFCLYAAEFIRRNHTAGHPRWDAILQSIGWQVPYLHRQKLVSEGIRYWKREVRSLGQASGYLHTLACEGGLPVRMIENESGYLINYFRRIYQALRGSQANVSAVKIAEDLSDTIPGTMQNELVYEVAGEFCWTLSKLLNESGHQGGDPIASLRKTLPNWHHQLPLVLLEENAAEIVRHLLSQKSESRVASGILIERIWIDVDDSWFCDARFRFPGMLRTEQLKALFECEIQEDQSRLIVSAQWKNGGARLAMLSRHEHQDWRVELLPAATQKISGMEALGEISLMLFDGPALIGSGIPKGGYELAEDLPWVFEAMNESESQLKLFGMGSVSSVQAALFISLPANSNLDISGEGDFDIPRLLTNSARSLTKVSGVFSVILQDGAICTIRTRQISDSSTEYFIKPSEVDLVKSDYPVHRTWPKIAWKKDLQHGIVPEPELYWRSIRSGNMTWSSVTTSIPKGQIEVRHVVNNEVLFSGRMVVLPADFDIKIVPDSAQKGIITLSGIAETRVERYTNNENYLLKTDYLAQECIVPFDGSVSKNITIDLRVTWRDGCNLKLLLPSPVAGGRFVNQEGETFSEGIASVDHLHGVSADLLTISPAGKGFLNVELKDENPLSKDLHFLSMDIPLFTGRNENLQQISLYEKYNLLKSLLACSWAKNSSLHLDFYAEKLGKVGSTLNIKRYDGKFIERGDRLHIDVQGAISFPQDRASEIILQAVSLTDPASCVMTLPKDALGYDFSSKSNSSGPWLIIGKLDNYIRVEPLLRWSDKLPVHDELLIKSLCEPEQSKRKSEINSLLSDVKNNPLQQSAYSIVEYLKKYKSSNDLPLHVHDLFNKLSKDPLALIQLLITSCLSGDSELIYDMQNELPFSWGWIPFEHWRKTFHDCYVSLATQFGDEALALNILQPFVVFISNRAAIDRRFAAIANMLQMNFKLSQSACVGITSVDREHFNEAKQMLLRTPDSFGRVGTFTKEQWLTAISPDLKSIFKKFWIEDSYQQKFEKLFNLMLVAALLSHKDNNVMHQLSSLFEIHYQQAPQQLGIIYQYYFEQAGVCH

SEQ ID NO: 26511 - protein, 2104 aa, Pectobacterium carotovorum subsp. odoriferum
MTTRYFSTLIEQSLSRSTEATLSILSITNPQLRGHLAQQMAAECGAEGSFLASPVFEQTFDWERAGIKMHELASEKTLLSKEVIASLDREDNDRYRFEAAWKPFTHQLASWKALLEQKHSIVVTSGTGSGKTECFMVPVLEDLYRELRGNGNKPLMGVRALFLYPLNALINSQRERLDAWTRSFGTGIRYCLYNGNTKEKHAAVKSEQEKKPNEVLSREKMRQEPAPILVTNGTMLEYMMVRQIDAPIIQQSKAQKSLRWIVLDEAHTYVGSQAAELALQLRRVMHAFGVTPRDVRFVATSATIAGSDAEKQLKKFLSELSGVPLEQIDVLGGKRIVPELEASLNRSVSLDLLEAIPDAGEKEVSPERYSTLTHSPEARYLREMLVGQQRAMKLDALTARLNELTRQRYTQQDVLRWIDLCSGTRPNEQDPAFLKVRAHIFQRNTQGLWACADKNCTAKHGTALEKNWPFGYVYVNQRQNCPCGSPIFELAFCNECNEPHLLAREKRGKLVQWENKGGDEFSLQGDMPEDVEPVAEKVEKEIVIKTPHIIAAEHNEAAGYTLQRLDRQTHSIGVIHNNSILLAINDIDQVCSAQSCNYRGVKGISPFRRAILGSPFYVTHIVPTVLEYCPDFTGKNEKGDGPQTLPGRGRRLITFTDSRQGTARMAVRMQQEAERNRLRGSVVEILSWYQKQQSTGDVAAADIDPQKFRELADKARKEAKEYRDMGMPGEAAEAEEKAQRFEQRLKQALGEKVSVPLVSLGWREMVGELQKTFDIKGPILRYNRYHKPEIFREHDGPVKLSEMLLFREFMRRPKRSNSLETQGLVKIGYQGLEKVQIVPDHWQEKGLSLQDWQDFLKISLDFYVRENSYIQLEDDWRQWIGSRFAPRSLRSPESDEHDEYQVKRWPQIRHGIMSQRLIKLLLLGAELNVKRTADIDVVNNWLKAAWKALSGNLGVLRSDGNRFYLPREHMTFSLVTKAYICPVTNKLLDTTFKGLTPYLPTHIDFNKLTDVQQRSYTAKAIDLPEVWHFDRSQDDYANGISKVRLKISEDPLVQQLRLQNLWTDINDRAIEGGFYYRTAEHSAQQSAERLEEYETMFKEGSINVLNCSTTMEMGVDIGGISAVVMNNVPPHPANYLQRAGRAGRSKESRAISYTLCKGNPHDQQVFSNTLWPFETTIPAPMVAMNSERLVQRHVNSLLLSEFLCHVIGETEKERTNLNSQWFFGEEHEQSICNRFKVWLERTTSLVDSALETLVKGSALHGVSPDNLRRNTLKAISFLQQRWLDIYQDLSRQEHESQPDTPYRKRLEMEIKRHCGEYLLRDLAARTFLPGYGFPTDVVTFDNFNMEDYIREKTFRSRYKSDREDNVSRYKGLPSRNLGVAIREYAPGAEIILDGRVFRSAGVSLHWHNLNADTNEPQRLDVAWRCHKCGTLGYEEGIGGQGELFCTNAACSEQITSANKRQVLQPAGFVTDAYYPVTNNIETMKFIPVVPVWVFVQAERVPLPNPLTGFMASGPNGRVFQQSMGEGGHGYALCMICGRAESMINETDAPKSMEAHYPPRPGKGDRDSKNHRMICPGSTALRTKVTLGTVAQTDVFEFILRRPQNGEYIPDGSDEGRSVAMTLAVALRRALAGVLGVSAAELGYAIRPVKLDNDQSVLAIQLYDVISGGAGFASSAPLHIEALLRGMVKQLGCSYCDTACSECLLDSQTRHDHDVLDRKAALSWVGEDFTHYIGLPEEEKLSLADAQYCPGSIEDTIRRVINEGATSLTLWLSEPFSEWDLYASEFRRAILRYQMIDNLPVTLVIPAGITDADVLGELAQFAATGMRICCNKAALTIPVIAQLQHGEGVITLATRDTQAAIPGSDWHQTQALVVRSQTFALVDLEAVDLACWSEPAGERVKDIPLSTELNGPIAQFGRRFWAELEKANEETGALLKNNQITRVYYTDRYIQNPAALVLLGSIMNQLKQRLSGHTQVAINTLFKTKEKPGFKAAHDWANEDDFQGFAEQWFTTLMDKPVDVTLNYSNRDIPHHRKLLVEFDNGKALKIRFDQGMGYWSIQFRPDSYNFMDDVEDQLYNMARSLEQAWVSNKEDRWPTDVLVEIQQQ

SEQ ID NO: 26512 - protein, 1098 aa, Pectobacterium carotovorum subsp. odoriferum
MSKSKLVSVFKCTPWLTKFLTRRSLKKADGRPLYEYHADGDEYADLKWLLREIGQPEKLKNDKGYAACFTLFCSEWYRRDYGRDCKWSWDPIHAALNINLSHSELGLVVPKGLESFWERPIRFYESERRNFLGSLFSEGGLPFRLLKETDSRFQSVFSRILNQYEQASSLGYSTSMLVQMMVEKSYLPQVFQEDTSIAFIARMAEQLISLVQLYDLSTHTEPVKELDRVHPKWRDSFPIPLDDDTGTNFLNGLLRTASVENKLRQRKSKIIECSFSWSEQKPDALHTHISLPEEMVFPLLSEPSTTRFELAVCEDGEDVVSLGSAYATLEHMQAKLRLRKSDVRFNRRRPATTLSLVARTGGVIIGIVNIAESEIPVGDVPLVFVREGDEWSLQGVASCSVRSSNVLIILPEGGALSAENAPSDFTCEAFGYPALVVEGRQDILIEGEEIYRIRAGLEQVCLPNLELQGKRLNWTTYPEEVFLGSPRVMQKIGVPTIRYKHFLSGKDIDMCELHDSMGTHFLSIRNENNETLLRRKIGILPADFQVEIKSGEQANEGLIVISTQHNCLYALKDKTLEVCRRRNGSKTEIVLKTEGVPPASVQLQVTPSLKEDSVDIVMPFPSKGCLVFDAEGLPLAKNITMTDLLGSRAFLFGKNGEPTRFTLELRLRSNSEQQAWHEWRYNAGERPLEINLYSLKEHIENLLSLGSGIDQIVDMRISGIGGTGNWQIRRYKYSLEYNPVLQLLRSNSIHNSSGKVSSPVIMLLSEPERKSIPLTSRMSEGVPVGEFELGPIVGKNGPWLVLPKPGEETAFRPCFIRGEPLPETESGTIRSLQKATQLFKPEAEINTISQVLGQMADDPAHSGWQFLNTLYGQFGYLPLATFEVWRALFQHPQALALSLFKFEMSPEYLARIEAEFPVFWEFLPVQEIKNAAAKMQAFMMNKGASVEMQTGFIQKMYQRLGTVFPTYSYEVYEWLSQASLPKSIQPGVMKGIIQGWYQELLREHGESRWPEYGGPRLSRWIQSQADPVIEISSDTHFRYAVAWLPVFAAAVASGKTTYTSVFGNDPGAVFFLRQVRDFDSRWFNALFQYCLLRNITEK

SEQ ID NO: 26513 - protein, 2104 aa, Pectobacterium wasabiae WPP163
MTTRYFSTLIEQSLSRSTEATLSILSITNPQLRKHLAQQMAAECGAEGSFLASPVFEQTFDWERAGIKMHELASEKTLLSKEVIASLDREDNDRYRFEAAWKPFTHQLASWKALLEQKHSIVVTSGTGSGKTECFMVPVLEDLYRELRGNGNKPLVGVRALFLYPLNALINSQRERLDAWTRSFGTGIRYCLYNGNTKEKHAAVKSEQEKKPNEVLSREKMREEPAPILVTNGTMLEYMMVRQIDAPIIQQSKAQKSLRWIVLDEAHTYVGSQAAELALQLRRVMHSFGVTPRDVRFVATSATIAGSDAEKQLKKFLSELSGVPLEQIDVLGGKRIVPELEASLNRSVSLDVLEAIPDAGEKEVSPERYSALTHSPEARYLREMLVGQQRAMKLDALTERLNELTRQRYTQQDVLRWIDLCSGTRPNEQDPAFLKVRAHIFQRNTQGLWACADKNCTTKHGTALEKSWPFGYVYVNQRQNCPCGSPVFELAFCNECNEPHLLAREKRGKLVQWENKGGDEFSLQDDIPDDVEPVAEKVEKEIVIKTPHIIAAEHNEAAGYTLQRLDRQTHSIGVIHNNSISLAINDIDQICSARSCSYRGVKGMSPFRRAILGSPFYVTHIVPTVLEYCPDFLGKNGKGDGPQTLPGRGRRLITFTDSRQGTARMAVRMQQEAERNRLRGSVVEILSWYQKQQSAGDVAAADIDPQKFRELADKARKEAKEYRDMGMPGEAVEAEEKAQRFEQRLKQALGEKVSVPLVSLGWREMVGELQKTFDIKGPILRYNRYHKPEIFREHDGPVKLSEMLLFREFMRRPKRSNSLETQGLVKIGYQGLEKAQIVPDHWQEKGLSLQDWQDFLKISLDFYVRENSYIQLEDDWRQWIGSRFAPRSLRSPESDEHDEYQVKRWPQIRHGIMSQRLIKLLLLGAGLNVKRTADIDVVNNWLKAAWKALSGNLGVLRSDGNRFYLPREHMTFSLVTKAYICPATNKFLDTAFKGLTPYLPTHIDFENLSDAQRLSYSAEPAMLPEVWHFDRSQNDYANGISKVRLQISEDPIVQQLRLQNLWTDINDRAIEGGFYYRTAEHSAQQSAERLEEYETMFKEGSINVLNCSTTMEMGVDIGGISAVVMNNVPPHPANYLQRAGRAGRSKESRAISYTLCKGNPHDQQVFSNTLWPFETTIPAPMVAMNSERLVQRHVNSLLLSEFLCHEIGETEKERTNLNSQWFFGEEHKQSICNRFKVWLERTISPVDSALKTLVKGTALHGVSPDNLRRNTLKAISFLQQRWLDIYRDLSRQEHESQPDTPYRKRLEMEIKRHCGEYLLRDLAARTFLPGYGFPTDVVTFDNFNMEDYIREKTFRSRYKSDREDNVSRYKGLPSRNLGVAIREYAPGAEIILDGRVFRSAGVSLHWHNLNADTNEPQRLDVAWRCHKCGTLGYEEGIGGQGELLCTNTSCSEQITSANKRQVLQPAGFVTDAYYPVTNNIETMKFIPVVPAWVFVQAERVPLPNPLTGFMASGPNGRVFQQSMGEGGHGYALCMICGRAESMINETDAPKSMESHYPPRPGKGDRDSQNHRLFCPGSTALRTKVTLGAVAQTDVFELILRRSQSGEYIPDGSDEGRSVAMTLAVALRRALAAVLGVSASELGYAIRPVKLDNDQSVLAIQLYDVISGGAGFASSAPLHIEALLRGMVKQLGCSHCDTACSECLLDSQTRHDHDVLDRKAALSWVGEDFTHYIGLPEEEKLSLADAQYCPGSIEDTIRRVINEGATSLTLWLSEPFSEWDLYASEFRRAILRYQMIDNLAVTLVIPTGITDADVLGELAQFAATGMRICCNKAALTMPVIAQLQSGKSVITLATRDTLAAIPDSDWHQTQALVVRSQTFALVDLEAVDLACWSEPAGERVKDIPLSTELNGPIAQFGRRFWAELEKANEETGALLKNNQITRVYYTDRYIQNPAALVLLGSIMNQLKPRLSVHTQVAINTLFKTKEKPGFKAAHDWANKDDFQGFAEHWFTTLMDKPVDVTLNYSKRDIPHHRKLLVEFDNGKALKIRFDQGMGYWSIQFSPDSYNFRDDVEDQLYNMARSLEQAWVSNKEDRWPTDVLVEIQQQ

SEQ ID NO: 26514 - protein, 1097 aa, Pectobacterium wasabiae WPP163
MSQSKLVSVFKCTPWLTKFLTRRSLKKADGRPLYEYHATNDEYADLKQLLRQIGQPEKLNNDKGYAACFTLFCSEWYRRDYGRDCKWSWDPIHAALNINLSHSELGLVVPKGLEDFWERPIRFYESERRNFLGSLFSEGGLPFKLLKETDSRFQSVFSRILNQYEQASSLGYSTSMLVQMMVEKSSLPQGFREDTSIEFIARMAEQLISLVQLYDLSTHAEPVKELGRVHPKWRDSFPIPLDDDTGTSFLNGLLRTASVENKPRQRKSKVIECFFSWSEQKPDALHTHISLPEEMVFPLLSEPSTTRFELAVCEDGEDVISLGSAYATLGHMQARLRLRKSDVRFQRHRPATTLSLVARAGGVIIGIVNIAESEIPVGDVPLVFVRESDEWLLQGVASCSVRSSNVLIILPEGGTLSAENAPSDFTCEAFGYPALVVEGRHDILIEGEEIYRIRAGLEQARLPGLGLQGKRLNWTTYPEEVFLGPPHVMQKMGVPAIRYRRFLSGKDIDMCELHDAMGTHFLSIRNENNETLLRRKIGILPADFQVEIKSGERANEGLIVISTQYNCLYALKDKTLEVCRRRNGSKTEIVLKAEGVPPASVQLQVTPSLMEAPVGIVMPFPSSGCLAFDAEGRPLAKNITITDLLGSRAFLFGKNGEPTRFTLELRLRSNSGQQAWHEWRYNAGERPLEVNLYSLKEHIENLLFLGSGIDQIVDMRISGIGGTGNWQIRRYKYSLEYDPALQILRSNSVHNASKVPSPVIMLLSEPERRSIPLASRMSEGVPVGEFELGSIVGKNGPWLVLPKSGEETAFRPCFIRGEPLPEAEVGTIHSLQKATRLFKPGAEVNTISLVLDRMANDPAHSGWQFLQNLYSQFSYLPLATFEVWRALFQHPQALALSLFKFEMSPEYLGRIESEFPVFWEFLPIQQIKNTAAKMKAFMASKGASAEMQSSFINKMYQRLGTVFPTYSSEIYEWLSLTTSPRSIPPSVMKDILQGWYQELLREHGESRWPEYGGPQLYRWIQSQADPVIEISSDTHFRYAVAWLPVFAAAVASGKTTYTSVFGNEPGAVFFLRQVRDFDSRWFNALFQYCLLRNITEK

SEQ ID NO: 26515 - protein, 2003 aa, Pelagibaca bermudensis HTCC2601
MKTSGYGATLSSIATRAASAIVARGNIRSDSARSMLLRRLSAIPGETDSLIAPPLYEAARIWQAAEPNMAQLAGELLRPDLVEALDAAGAEAIPKDRHPYWHQHEAWKSAAASRSYMVTSGTGSGKTECFMVPMLNDLLNCAETGAKHGVRGLILYPLNALIDSQRERLGSWIAPFDGKISYALYNGDTPETRNPHKRPGAAEIGDRKTLRKTPANLLVTNVTMLEYMLTRAQDRGILEQSQGKLRWIVLDEAHSYVGAQAAEMALLLRRVRQAFGVKPEDVRLVATSATIGEGPETTEALRRFVASLGGVDPSQVDIIMGREEPLILPEPVADGPICVHGETPEALWSGLAPHPRVQQARAMLRDGGARLLDLAKVLVPESANAVEAEHLLDAMAQARETPDRPPLAPWRLNAFERSQAGLWACVDPACGHRSPELCAEDSDWNFGQIHLFQREHCGCGAPVFEIGACSECGTPWLLAHEESGKQRILHQSDSDTEEDDFRLDVEPEDDGDDASVSAARLVGPADDSHPVHQLRHSDAVVRDVLTDEPGHSTIRLCSHDDRGCCAGAHHSRSRVAVQRFGSPFLLGNAIPQLLEAMPRPDGIQGPAPMGGRRLLSFTDSRQGTARFAAKLQQEAERGLTRAAIWHAVQSKAAGDPTKAAELRAQLDALRGNPLMASLLPALEKQLAEAEGGFAPVPWTEMLNTLAQVPDLRSFAGDVWQGRGASHPFGGLTLAREPVELAKLLLLREIFRRPKLQNNVETMGLARVCWPELERQMEESDIPAPLREAGHEAPVWIALGQAAIDMAFRNRLAVHMQQTPVDLAHWISPRQAATQVLEPGVEFDETSASRRTHKWWTAYSSAGLVQLIYRLIDGDDESATDLERCQTVLDALWATLRAKVLTRADPGCWQLDFAKSALIGMESAWQCPVTGKLLPYTLAGITPNDAASPEAMAEVTLPHLPVTSPAGLTGAERARVESWLTTDETIATLRKKGLWTDLQDRAAAFAPFLRAQEHSAQIDRESLKGYEDAFRKGRINILNCSTTMEMGVDIPNVGTVVNTNVPPAPSNYRQRIGRAGRRGEPWAMSFTFCKDKPLDWQVFRTPETLLRAEIPAPTVRLDSPVMIARHVNALLLGMFLRREGGLSIKTAIGSFFGARSFKLEDDLPNTWTEGAMADQFLAELDGGWANEPEVVEAITLLVRGTALEGKTNLPAATATAFADLAKRWRLEYERLVDGWRAAPPREPEKAFFANRARRMRSEFLMTELARRGFTPAYGFPVDVVSFDHIGGDGGKGPSRQLDIAIRDYAPGSEIVIDGLVHRSDGILPAWSNTADADSLDDLRSHWRCQTCAAFGLSREAVHECPRCGDPVLHGELLRPSGFLGRRKPHAGYEQVSFVAPDRPRVSSGDVPWLSLADPSVGRLRTSRQGHVLFTGSGQNGHGYAICLACGQAEPETGSAQDTPLSQRMAAHRPLQPIRNNPRHDGNCPGCDDTSRKIRRNVTLGNEITTDVFEWQLRDLGTTSTDRSRAMAIAAALREALAKSLGIEAEDMGIAAAPSLLEDDNRAMSVFLFDRASGGSGFAPLAQDALPVLVERARGILDCPARCASGCPECILRGDIQYDIALLDRPGALETLTGLRDRLNLPEALKLFGETTRALPQALPDWLAPRLRGGHVTELALFMHGAPSTWDLRDLAARLPRRDEARVARVVLRHKDMVKLEAPEKVDLVRFLAECGARLHGVETLPSQGGKPVLCQFLYEGQAQAVTAQTEDNAVPDGRWGRPEEGPILLGPRKPEDLGASLSAEKLAVFNEGNSIYADAGTRFDRSVGHFGREFWKMVREMRPQLSREVPLASVTYSDRYLRAPLPVRLLYEVLRTMPDRNEATTIMVRTSAQDRESRFPSRDIEDNWTEDRLRLQTMKALLPGVDVRILPRKLCPHPRSFELTWRDGRTARIHLDQGLGSWTVADHLAPRFDVEDDPKRQASALAKMTFSLRNRQTSGIETPIWVSW

SEQ ID NO: 26516 - protein, 964 aa, Pelagibaca bermudensis HTCC2601
MLADQEGSTRRLVRGLLGDIHKVGQGAPEQVLNAVTAQRIQSLPMGFRTEEFKTLLRDFCLVLLARKAEIPTTIPPEARQSWLDANRPGWKDALPLRIESAAAESLLHEAVRSENSLGRDTIASRHLVRVEDRWVPKLRIAHTAELPDWMLGLGDPRIRSLRFLPDTDLAQQAPGLVLSAYKEPGDKVWEVHRDSAGRRAEFTMPLDAPVSFRLMAEGQLKGTHVPPGCDALSDDDMPTVWSAEDLSPNGTVQSLRKLGSSAQKTKAPNLWVLVQGGAAKFEDLETVEEGRIGPAKLWRVTGKGVVITPAGRLPIITGAEEEATDSLLASGVHVPGLRDTSRSEFMQGIPVFHALTADGTGRRLTRAQMRWRPLGQKIWKNGLPAPTTCLGTHQFCWKDEGGAARAFATVRLLPENAQVALADCGDGFLECRVSGLPAGTVVSLGSEVSGVVPTHGTLTLRMGDAASAMGRIPLHIRPAEGGARAFDATLPRPGDRGYFIDAEDHILQEDIELDLGSLRGWRIVAPTDRNAELRIRLQGDHTPRQPILLGVTNETSLGTLLPRLRGLMAIGGPDSELRMRVLIGASQSQRIKLRRHLRNGDWADGGFTLGPDNGNVDPGGLEIEAANLSAPSLSARISALQPGEDPMPLLPEHPGPWMFFARDAGGLVRPPRPIQKTVAEAPVTAPHFSEEFLSCGQHPRRNDRLAAFGRALRRLIEPHGMGDLGVFEQQLDDLGDTEALSSLDSVVALSHAPDLAALLLLRAAPDTLGARLELETVSPFSWTTLPLSAWRHALQTHASSLFMQLSASGLPESDAKSFSQQAIVHRLRQLVDRRPEISGQLFSAAMDTDLLPALVKVCPPPLALNNPEKTLADCAQSAIKKHEAARQPFPLRSSHAPALFKTFFDGFRGLLDAPLIAAEHVLELLPTPPDTETAIALLYYRLHDPDYFETAMPAAIALIRSKTK

SEQ ID NO: 26517 - protein, 2065 aa, Photobacterium profundum 3TCK
MEYFESIIDQLTKRAARATLGQFGLRSKPLREFLWQAFSKAPGKDGAFLGDPVFEATFGWQPHTETMQALSGGLLEASVVNAMANPPKELKEDYQFESHWFPYAHQYEAWQHLSQNEPRSVIVSSGTGSGKTECFLVPIFNDIAKRKSKAEGVEALFLYPLNALINSQRDRLAAWTHELGSDVKFCLYNGETKENMPVAKQRSQPNQQLSRKALRDDPAQILVTNATMLEYMLVRQKDEPILAKSKGKLRWIVLDEAHTYIGSQAAELSLLLRRVMHGFDVTPDQVRFVATSATIGGKDSDDDLKAFLADVAGVDITQVYLVKGHREITQLAEFSTPHAMDIKQVRAIEDAEVRYRVLESIMPLRVLRQQLSSDDNRLSLAQICKLLSATEVPMAEKLALQWLDVCASTVGAEGQAFIPFRLHLFHRVSSGLWACSNSSCKAKSGTALDTIDWRFGMVYMSRREQCGCGSPVFEMTSCNGCGTSLLLADESVEKESGNSVLSLTKPDSSIDDFTLDIEIDDAESFDDSEPDDSESHSRICIMSEQSHDETGEYWLNNDGVLKPSSYKGAFNVHRVEGYSKSDGSGVALRCPCCQHTKIQNYDFYRHFRNGAPFMLSTVIPTLLEFCQDGKKEQLKGPWHGRRMITFTDSRQGTARFAAKSQQDAERQFLRAALFHLVADRTLKSGTLTPEQEKDLKKYKSRLAMFIEDGDDDMVEIIEEKITSLCGGAGDVTIPWSDVEHELAKEKELQYWIKDSYQRFDDTMNMVKDPILLSRLLLLREFNSRPKRQNTLETLGLIRMEYPAIKDKGNTAPAEWVSLFDDTAAGQAAWVNFLTLCLNFHVRANKAISLTEEQQRWIGAKFSAGLIIAPDSESQFRNIQSWPQVRKGAVQPRLVRLLVAAFNLDIAEKEDKTQINIILQDAWKVLQRYVLSASGDGYRLELEHQASFSLIDKKWQCPHTQKIIDTPLEQITPYLNVKGQRDEQRCRLLEAPAYPYPYGRRIEDGSVVTLNEARDWQEQPEIANLRKENAWSDISDRIVERTPYFRVAEHSAQLPASLLRDYEDKFKKGAINVLSCSTTMEMGVDIGGISVVAMNNAPPNPANYLQRAGRAGRRGETKSVALTLCKSTPHGEHIFGQTRWAFDTPIHVPNVSLSSEYIVKRHINALLLSVFLRQKNISENSLRLSCGNFFISAHENCASQAELFTNWCCTEALTIMSDGLETLLRRTVLQASTKAHLVQDAAKQMNVILQSWLKEHQLLCEQSEAVKADSNRLSTAQAAVETQIQRLEGEYLLSELARKGFLPGYGFPTDVVSLNNDNAETINRRKGLIKAAKEAKSAKNEKLEHRIDNLYSARDYPSRDLSVAIRDYAPGSEVVLDGRVYQSGGVILNWHSPASADQVNEIQSLMWAWRCQHCGASGTDRNMPSECRCCDASLKSDSYHRFIEPGSFAVDIRNKPHNDISRLVHVPFQDPWVTVEQANWEEISVNPSALFRSSHDGHVYYHSAGLSNSGYALCLECGRMEPMPDADGVTPHQVLDNHTRLRGGKGEIERESEHFCGGNERDFAIKGPIKLGHSTRTDVFELLLFNGDGTVLNNRTVARSISVLLRNELAEKLGINSDEIGCTTKPVNYKDHEAQAIVLYDSSAGGAGFAIKAPEFIVELLQRAKKKAIECNCDKACHRCLVDYSTQHALDLLNRWKVIEFLDNDFFARLSLPSEFMLFDHANRRELRPLVTALEQSLARLKSPELCIYLDSEALGDLGEWPLIDVLYSWAREGRVKVVLISRDSELSTSEQISLSWLSNHPNIELLQRTTPLKSDMTLCAEIYSGELAHCWGFLNEYDSQLITGCSAVPELKAIELNVTKHHEKIGTVQVHNELNGTVKAFGALFWTKVLQASDLLLSKMQTNKIVEVEYCDRYLAAPLPFSLCLSTVGALLGHYNGCKAKIITGRLHTSLYAPETVQDNWYCEEDREQLVESCINKTQLDITFETAPKFSLPHARTMNLTFDDGAIVTIWLDQGFGYWWVDKYDSENRFPSNLSIQQQAEHIIQGKWQLRGGQWPTAVFFSIDD

SEQ ID NO: 26518 - protein, 1124 aa, Photobacterium profundum 3TCK
MNTFRHCIADILSSRELDHVSGAPLYSYKLTDGEYLTLQTSLLDSLRSQNIECYVPSAMSSEWAGAFVMYAAEWWRKQFNGGHWSWEPIFRSLNVSDSDITAGQRNKLIAAGFRFWRRPILSNGQGRMFLGSVAVEGGLPLQLITDPNSKLSNYFEQVIKDFGKFTLSKPNAAAIAEAHDHCIAASFRTEAVYSVVGKIAEAIYQLTDQYGLDEQHDPLRFLDAVAPNWPEKLPLNIDHDIAKGLINSALGQAIAVQRRLPSTIRLVRRLTQTYNQHAYVVDEPSQADAKWKCQLSLTLRSRVNAQYIQQLFGMQVLPERFSLFAMGKKPLLLAKAFRPKNNPERYLLDVMDSDLPEDWFDCEIQLMARGDNDQTWYAPLLGGSGLDTEEPWVFTEHEGEWVLAGSGDVSCESTKALIALSPENTLPSFLSCECLFGVTEQPFARTLYQLSDSGAYQFGDAVVELGENSKLNTEFVWQGAELSYQTLPNKCFIGKPSLLALSAQGAHHDISADKLRWHHASKQQWLPFDTLPLGQSEVAFIDGGKAKKRFRLASLPQDMTIEFLPGRQINRGQIVISSSRPPMVALTQPNAGQLDFQITQTPHSVTIDLFSAQEQPPALVELELWWQEKPKAVSVTVPFPSKGVCLLDGEQQPVDSHSELLFDKINRYELYGYGLEGEIELQFSLNAYDVRGPFSRGAFFSTVLPSIDVLSTGLSLSTFRSDIQALFALSSSLDAKVKVSVVNHGQAVFTCFLSAYVHSLQPDRERSCVELVGEGMSSSINLYTVPLERPDQTPLQLVPATGLEDTERVWVFPDDEVEAGAWLVYCDNPQLGIRSLMWSKDLELLPKARNGFEAAAGIGRRAERLDAFSQAAKEMAYDFTRPEWKYVRTLLSFDHVPLTTFDLWRGVARQPEFMLALLLNASKKEIDQVWQMDKQFPLLWYSLKVATAAKVINAFYDNLLNRLGEDMEDVAQNRIQKKLSELVSYFPGLAPLSAMMQFKIGLVEQKPALVPPAYMQHVYDCRNTLSQRQVDSPWPTIFADGVMKSVISKINPQFAQLCLTSKHGFKNNVMNAPMLLALATSGQAGLTMTPEVVHAMREYRRFDPEYFDDSFALTQKMIIGLVQI

SEQ ID NO: 26519 - protein, 2105 aa, Pluralibacter gergoviae
MTTHYFSSLIEQSLSRATEATLSIVGITNPQLREHLGHLMGAECGSAGSFLASPVFQQMFGWKESDQTMRSLTQGKALLSKAVVDSLDNSGNGRYRFGADWKPFTHQLASWKALLEQKHSVVVTSGTGSGKTECFMVPVLEDLYRELHENGNKPLVGVRALFLYPLNALINSQRERLDAWTRSFGTGIRYCLYNGNTENLHASVKTEQVKRSNEVLSREKMREEPAPILVTNGTMLEYMMVRQIDAPIIQQSKAQKSLRWIVLDEAHTYVGSQAAELALQLRRVMTAFGVTPEEVRFVATSATIAGSDAVQQLKKFLSELSGIPQERIDVLDGNRVIPSLEPSRQIYRPLEEIEKIPDESDTKDVSSERFQALTHSPEARYLREMLVTQPNPLKLDEITQRLDTLTGRHHSQQEVLRWIDLCSGTQPNTKAPAFLKVRAHIFQRNTQGLWACVDKACPEKAGSALQDNWPFGYVYVNQRHNCSCGSPVYELAFCNDCNEPHLLARDKKGKLVQWDNKGGDEFSLQEDMPEERDDQVEKVAKESAYQAPIVIAAECNSVEGYIPQKLDRKTRSIGVVNNDSITLAINEIELVCSGCGYKGISGRQPFRRALLGGPFYVTNIVPTVLEYCQDFISEEGKDSIGPDSLPGRGRRLITFTDSRQGTARMAVRMQQEAERSRLRGSIVEILGWHQRKQANAIPNASADVAKMREMARLAREEAESFRSWGMPEDAKGAEARAERIEQAIQAATGGRVKTNLVSRTWTEVVNELKDKADIKGPVLQYNYYLKPEIFNANGGPLKLAEMLLFREVMRRPKRTNSLETQGLVRVGYQGLDKVHQMPPHWQDKGLTLADWQDFLKVTLDFYVRESNFIQLDDELRNWIGSRFSSKYVRNPESKEPDDNQNKRWPQIRGTNVTHRLVKLLILGAGFKTANTVTIDIVNAWLKEAWLQLSGSLSVLRPDGNRFYLPKEHLTFSLVQDAWICPVTNKILDTAFKGLTPYLPTHIAFEHLTQEQYETFTARRVTLPPIWELDRSQDDYADGLEKVRNWVEKEPVINKLRAENLWTDINDRAVEGGFYYRTAEHSAQQSSERLQSYENMFKKGQLNVLNCSTTMEMGVDIGGITAVVMNNVPPHPANYLQRAGRAGRSKESRAVSYTLCKGNPHDQQVFASPLWPFETSIPAPMVAMNSARLVQRHVNALLLSDFLCRVIGETDKEKTSLDSMWFFGEEEGQSRCENFKVWLERPVLEIDPALERLVKGTALHGARSDLLRDNTRGAIDRLQARWQSIYRDLLVQERESQPNTPYRKRVELEKKRHCGEYLLRDLAARTFLPGYGFPTDVVTFDNFTMEDYIREKSFKKQYKNDREDNVSRYKGLPSRNLGVAIREYAPGAELILDGRVFRSAGVSLHWHNINADTNEAQRLDCAWRCHKCGTIGYKEGMNSAGPLRCTNSTCGEQITADNRRQVLQPAGFVTDAHAPVTNNIETMKFVPVVPAWVFVKADPVPLPNPLMGYMAAGADGHVFQQSLGEGGHGYALCLTCGRAESMLNPNDAPKSMEAHYPPRPGKADRDSQNHRLICPGSTALTKNVTLGALARTDVFEVVLRRPQSGEYLPDSTEEGRTIAMTLAVALRQSLAGVLGISSAELGYAIRPVRLEDGQSVFAVQLYDIISGGAGFASSAPLHIEAALQGMVRQLGCRHCDTACSDCLLDSQTRHDHDSLDRKAALSWLGEDFAHYIGLPDEEAFSLPDARYCPGTLQDAVRRAINEGAKKLTLWMSGPINEWDLYARQFRSALLNYRTKDDVDVELVLPEHIDDPDLLHELAQFGVLGVRLCHSDQQSEIPIVAQITFADRVMTLASRSELATVPGPGWHQNDRLLVRSNACKPVAMREAALPGAAIGFAMLVKDIQIHKQLNGSLSQFGQRFWEVILSEHEEARALMENKKIARIHYTDRYLQNPVALALLAGLLKPLKASLTADAALSLDTLFKTKDRPGYLPYHDWMNPDDYEDFAGQWFTAAMGRDVALTVFDSPRKIPHHRKLMVTFDDGQTLKIRFDQGMGYWRIDFPSKWRNFNFSDDVTFQLANMAQACQQAKVLNGEENWETDVLAEVIAR

SEQ ID NO: 26520 - protein, 1104 aa, Pluralibacter gergoviae
MSQSESISVFKCTSWLNKFLNHRGLKNPDSRPLYEYHATSDEYHELKRLLCGLGKVDGLRFDKGYAACFTLFCSEWYRRDYERNCGWAWEPINESLGIALTHSQLSNIVPKGLEEYWKRPLRFYDSERRNFLGSLFSEGGLPFRVLKEADNRFKSVFSRILSQYDASQASSISVLTLTEAVVEKSQLPVVFKDETSVELISSMAEQLSSLVQTYGLSNHSEPVKELDRVNSKWRNSFPIPLDDETGTHLINGLLSTASIETKPKIRQKKTLSCQSFWSDLHPNEIQTAISLPEELVFTLSGIPPTTRFELSIYEDGEEVASLGPAYATLKGMQATVRLRRTSARFVRQKPAASLSVVARAGGMTVGSKMLEGGEIAIGEVPLTFTLQDGFWLLQGQSSCSVRDSHVLVVVPENARVTSENQGSPFTTKVMNYPVWAFEGHLDIIIEGDEAYRIRTGREQTNQHDFYFKGKRLSWECYPNETYLGLPQLTQTTHEAKAPGNKRFFSGKMLDECNAQETMGAQFISVRNEKNETLFRRKIGILPEDFQIEIKGGAHASEGTFIISTKHNCLYILDKEAFNVDRFKENGKTILKVKAQGVPPPFIQLQVKPNLSADAINLVLPFPAVGCLVFNADGKPLPDNITINDLLGSRAFLCGKNGEPKRFKLELRLRSRSGPPVWHEWTYTTGERPVEINLYSLREHIENLLSLETGIDQTVDMRISGAGSTSSWQIRRYKYRLHFDPDRQLLLADAIGNRNESAPSPVIMLLSEPERKAAPLTSRMSEGVPIGEFELSSAIEKNGPWLVIPKPGEAASFRPYFIHGEPHLQSADNNIRSLQKATQLFDPRSETNTINIVLDQMADDPAHSGWQFLRNLYEQFGYLPLATFEVWRALLNHPQALVMSLFKFEMSADYLNRIESEFPVFWEFLPINEIKKAADKFKEFLMHKGASEEMQTRVLNTRFQQLGIIFPTYANEVENWLCRGELPPTLPPVLMKSIIQGWYQALMQEHSESRWPEYGGRRLHEWILSQDDPVIEIPADTPHRYSTVWLPVFAAAVASGNTTFESVFGNKSGAVFFLRQVRDFDSRWFNSIFQYCLLRNVVKNQKEQK

SEQ ID NO: 26521 - protein, 2105 aa, Pluralibacter gergoviae
MTTHYFSSLIEQSLSRATEATLSIVGITNPQLREHLGHLMGAECGSAGSFLASPVFQQMFGWKESDQTMRSLTQGKALLSKAVVDSLDNSGNGRYRFGADWKPFTHQLASWKALLEQKHSVVVTSGTGSGKTECFMVPVLEDLYRELHENGNKPLVGVRALFLYPLNALINSQRERLDAWTRSFGTGIRYCLYNGNTENLHASVKTEQVKRPNEVLSREKMREEPAPILVTNGTMLEYMMVRQIDAPIIQQSKAQKSLRWIVLDEAHTYVGSQAAELALQLRRVMTAFGVTPEEVRFVATSATIAGSDAVQQLKKFLSELSGIPQERIDVLDGNRVIPSLETSRQIYRPLEEIEKIPDESDTKDVSSERFQALTHSPEARYLREMLVTQPNPLKLDEITQRLDTLTGRHHSQQEVLRWIDLCSGTQPNTKAPAFLKVRAHIFQRNTQGLWACVDKACPEKAGSALQDNWPFGYVYVNQRHNCSCGSPVYELAFCNDCNEPHLLARDKKGKLVQWDNKGGDEFSLQEDMPEERDDQVEKVAKESAYQAPIVIAAECNSVEGYIPQKLDRKTRSIGVVNNDSITLAINEIELVCSGCGYKGISGRQPFRRALLGGPFYVTNIVPTVLEYCQDFISEEGKDSIGPDSLPGRGRRLITFTDSRQGTARMAVRMQQEAERSRLRGSIVEILGWHQRKQANAIPNASADVAKMREMARLAREEAESFRSWGMPEDAKGAEARAERIEQAIQAATGGRVKTNLVSRTWTEVVNELKDKADIKGPVLQYNYYLKPEIFNANGGPLKLAEMLLFREVMRRPKRTNSLETQGLVRVGYQGLDKVHQMPPHWQDKGLTLADWQDFLKVTLDFYVRESNFIQLDDELRNWIGSRFSSKYVRNPESKEPDDNQNKRWPQIRGTNVTHRLVKLLILGAGFKTANTVTIDIVNAWLKEAWLQLSGSLSVLRPDGNRFYLPKEHLTFSLVQDAWICPVTNKILDTAFKGLTPYLPTHIAFEHLTQEQYETFTARRVILPPIWELDRSQDDYADGLEKVRNWVEKEPVINKLRAENLWTDINDRAVEGGFYYRTAEHSAQQSSERLQSYENMFKKGQLNVLNCSTTMEMGVDIGGITAVVMNNVPPHPANYLQRAGRAGRSKESRAVSYTLCKGNPHDQQVFASPLWPFETSIPAPMVAMNSARLVQRHVNALLLSDFLCRVIGETDKEKTSLDSMWFFGEEEGQSRCENFKVWLERPVLEIDPALERLVKGTALHGARSDLLRDNTRGAIDRLQARWQSIYRDLLVQERESQPNTPYRKRVELEKKRHCGEYLLRDLAARTFLPGYGFPTDVVTFDNFTMEDYIREKSFKKQYKNDREDNVSRYKGLPSRNLGVAIREYAPGAELILDGRVFRSAGVSLHWHNINADTNEAQRLDCAWRCHKCGTIGYKEGMNSAGPLRCTNSTCGEQITADNRRQVLQPAGFVTDAHAPVTNNIETMKFVPVVPAWVFVKADPVPLPNPLMGYMAAGADGHVFQQSLGEGGHGYALCLTCGRAESMLNPNDAPKSMEAHYPPRPGKADRDSQNHRLICPGSTALTKNVTLGALARTDVFEVVLRRPQSGEYLPDSTEEGRTIAMTLAVALRQSLAGVLGISSAELGYAIRPVRLEDGQSVFAVQLYDIISGGAGFASSAPLHIEAALQGMVRQLGCRHCDTACSDCLLDSQTRHDHDSLDRKAALSWLGEDFAHYIGLPDEEAFSLPDARYCPGTLQDAVRRAINEGAKKLTLWMSGPINEWDLYARQFRSALLNYRTKDDVDVELVLPEHIDDPDLLHELAQFGVLGVRLCHSDQQSEIPIVAQITFADRVMTLASRSELATVPGPGWHQNDRLLVRSNACKPVAMREAALPGAAIGFAMLVKDIQIHKQLNGSLSQFGQRFWEVILSEHEEARALMENKKIARIHYTDRYLQNPVALALLAGLLKPLKASLTADAALSLDTLFKTKDRPGYLPYHDWMNPDDYEDFAGQWFTAAMGRDVALTVFDSPRKIPHHRKLMVTFDDGQTLKIRFDQGMGYWRIDFPSKWRNFNFSDDVTFQLANMAQACQQAKVLNGEENWETDVLAEVIAR

SEQ ID NO: 26522 - protein, 1104 aa, Pluralibacter gergoviae
MSQSESISVFKCTSWLNKFLNHRGLKNPDSRPLYEYHATSDEYHELKRLLCGLGKVDGLRFDKGYAACFTLFCSEWYRRDYERNCGWAWEPINESLGIALTHSQLSNIVPKGLEEYWKRPLRFYDSERRNFLGSLFSEGGLPFRVLKEADNRFKSVFSRILSQYDASQASSISVLTLTEAVVEKSQLPVVFKDETSVELISSMAEQLSSLVQTYGLSNHSEPVKELDRVNSKWRNSFPIPLDDETGTHLINGLLSTASIETKPKIRQKKTLSCQSFWSDLHPNEIQTAISLPEELVFTLSGIPPTTRFELSIYEDGEEVASLGPAYATLKGMQATVRLRRTSARFVRQKPAASLSVVARAGGMTVGSKMLEGGEIAIGEVPLTFTLQDGFWLLQGQSSCSVRDSHVLVVVPENARVTSENQGSPFTTKVMNYPVWAFEGHLDIIIEGDEAYRIRTGREQTNQHDFYFKGKRLSWECYPNETYLGLPQLTQTTHEPKAPGNKRFFSGKMLDECNAQETMGAQFISVRNEKNETLFRRKIGILPEDFQIEIKGGAHASEGTFIISTKHNCLYILDKEAFNVDRFKENGKTILKVKAQGVPPPFIQLQVKPNLSADAINLVLPFPAVGCLVFNADGKPLPDNITINDLLGSRAFLCGKNGEPKRFKLELRLRSRSGPPVWHEWTYTTGERPVEINLYSLREHIENLLSLETGIDQTVDMRISGAGSTSSWQIRRYKYRLHFDPDRQLLLADAIGNRNESAPSPVIMLLSEPERKAAPLTSRMSEGVPIGEFELSSAIEKNGPWLVIPKPGEAASFRPYFIHGEPHLQSADNNIRSLQKATQLFDPRSETNTINIVLDQMADDPAHSGWQFLRNLYEQFGYLPLATFEVWRALLNHPQALVMSLFKFEMSADYLNRIESEFPVFWEFLPINEIKKAADKFKEFLMHKGASEEMQTRVLNTRFQQLGIIFPTYANEVENWLCRGELPPTLPPVLMKSIIQGWYQALMQEHSESRWPEYGGRRLHEWILSQDDPVIEIPADTPHRYSTVWLPVFAAAVASGNTTFESVFGNKSGAVFFLRQVRDFDSRWFNSIFQYCLLRNVVKNQKEQK

SEQ ID NO: 26523 - protein, 2105 aa, Pluralibacter gergoviae; identical to SEQ ID NO: 26521

SEQ ID NO: 26524 - protein, 1104 aa, Pluralibacter gergoviae; identical to SEQ ID NO: 26522

SEQ ID NO: 26525 - protein, 2024 aa, Prevotella bivia
MEYSKFYRDANRIMVNTLLSIWFKGKGKEQIYLREILTKRESLMSEPIFQTVFPWEQSTESFSDHASKLKILDEKFVKAISDECLTGEEQNFPAERRPYLHQTKGWDCMLNKHKTIVVTTGTGSGKTECFMIPVLQDLYRQRIKNPLDSGVQAIFIYPLNALMKSQQKRINAWCKALDPNITYAIYNGDTNNLEKKEPNIKENERIKKALPELVYRQQIRSTPPQIMFTNPTMLNYMLVRQEDQPIIQKSRGKLRWILLDEAHSYSGSAASELALQIRRIIDAFGETVDDVNFAVTSATIGDTSDPAIKLKLKTFVHRLTGKPIDTIEVIDGKRIIPELNKEQADRDIEDVNNMIGDSSLNLKTVEHLRRKINESNGLTTSQLTYFMPPSATIDERLKVIDKLSEAMIPTRAHFFIRSINGVYVCTNPDCNRDKAIRPSLGSMTTYQSNVCPDKDCRQPMLEVATCPQCGQVLVVGEENVVTGKDDYGKIRMKTIDKSLEQNIFGQDIEDDNLDDYGTDTISTTPDVYEGFVLAKVDDNIYVDPEHVQFTTLKNGRLKVDDKQTEDSFSFVRESGGYRCPHCGKGVSNGVSLRASSSFLSRILASTLLNATDPAKDNHDTEVTYGGRKYLSFMDNRQGSAKVAMSINQDVERNWIRTAIYHTLLNMSAPKQPTDDVRDMIKDIEHKLSVGEKVPGYLMNMYKDAVASSVVKYKSFGWGEVKRSPTLQDSQLRLLFSHLMNLSKRNFNNKGNYIDAMFLDQFGWIPKYGNSLENMGLVRLVYPTISNAHVPPCVGDKFTDKDWQDFLVICVDYFIRAGRHYFIPAELSHYLTQQIRANAVYPSDCTLTYKSKQGNVVDVKKWIPGVKLVGEKGKKQHRIILLLCAALGYSGELNQEQENTINQLLKEAWKFLTEYVLEKVDSENDGYVINLMDENKVRLQLIKQAWVCPIDNVPVTTILKGYSPRITGILANSTFAHYKVKDDAQITMPYFPFACHRKTEGDRTTDVSDEEIIAWVNNNLNNIEEKGLLSNLHESIFLYRPIFMAAEHSAQIDHSTLSKYEQAFNAGHINILSCSTTMEMGVDIGGIGEVVMNNVPPKPSNYQQRAGRAGRRNETKSMAVTFCAPTPIGTSTWNAPMSMLSHDNELPTLKFESQQLVQRHVNSLLLTDFVQQNIRTSVNVTTKLREFFDNTPSRYDAFSDYLYRIANGMDNKMNDSYIALTRGTVFENKTELKDAAVNALFKLQYIKKIYENRLSAYEMQLKDASGRQQKAIENALGNYKDSFLLGYLAENGFIPSAGMPTGLVPFTKDVYSMHNDWYKDSGSHRDITQHLSQAISMYSPGRQVVINELAYRSEGIYLKTDYNKAGRFALQRCSHCGFATIAPTSVGDECPVCHHHEMHGLKDVYGKLSPFTEVIEPAGFTVAFTSAPKRKIEDAGAAITQPLLLEMQPWRNEGTNNAKVLMRKGSEKSKILFYNYGAGTGFALCSHCGRMVTEDPTNDHPLSNHISLLDNTRCVGNERDNIRRHVLLTAEYPTDIVEMKFYDDEKQEIKDISTLYSLGTVITQELSKYLGVRDDEISFGYNQDYNSIFIFDTALGGSGYSVHLPEYKNIIFENALTALESCNCERACLKCLINRRTQWYSNYLDRHKAIEWLKMERKSRTAPKEIKAIFDDAVTMTGDFVSEISRLDSDDNIESVTVFVDPNVDEWEDDEFPLSASLFNRHFTTNLVSNKTMLDALRVSPNKIALLGTIYKRGIKTTDMIAQPYKPLMIVKLMDGSLRLYFTLEGSIAYNEHWGECENIYYTSHDIIFNTFDIELDTILSQGDDITSLIRLKDDACQISDLLSLLTKQYEEKWSAIKSFIEGKNVDVSYNEKYLNTPLGCMILANMVKAIPNVLRVRLGSVKCYFPKRLNNSNNWGNKLMDNFYDAAERNDYLTACIDQLVNKNVQITMLEKQPHFRWIDLKGPDFTLSIYPDGGIANGWKLRYNDSQKKYDDVNYHENLMLFNVNTHVGIQYIIDFHKSNDIG

SEQ ID NO: 26526 - protein, 1044 aa, Prevotella bivia
MEYTTLAQIMVRNGGKIKFPLWKLHVQEQEYLDLKDTLSAAYIRGNLEMYTREAAIFYAEWWRREYNGGTPSKERVARAAGIDDPELLFKQAKQAMHGWKCKVYGVNRHMYFYSLLLQGGLPMKQIQSSWGNYTNFLERAMMELITRGVSNWEDTSIFETLDCVKYLPKSFQNECIYNVSMQVVRSIVEDKSDILPYDIKEERFKKLNTSLQKIYSHRRKANPMAFSWSLKISNEKAHLLYSLNAQNSLRSDVLSIAPSVYRFEIHVSGKFVARYARVEHNEDYSLYTCVSKDSVVIEWLGEQLVPVKLLLDNGEERLITVSNCYAPDFSTPQTFIKNGDDYVQHGTSDTDNIIIFDDNWSIIDGQTKRRITLLDKEYFYVVFNDTIRLQNMQGEIMTYDNVFSTYHAEYRYNIASWCLNSTENFLTSVPLINVFNENGENCTHNVEKCYRTRGTGCGWQPLKELEGSIPQSIQIRVKYPDGKEDIRSFFYLGDVKYITSDATLYDADIKWENSNNIRISCLDLEGVDVTSNGNNSFHLHRTEDNNVFPSVCTFVIFAPACSPTKLVISSPFKGLAVLDSEGKEVANGAMLCTQNLYNYKVFAQGIGDITIKLSYISDDIEDTKSLEIHRPSNGIMSLSDINDLLDRLFMLYERRAFNRSSFVMVTIKGSYGSYKKSFRIRHYSLDTKMLCPDSCVVMDIDDNPDDEIFTRPQNYSGRLLACIVGQRSNAWEVLPLRETTDSTKFEFPDPDIANQFIVFSDKNDRDRVIPRYYNLEIPDLTVAQRIATRRARLKEYENILESASLSSEKWDEVFQCYKVVTENNLVFSTFDCFISIAKSPKLIAKFVLGLCYNGYSDNSISDFNRYAGELAFALHWIRPEIWKGVLQFINTLGELEQKYLRNDVFKFMTDVFKTELYQGQANEFSLFLMSNKIKARGTFYLSDLREYKASIHGVSDTGQDLPTTKIVLSKYIFPEFSKDTLPWQKVAMLCPVKIAELLTENIDDVNFWGDENEELRRVINFYRIYATKTYSRILIKALSIYINL

SEQ ID NO: 26527 - protein, 2027 aa, Prevotella sp. C561
MKFENFYKESEENMRLALLSLWTPGNHPMRAAVNELFDREPLLSEPVFQSTFGWEPAPDDSWKNALNPTIISKLGIGVKYPPYKHQAESWKSLAEGKSIVVTSGTGSGKTECFMYPILSDLYEQGHTNAIEAIFLYPLNALMEDQKKRLSEYCKATGLHFALYNGYTPEHRADGRDEILPNEIVTRDDIRDPNNQGTRPEILLTNPSMLEYILVRQKDQQMLQESANRLRWIVIDEAHSYSGSAAVELAYQIKRVLEAFGRTPEQVRFACTSATIGGDEGSQSLSDFISTVTGQSVERIKVIGGQRLVRPLDKDQLAVELKANNLPSVDNVLSLRDKINKVSGMTLQQMWEHLCPDTTFDRADLIPALQLLDRLCEMSQGKTPVLSLRAHYFMRSINGLYACANENCDSANPASPIYGHLTTYKASVCPKCGVPLLEIVQCKRCGSFVLMGCSDSQTHKISPCEDTANRDDYFSIDLTSEQEEEDEMASSGSPDIFFLMPYEKEKFFTPVAKAHSVTMNIVHNSTGAILDVHADSKGTWVEVRKDDGHSYCPGCGKLAHGKRLNLKHFRIPINFINQTISPVFLRECAHEGNSWGKYIAFTDSRQGTAISAKTFNINVERNQSNKNMLERLSQIQTTSPLDTIPEPVRNTLTAEQIAMILANAPSSPDGVSLYDVSEAIYNQAMFDHISNNDGAKNKNAYKCALIRGVIGRRPAYETNAETMGFIYLDYLDLKTAKVPSVLADYADQNGITIKDQDWQDYLKLAIDYVMRLGNHIQPLADDEKKYVRESNLSTPIAASDDQREKIKRWPSVKIVEGGKVFEHQSRLVVLLCAGLGIHTVEKLQANVRIVDAIITEAWNTLIEKKVFTKVKADDTDGYNNPRFYPDNKYVDCYFLDLSGKEGNNVCKVKRLQDAWVCPVSHQLLDTTFCGYSPLITGRICERLFVKYKCNESKITMPSRPKDNEEVVNWQENDENIKALKAAGLWTDRHKYAYHKTPIYIAAEHSAQQSKQLLRDYTRSFSQKTPLINVLHCSTTMEMGVDIGDIDVVLMDTVPPTAANYLQRVGRAGRMGQSKAIAFSLCNNTPVGQHAFANPMWALQTTNHMIKVRPSQTVIQRHINSFFFRQFICDNGSGIQVTVSIDEFMTSTCNTFIQFLDDMSTNQAEECKFKKVFGKNIAYTINVTKETIQAIQKEYNTVIGELNAAFVQFQNDTRRQIAISNQIRKTKSEGLLNYLSDHQFIPNANMPTGVVTFDFTDRDQSVKLHRLYDNVDKLQNRIAAESDSIEKFNLQNELNKVRKEITNLRRATTASRDIHTALDEYAPEQTVVVNEKNYVSAGIKLLGAYNEETQTKAIYHCIHCGKTEYKRILQKGALCSCGNPYHSIIDKDHGSFTLAYEPIGFCTDQNVDSSREEKTVKHYYDIRPVLLKTDWSKHKDINMCELITSGETGNILFYNVGNGHGFAFCKRCGRASVEYTAITSKESVPYAVKPGHKRLWGDGCEANDNDIARHVVLTGNHPTCYTVLRFKKDAVSSKFENDEQLVYSLGVVLKRALALSEGIDEGEVDFGIKQELDAWVLFIFDTAKGGCGYSLKLMNPVLCQEIFDLARQALEETTCNCHIEGGACARCLIDRNNYRYSYLLSKAKALDWLNHQKNKAIEVPAHVKASSPSARVVCQPLKDIVKLSVTDPEVKKITLCISDLTDDNVVTDWSSVRSEMGKHIKTGVSNGKNISLVVEYHPELHNSLTEKLPFINLKDKFPDCEVSIVKDLGEMKTAVIVERNTGVLRYFTDKDSVLSFSNNWGKNCHYVFVDNNRVTFNEQKEPTYVMSPSQVVREGLTHARTFQIKNYFSTAIAPFLLNQQDTDMLVEVLKGKHVNITFSDMYVNSALASLMLVYLIKEMKQLFGYTIDSITLQLDSPKRKCYNDRYNEWTPINMNFSCKEDADEYTDNLFMNVLGIEPEHSFNDANHHRWLKIETKDGGLVEIRPDHGISGGYKSDSKYLNLDSLNGSVNVVRNNEDVLYYVIIKKSDA

SEQ ID NO: 26528 - protein, 292 aa, Prevotella sp. C561
MGYFETILTAHNLEKCPEYLWQIRVTAEEYANLKQLLARQIHIYNRNCSNRFITVRKECVLYIAEFWRREYHEGPHSVQMILDSLGIYVTLELRDEFYESAQRGLKALDLELFEGNGGRRYLDSMLYQGGLPMKLVTGSENGGVWDRFTRGLVNRKVDFEELNLGIVASQSKCLKDYCNQLIIGVESAQFMLMPFYCQNEQDVWYIYLQELAKQEKIRHRQIHPYSLGWEFRIDTVEKKIYSKYVVEGYQNLPEAFLIENRLAHVPFFLFKSERTGKQLTHSIMLKTSVAIR

SEQ ID NO: 26529 - protein, 2094 aa, Proteus mirabilis
MTRYFSSLVEQAISRTKESTLSILGVTNPNLRNHLSEIMSSDCGQESAFLAPPVFEHTFGWEFADPKMSDLAGNLLSEAVVAALDSKKNGRYRFGADFQPFRHQLRSWEHLLNEHKSLVVTSGTGSGKTECFMVPIINDLHREYEDKGEPLVGVRALFLYPLNALINSQKERLDAWTKHFDDGIRYCLYNGNTENSKNKMRGKQKDRPNEVLSRELMREAPAPILVTNGTMLEYMMVRQIDAPIIQRSREEKSLRWIVLDEAHTYVGSQAAELALQLRRVLQAFDVEAKDVRFVATSATIADEDAEKQLKNYLAHLAGVEPNQIEVVGGKRSVPDLPECPSNNYSIEELLSIEPDGEPTTGKTKQMPDVSKRRFEALCGNTTALALRNTLVEAKKPLDLNDINSQLSIRLNRALFTQQQLLEWLDIASGTKATGSGEAFLKLRAHFFQRMTQGLWACIDASCGCKKNTPLEDNWPFGFVYATQRQQCDCGAPVLELTFCQDCNEPHLLGKVSRKNQLRQWNASAGDEFSLLNETSSDDDDYENQDCETTNSPYVFSRPFADKNGYSDVHVGKSGVYGALEGERIGLSQYFRGEENGVRMGEHRCVECGFEGYRGAMPFRRAMLGSPFYVANAVPTLLEYCPDIDVDKDTKLGPQSLPGRGRRLITFTDSRQGTARMAVRMQQEAERSKLRGLVFDILRDAQLSQPIPELPPSNTSPEELLALADNLRKFGQSDMASQLEQQARALQNGGITLPIVDVTWSEMVSRLSKKTDVTGSMLEYGKYLSPETFKQSDGPLKLAEMLLFREFSRRPKRQNSCETQGLIKVGYSGLKAIKRVPEKWEQHGLTLQDWLDFLKVALDFYIRENTFMLLEEDWRKWIGNRFSAKRLRNPDSEEQDENSVKKWPLASRNSMNRLVKLLALGSGVDKDSVIGIDLIDSWLRAAWGDLTSKNVGVLKNDGNKFFLNREQLTFSFTDKVYVCSRTHKLLDTTFKGLTPYLPVKLGNDDYTCVAVDYPQIWEFGDDQADFGKGLLLTRKQVSEDPKVQALREQNLWTDINDRVVEGGFYYRTAEHSAQQSAERLEKYEEMFKSGKINVLNCSTTMEMGVDIGGISAVVMNNVPPHPANYLQRAGRAGRSKESRAISYTLCKGNPHDQQAFNNPKWPFETSIPAPYVAFNSSRLVQRHVNSMLLSVFLREQVGNTKTERTSLNLEWFYLASGESISVSDRFITWLKTGAIALDKELQTLVAGTVLASSSATSLLEQASLMMQTLSKRWLEDYKRLESEQARAEEGSPFAFRLKQELNRLCKEYLLRELAAKSFLPGYGFPTDVVTFNNTNIEDFKRDKLEGKKKEDDREDNVSRARGLPSRNLAVAIREYAPGAEVVLDGRVFRSGGVALNWHNISKSDAVEAQKFDLAWRCNHCGQTGYLDGVAIEQDDIYCDNEKCGEKIDTKNQRKVLQPTGFVTDFYHSPSNDISQQAFIPVEAPWISVSGTQKNLPNPDMGYMVASPDGRVFNHTAGASGKGYALCMSCGRAESMISSGEFPKHFSPSVLHVPLQAGKLDGEDPRASCGGSTTILKDVHLGSHIKTDVFELVLKHPLRNEFIADNEDGRTVATTLAVSLRAALAELLGVAVNEMGYAVRPIILPNGEAGLALQLFDIISGGAGFASSAPKHIEALLAKTVSKLKCPKCQSVCGDCLLETDSRHDVEKLDRLAALDWLEGLDLSNTGPEVIDGGSYSPFSVAENVDHYVQRGCSKVVFLLSDSVNDWDLCHPVFKKQLASFVLNEDRVVKFILPKNIVLDEETKSELNAYRAMGVEVEEAVLSPENLVAQIVGDSGVVSFAARDADALRVPGRYWMMSSGASTISKTLALVDSVPVALELAEFNQPTQYGEAEIVSELNGKLDSFGVSFWQHLLLNNPDLKTLMQNDNIEAIQYSDRYLQSPAALLFLRQVFSSLTSVMKTSPTLTIETLFSEKEQNARFLHQDWYHKDDQRLVMTRVIEQATGIAPEVVLFENRSDIAHRRMLTLALKSGKRVVIRLDQGFGYWRLKMTGWQNKPLQYSFNAHWTEQVEILEEYVKHLEVYNSEKWSTDISFRVV

SEQ ID NO: 26530 - protein, 1012 aa, Proteus mirabilis
MGFELSPQQRSDVVQRGLKHWGRSVSRYENSQGNNYLGSVFREGGLPTKLLSDDHNGYQDAFSKIFGRYSEAKELGQHSVRQLIQSRIQRLPEALQGDDSVELFADMLDKLDSLVYQFGLDRQSVPANYLDIHCPNWRTQFPLPLEDDIGTRFLNNLLVIASNEVKKKAKKEVKLSCTHYFSWDNQSIRTEVTLPHKQLFMFTREQLSVSRIDLVLFEGQKLLANLGTGYAQFDGEQCHVVIRKTRAEVKRVDAKQRLSLVAMQSGEKLAQVSIGDSELDWGEVPVILSEEDGEWRVLGQASLSIRKKHVYILIPEEAKTETLSGELTDTPYRFCRLKVCQVTGTCLITLPGDDTYRIATGCDDPEHVGVMLESDVMTWQTKPTMIFRGLRVINHAATRVTGESLDVCLDGKSVSHLTRENFLGKQRLTIKKHSGEVLLRKQVGVLPADFDISFKSGDAPNTGVIIITTAAPKVCAIKTPGVILENIEKSEKQVALHLLAEGTPPSSVQVDITLNMLGEAITFILPFPSKGAVAFNAHGKPLAQRLTVDDLLGSRLHLFSMSGQVARYQIEASSNIKGIKQTSAPYYRWQYVVSDKPVEVSLYALKTSLLELLSLNNHLDSIVDLVISGPGKTLRFSISHYSSVMDYDRERNVVYARSNRLADTQALRPALMHLTAPEQAPIYLESLTTEGVSTGEFALPSYVTEGGPWLVVPASDSDVLFRAKFIPCMGEQTNDCDVKTLQKASRLFHPSSNPNVIADVFHQMKTDWGHSGWQYLRDTYKNYGHLPLSTFEVFKYLVRDTKALAVALFQFELNPELISRLESELPVFWQFVPLVDWRHAIQLQISMLEGMCLPAEIVDELMAKQITKLVDAIPALSDEVAIFLETGKLPQLCPSALMEILVHNEWYQDLLRQNAENNSWPTEFGADLKRWCTQSGLMPFEIKTNAWFHDGVVYLPVFAAAVVTELVPAEVSSTFRDYDLFHLRKLRDFDCAWFEPVFRCFVSYFLLNQTGN

SEQ ID NO: 26531 - protein, 2100 aa, Pseudoalteromonas sp. H103
MNVFFSTLKKQANSRAKEATLSVLGINNPNLRNHLNNKMETDEQFIHGPVFEQMFSWERNTDYTMQDLVQKGLLSQEVVDALDSKNNGRYVFDKTWSPFKHQYKAWNDLLSSNIQSRIITSGTGSGKTECFMVPVLEDLYSEVKTSKQQLEGVHAIFLYPLNALINSQQERLNAWTQHFNGDIRFCLFNGKTPEYLSSKARQIQKSRPQEVMCREGLRESPAPILVTNGTMLEYMLVRQTDAPIIEKSKGKLRWIILDEAHTYVGSQAAELALQLRRVMQAFEVKAEDIRFVATSATIAGAAAEENLKKYLASLANISVDQVDVIGGRRVVPALNSMSMENLTLEKIEQIEPQGVLPDNKKEEQDPHVSKLRYLALESSEVAVAIREMLTAHNTPPKTIYELKQALSKFDLSENNIYKWIDVCTGTKPSSNAEAFLKLRAHYFQRTLEGLWSCIDKNCEHKKHSELKNNWPFGTVYSKHKMHCDCGAPVLELTFCNECNEPHLLGVYDNQSYVQQWVNRHTDEFALTEGEREDLQISDSNDESDIISADRTSQVVVFSGHSNEEHDYYEIDVSKDGKISKESDKAVEHCEIVLAMRDLDGQECVSCGFKGKNKYANAFRRAMLGAPFYTTNAVPTILEYCPDFEPDKYSDIKQLGPNELPARGRRLITFTDSRQGTAKISVSMQQEAERSHFRGTLVRELRKHVEEKLNIDPQLLDKVKEYQSMSIETLRLVLPQIKQVKPEDAVALDTYFSFLEAGKQTKPVPMSFSWKELINVLKNDENIANSMTQENHYFAPEVFELGDATKLSEMILTREIARRPKNRNNVETQGLVKLIYPGIESIKEIPEKWAEHNFTLQDWKDYLKVCMDFFVRENTYVSVSSEISRWVGMHFYPKSLISPDSKDKDENRVKSWPLVKSGKKRQQRIVMLLAKAAKFKAINKIEEDTLNTWLRAAWIDLVKTKTLNEYAGKQYQLDLSSVEFSLLTHAYICPITNKLIDTVFSGITPYLPWNKELSDYTCELIELPSIWEFDTSSDVSNFVDDIRKNVAGDSKVKQLREQNLWTDINDRALEGGFYYTTAEHSAQQSSDNLERYEEMFKQGKKNVLNCSTTMEMGVDIGGISAVVMNNVPPHPANYLQRAGRAGRSSESRAIGFTICKNNPHDQYVFNQPLWPFITVIQAPTVTFSSEKLVQRHVNSLLLGTFLRDKIGTTKKEKLFLNLSWFYLRQDGNKAVYEQFIDWVKAGQKTLKNQLSILVQGTILSDSSEVKLCADTNLKVQELASRWLNEHSYIQTEMNGTEAESPYGYKLSNDLKRLENEYLLRDLATRGFLPGYGFPTDVVNLSVDSLTDYIRQKEQKNSRSKDKIGREDNVSLSRGMPSRNLAVAIREFAPGTELVLDGRVHKSAGISLNWQNIHVEGGKDSQKFDIAWRCDCCGQTGYEADLAKQSEIICSNSQCASNIKLKNQRRVIQPTGFVVDYYHPPTNNIANTHYVPVQQPWVIGKGAHIPLPNPELGYMVNDNAGHVFHYCSGLHGKGYGICLSCGKAESMTSTSELPPELSLQKAHRPPMPNKFQRDEKGKPECDSTGKILEGIHLGYNSTTDVFELILRNPNTSEYLAEQSIAVTIAVAIRKALVETLGISVNEVGYSTRLTLIEKSQQAYAIQLFDMVSGGAGFATSAKEHIAKILEKTIAILDCVDNCERFCHKCLLESDSRHDIDQLNRKLAFDWINKSIRDYIALPVNCQKMLGSDITVKYVASSLKEKLSELIRMKPDTLKFVFSKGSDDWDTSLAYFKSLFHSCLAEEVNIQIIIPDEKLNEGINNFLAELDKIGVKIFIADIKYPVIFQSIKGDVCTTVANADEEATRPGENWLNSNDITVQTNSFSEIKGQSLSFELIGEAGAVEIPTLRELNGPLAGFGVRLLNRLTDLDDHLKNLLSVSSLQNITYTDRYIQSPTSMMMLCELLSALAKGKEATIEVKTCFADKKGQLGYAIQHDWAYEDDYKSIFGAWLQHNCSPKAQLIITDKHKVPHRRTLTLEFDSGDKVTVTFDQGLGYWRVEVDRGLHKLDFKRDPKEQLACLCKAFERAKVTNSADWETWFTVSSVK

SEQ ID NO: 26532 - protein, 1090 aa, Pseudoalteromonas sp. H103
MHQLMRESSVQNNFLTPSQWLSQFLSSRNLDSVTGGPLFTLHVSENEYFNLKSFLKYRKPSTVTFKDRDWCACFCLFGAEWYRREYKSGWAWLGIFEQLGYELDANHRSTVVIKGLTFWKRPINKHSSDRNDYLGSVYSEGGLPFGLLASEGSRFQTLFKKLLIEFDKAKTFGQSPIPLIERQLLRMPDAFKEESTVTLLHDMVSNLYGLIDTYELDNKTNPPEYLDSMMPKWRISFPIPLDNKTGDIFLSGLLHSAAQQRKESKKREQRLKLSQWFIDSDELSFSASITVNSKLPVALKKKDLSAPIVEVLVYEGHSQIADLGIARAEVFDDNLILHMRKLNTVFRRFVNESPLKLVIMQAGRVRHIEEIPESSLPHDEMPILLKKSKDKHIVIGSGTTSKKSENLDLIISKNAKLTSENAELFVDVQRGNYRFLTFSGELSIDYSFDNHTDTYELSTKEDSFSKELLTISGEMFEFETDKGYPVFKGLPQISCDFPNTSILIGDNEVSKVNNLSNFYGRQVLRVKNGDKTLCRRKLAILPKDFDMELFAGQKSNQGSVSIHSEKAFIYKVGDNLKVQAVSIEGGKRINLIADGIPPPHFEMTIQANLISDPIDLKIPFPSRGAILFDGNGRELPFHFSVDGLLGARINLFKQPGKVSSSFEIELKAPTSASGNASYVFHYQVNKFIEEVNLFDLREKIKELLATAQSSELDEVVRMIISGPGMQTKQYTIGWFALFGIKDENLLTFEAKANIDFSGLKAELINLGNPEQKPTQLAQRISAGACIGKFELPLVSESPQLAVPEESSRVQFRPVFIPPTTSNLDHKSVKSLGKAAETFHPIYNKFAFDKVLDAMTSDIEHSGWRYFDCFLDKYSHLPMLTFEAFKALARHPKCLAVLPFATKLNVASVLQVLQTEFNIVWELIPLEMWRGGLDLYQKNLEKIGLPEMLITKYVNEKTANISNFISLPDIFLLQPNKKAMYHALINIWREELLRENADISVRWPQQYNQQLYSWVTAKFPELAIFNVPNDFQRAVMYFPLAAAVVASTDTTWEEVFSSNDVNYFLLRQLMEFDRNWFNSVYQCSLCFFISE

SEQ ID NO: 26533 - protein, 2102 aa, Pseudomonas aeruginosa
MRFFRDLIEQSLERTREATLGVLGINHPGLRHHLSQSMVNDLGDDGCFLAPPVFEHTFGWKESNVKLQDLQGKLLSASLLDTLERPHYRPDPNLPAEKRPYRFGRHQYPYTHQLQAWRALLDEQPRSAVITTGTGSGKTECFMVPILEDLVREHERSEAALVGVRALFLYPLNALINSQQERLDAWTHKYGNNIRFCLYNGKTEERADKVRKEQQQKPNQILSRELLRREPAPILMTNATMLEYMLVRQVDNPILEISRQQQSLRWIVLDEAHTYVGSQAAELSLLLRRVVQAFGRQSEQIRFVATSATIAGADAEERLKRYLADLADVPLEQVYVIGGSRVWPDLAFDSTGKDIALQTIRHIEPEVEVSPARFEVLSQSSIARRLRHAVISSAKPLDLNDLVDEVADQLQGCRRLERQQEVLDWLDTMTGTHPAEKQPPFLKLRVHLFQRMLHGLWACVDPKCSAKSSHLLDWPFGNVYVAQRARCECNAPVYELGFCEDCKTPHLLAEDRNGELHQPSPYAGDEFALNHENGGEDARAEVLASANVTSTRLIIAGLSAAHNPYFSMTLDLESQKLGAVNAVGNINLWLVTEGKEDAGKKERNFACCSFCDHSTWGTSDFLRKAYLGAPFYIANAVPTVLEFCPDPEKEDCEGRSPEELPGRGRKLITFTDSRQGTARMAVRMQQEAERSRLRGLVVEALRNAQAKQDNEQPPEPPGYQQLLDAANLLEKLNQYDEAKKIRLQAESLIPPSTPPAQIPWQDMVQTLSSTKDVEQFILRYNRYANPALFDGSEGGLTMARLLLAREFSRRPKNQNSTETLGLIKVGYQGLEKVTTTPPLWIDTRAIPSRGATSDPRSSLTLDDWRDFLKVVLDFYVRENTFIPMDNKMRRWMGSRFSPKALYSPKSDVQESSTIRKWPQIKSGTPHRLIKLLELATSLSRAMNADANKINSWLEAAWLALVNAGILEPSDTGHRLRLESLTFSLPTEGWVCPLTRRIFDTTFRGLTPYLPQKLLSQDYRCQKIQLPTLSVLMPDGSPVPKQGQIRQLVAKDPVIAQLRQESLWTDISDRTVEGGFYYRTAEHSAQQSAKRLDDYVEEFKRGDINVLNCSTTMEMGVDIGGISAVVMNNLPPHPANYLQRAGRAGRRSEARAIAYTLCKADPHNQRAFANPKWPFVTAIPAPSITLSSARIVQRHVNSLLLALFLRMHSSNDGDRTKLTLQWFFAPDDSPGQQFQAWLMASPAEFGSAVKQLVRGTSLEGRSLSSITGETRLALRDLEERWLGEYRNINHKLQAASDGPYKKALALEKQRHESEYLLRYLASSAFLPGYGFPTDVVSLKTYNVEDFLHQQRKGDASREDSIFDNKEMPSRSLNIAIREYAPGAQVVIDGRVYRSAGVSLQWHGDGQVNEAQKFDIAWRCPECGSTGVIENAYANNSGLCCSHCTTPIPPTELCTVLRPGGFVTDFYEEATNDVTSQKFIRVERPRIQLNGESIALPDQRCGFVRFGHDGSVFHHSSGEYEKGYAVCMTCGRAESMLASGEVPKDLQPDKSHRPVGGLAGSRKERDCSGETVKANLHLGYQIRTDVLEVFLRNPLTGEWLRDTPEGRLVATTLGVAIRDVIADQLGIASSEMGFGYRLDRDRETRQGRSVIQLFDEVSGGAGFVLAGLADIALLLGKALDRLQCPANCENVCSHCLASQDSRVEREELDRNLALRWLSECRLVEYLGLPDAFAGLHGARYCSVGPLRELSSAINSLDRRDQTASILLCLHGDCADWDLDHPRFREQVLAWAIAERLKVRLGIADPAQLSTEQKETLALFARLGVELIELNTAALQSPHLIAQLPSQAGVRSLYSSMSSVGVPGPDWLQGHADVVWATSKLMPTVTGSSIDSSGWHQQLQGARIVEISSQLDGPVNTLKKRLTALVYAQMPELAALIGNDQAISVSYSDRYLKTPLSLMFLTGFLELFRSDELQSLSVQTLAPSGNQPSYLLSHDWMRADDQKTILRLWLKEQFDIEPDITVMNNPRDLLHCRVITVRWASGRTSKILLDQGMGYWRGRMPYRDQMNFDFNASPHDQKELMCDKYGYVQMQQGGEWPTYVSCVID

SEQ ID NO: 26534 - protein, 1099 aa, Pseudomonas aeruginosa
MDVTAPVTSAAKAWLSEFLFNREMFKGPDGTPLYSYHVTEDEFRSLVELLRSYFKRGSVANSSAHLAACFCLFVSEQYRRAYNSSWSWSGPESLLEASFSPQQHASLTATGLAYWKRPIRLRENGRDWLGSLFAEGGLPWPLVQSESHGFGRAVRRGIKHFYRTEGNRRTTADLMADFENDLPLIFRNLEARRLLAGIVDQLMYLVEHHPLKDQQDPVSYLDQAAPGWTDAFPIPLDESNARTLLNDWLRDAGQKRKERQESLERARAFTCEHFLHGTLPQWLIRTELILPQETEFAVDPTSLSSTRLELAYYEGERLLARGPAVYGQLTEKGIKARFSNPQVTLERRKPGEPLSLRLLDNGRVVHCQYFDGSALDYHDVPLIFESRSERWQLVAVSSCSLSSGLVRLRVPQGFSTSCAGDAAKPLAEDQENGLWMEVNSDFTLVKGDDRYLVALNQADSDDSKPTLSGVFALYESTPAMVFLGWPNLELPEDYPHARDDLFEFVNGELLDRRLISHYGSVRYTLRTRSGKTLMQRRFGVLPRDFSLSLFPEVREQPARIQIKGAAQLDPHIVSNALVVEQSENSLYLRHQGDVPPSTFMIEVGQGLPTLQLHLPYPYQGARLLDQCGNPSRARELLLADLMGYRISLTSGLTQGQTFHMQLELVSAEQPHPQRTYSIRVGSAPVMLNLFSYLADMQNMLGAVDEQDAYIRLSVEAEQPLLKFDIRRYGGQLDWEGRYVFHVGGVSNKAVLDGVKAEAMLLSDPKRTPLQLIEKTSESVGTGSFEIPQAMQSRGPWLIYPADDSDIRFRPALYLMPENSLDTSAEVISLHRAAELFHPWRNPYVIDHQVAAMADDFNHSGWQYLADLKQNYHHLPLSSFETWKALSRNQEALSFAVFRLEMDESFCVRIRDELAVIWETIPLPLWVRAHRLFQDALRLTGLPEVLVNNLVSNRASVLRFIVSGFEYLGDYLSTGSRSSLIKLPPENVLPIWYQDLRRFHEANRNWPTLLGRELSNWIEGQQLPSLVKALSLAEFTDAVTYLPVFMAYVTAGRARITDLPATPAYLKFAVRLISDFDRQGWFVPAHALMVSYLLASQDEA

SEQ ID NO: 26535 - protein, 2071 aa, Pseudomonas aeruginosa
MLYQKNYFSALTGNLSTRSERAAQGLLSLGNPQLRQFLHDQLTAAPGTPGAWLADPVFEPTFGWQESSETMSSLAGGDLLHRRLAEAMAAPPKEPHDLAEEYAFPSNRHPFTHQLAAWEILNRPEPQSLVVTSGTGSGKTECFLVPVLNQLAKAIDAGEDPEGVRALFIYPLNALINSQQNRLDAWTDGFGGQIRHCLYTGALENERKTSDQQYKGQVIDRKSLRASPPQLLVTNATMLEYMLIRKDDEPILQKSAGKLRWIILDEAHTHIGSQAAEMALLLRRVMLAFQVKPQDVRFVATSATFGSDTQTIESLRTFLADIGGVDPQQVHVVQGHRDIPALLNATPDAEQDTPEAIGAIEADQEQSTLRYRRLEASPTARRLRALFMPDGQVKPQSLQGLIRESGLPSAQVLAWLDLLSGTKSAEGLSFLPLRAHLFHNVIPAIRACVDRHCSHKAGTALAHADWPFGMVYLEERTHCRCGAPLMPLVSCEECNESFLQAATKSSSSALVDPTQQQDDEFALEDETTEADDQTKDKDTVSSIQILITNRAVKNGSADFLDRATHRLTPNRPADGGIELQLFRTAKNECPCCGANIQGRSLLRPTRIGTPFTLSTVIGTLLEFCPPDPMPTGKPFQGRKLISFTDSRQGTARIAIKLQQDSERNRIRGLIYQRLLQAQPVNGLSAEDLQDLQDLQTATQLSRIEQKHLQSLLDRQAEATKGAEISWTDMANHLAGTPELQMGMLDYYNNLAPNTFGKQDSVALASMLLAREFYRRPKRANSLETLGLVQVCYPKLANVTGKPMAWPAHLDAESWRTYLKVLLDFFVRENTILNINERWQSLIGARIRPKWVVAPVLGEKPEKLQSRFVRWPAVNTVNGIQSRAILLLCKAFNWSTAAHQDQIDSILSEAWRVLTQQAKLLISSGDGYQLDLKDLSFRLPETVYQCPVSRRFIDTPFEQLSPYTPRTDREMVVKVTPYTLPRPPEALLHVPGDEGLLAIRDWLNSEPQIQQLRKDALWSDVMDRVIEGGHYFRAAEHSAQQPKSKLDSYEGLFKTGRLNLLSCSTTMEMGVDIGGISVVAMNNVPPHPANYLQRAGRAGRRREGRSLALAVCKNTPHDQSVFNNPLWPFNTPMRMPKVSLQSPDLVQRHVNAWLLSHWLKHVVAAQEIKSMTAGAFFLDGELPMSLAARFCLWCDNQAVDTETLVGQALKDITRRSILDTTPQPELFKHASRRMKEIMQAWQQEYSASHAQLLQIADKKAAAYRAMDAQLSRIAKEYLLSELADRRFLPGYGFPTDIVSFDNRCMQTLKREDGDQREDNRARYRSLASRDRITGLREYAPGAELVMDGLVYKSSGITLNWHAPASAENVKELQLFKKAWRCGQCGASDSAINPGLEINCQECGAPIERDNIREYLVPAGFAVDFFDEPHNDISRLQYVPVNAPWLNVPASWVCLANPALGQFRASQQAQLFNYTSGANQKGFAICLECGKAEPMLSYPDASAPANEQYLPAIFRQKAQHRRLRGGKSNEQGDGTNICPGSHNSWKIKQNVHLGHDSLTDALELVLRNPTSGELLNDDITAYSIAVALREAIAADLGIQTEELGCASHPIKVDGQPTRAIQVFDLRSGGYTTQAAERLNEASLWRKVIARLDSCNCSHACQNCLLSFDTRFEAERLNRHVALEWINQTWLAGLALPAELAVFGPKSQAEIATLQEAVERAITRDDNAKTVAIYFTAPAEEWDLAVARRLRHQLHSWESVGHLVQLHLLESTVSSLPRDQKEWLAKLAFNGVQICLHNSIPDLGALALNVSLQGPQGCIAWASDNTNLAAPGHTWDLAEAGARIIRGTPSDLKAERILNAADLMPAPPPGLIKIEIGNQLDGSLDNFARRFWEHLGTEANGLINDALTGKDPITELVYSDRYVCSPLVVNLLVSVIHELGRLSDADFAIRILGRQYQRGDNRSPWQYRHDWHSARERDEALRQALAYCGREGEVLSLPTLPHYRRLQLKLRSGNQLTIQFDQGLSYWEAERSEKSYQLRFDFASRELGEEIMEHIRCKVSAAGEENTQIFLSSS

SEQ ID NO: 26536 - protein, 1019 aa, Pseudomonas aeruginosa
MVIDGRRQWRLQTTIKSEGKRFIGLVAVNGGLPMRLVESAQGGLSRLLRMVTEQALEYRLQDERLRQAIEAQAELLPACYQQAPVYELLDSLVKAVLHIRKAYALQSAQDPIARLQEECPHWEELFPIALDSQAAASLIKGLVRDTVSITPQSRRPPFQIQRGLRFSSDGSIPVYELSFVMQAQARRDQVAEALGMAVDALPPHFQLLLRIGEREYLVGEALLRDEEYQLIARPLPAIHSLHNAAQLIVSRWGATLHIANLPGGEALSHDEPLIFENTYPFARLLAQGDALVKGESALAAMPARTIVYAEEGEARELHDCLADGQMLMELPAGTTRLTYKQQPFVVTISASATRHPEAYWHGNSLEALSVPGLLFRGTPRLRIEQGTGFSSYAPAHELFVRTQGKELPLAQARAPGLCRLIWRKDGQRLLNTRAVLLPDEASITYAPGATTLEGSIRLHHWPDVPVRCESEQIALERRHDGTGLTLRLKSTGSRPATTVPLCLQWPDGEQKLTLPFPGYGVTLLRNDTPLKLNQALTIEELIGCRAVLMSAQGAENWRIRLTSSGTDSRSTLSQEIRYTGIREIRLFELIPAIQQMMSCHPGLDHVVQLELIHAHQTHARLQVGRYSTRIRLHSQREMASLNDSGSDVLLEQPHAEGLILGLPLAEPEHDPVSLPLHFSEQVFTGSWLVSLPDDAVGPWLLYTSAESPLHSRATIVPPTASQLSKPLTPLREALCEGDGEERMRQLRAALRAMAADPQADDWQTLELLLDRLHHLPLASLDICQALIREPQALTMATLLLDDFSSRLAERLPCELPFEWLLIAPEHWFGTFATLRQQLAADNPRMLSVIRNDIQSKSQFLSRWQPALRFIFDQGLHHSFDLQSPDVGFFLKNPAMLTASWQSYLFDGENSAMQQMFRRNPAETHQYPGSGNTDIGAFLKTPHGQMLLRCCKLPANDFKLATVMLPFMAAFDTYAGRGQQWQADPPRLFSLRNARQFDTVWFDSVYQLGLAMAQAASMQK

SEQ ID NO: 26537 - protein, 2111 aa, Pseudomonas aeruginosa
MDKYFSGLVEQALSRATESTLSILSITDPDLREHLESLMRAECGKEGAFLAPPVFEQTFSWEESAFTMEQLASKEHLLSKEIVASLDGKANGRYRFGASWKPFTHQLASWRSLLEKKHSVVVTSGTGSGKTECFMVPVLEDLYREYRDAARQPLVGVRALFLYPLNALINSQRERLNAWTQSFGSGIRYCLYNGNTPELQANVRSEQSLKPNEILSRELMRTQPAPILVTNGTMLEYIMVRQVDAPIVRISREQKSLRWIVLDEAHTYVGSQAAELALQLRRVMTAFGVTPKDVRFVATSATIAGEDAAGQLKQFLSDLSGGPVTQIDVWGGNRVIPPLAPCQQTLVALDTLESMPPVIADDPEVHPDRYEALVHSPQARALRNLLVTTPKPLKLTEMVSQMRQEGGWSLSQDEILRWLDVCSGTRLSASEPAFLKLRAHFFQRTTHGLWACFDKCCSAKSGTALQQNWPFGYVYANQRQTCSCGSPVFELAFCNDCNEPHLLARDKNGKLIQWESSGGDEFSLQTETPVEEDAGAGGSGVLSVKTPLVLCSFENAGSAYIPVEVDKFAGSFAAVSAERVRFGVRDLDAKCSHNSCGFSGLHGASPFRRAMLGGPFYVANAVPTVLEYCQDYQEEDQTPEHGPQSLPGRGRRLITFTDSRQGTARMAVRMQQEAERSRLRGLVVEILSWHQRSQASSQVDSSRIDPSVLQQLIAKAKEEVELYRSVGIKEEVRAAEEKVTRFTAMLASATGAKVRPTLVSLAWSELSNELKQKADLKGSMLLYNKYQKPEIFRDHDGPYKLAEMLLFREFMRRPKRQNSLETQGLVKVAYVGMDKVQEVPAYWGQKGLTLDDWRDFLKVALDFHVRENSYIQVDEGWLSWIGSRFSAKSLRNPESKEADEIRVKRWPQIRNGNHSQRLIKLLLLGAGLNPANTADVDLVNAWLRAAWLQLARPGSALKADENRYYLPREHMLFSLVDRAYVCPVTNKLLDTTFKGFTPYLPAHLDFSQLTEEQRESYQAEPIELPDLWEFDRSQDDYAPGLARVRNLVANDPLVSDLRARNLWTDINDRVVEGGFYYRTAEHSAQQSSERLGSYEEMFKKGQLNVLNCSTTMEMGVDIGGISAVVMNNVPPHPANYLQRAGRAGRSKESRAITYTLCKNNPHDQQVFANPSWPFETRIPAPVVALNSERLVQRHINSLLLADFLCNVVGLTQTEKTSLNTQWFYDDEHGLSQCDRFIERLGQVVSDLDDALKDLVKGTALVGVDPAQLRRRSIDSIKPLQSRWLKSYRFLLSEEKLAKANSPYLKRLQIEKARHCNEYLLRDLAARTFLPGYGFPTDVVNFDNFTIEDYIREQDAGKKLKHDREDNVSRYKGLPSRNLSIAIREYAPGAEIVLDGRVFRSAGVSLHWHNLNADSKEAQKMDIAWRCDVCGALDYEEGLIKTDELTCSNVDCQSLIKPQNIRKVLQPSGFVTDAYESASNDIQHQKFIPVETAWVFVNANKTPLPNPAVGAMAYGADGKVFHHSSGEHGTGYALCMSCGRAESMQPDSGFPRDLSPSGEHYPPRPTKEDKDQNNKRLPCQGSGSILPSVSLGAVATTDVFELTLHHPVRGEFIADSAQGSAIAMTLAVALRAALAEILGVSASELGYATRPSKLPSGQSIRVLQLFDVISGGAGFATSAPLHVEELLRGMVKKLDCKHCETGCSECLLDSQTRHDHDKLDRKAALDWLGPDFIHHVGLTAENKLSFADGQYAPGSIESVLRRLINEGAKRITLVASGDVAEWDLLAPQFRKAIQAYVLADELTVELLVPADITDGVLVQDLQRLSDLGVNVGNAITEPGEHLVAQVFKESEVVTLASRSLVATVPGRSWHQSDELVVLSKSQPEFGWQVMDLSSAASDSFGKVAIVDISIHEELNGSLLQFGERFWELLGARDQQVADVIATAKINRLTYSDRYIQNPAVVTILGAVLKDLKSRISADAVVQVKTLFKSGRLQGRKAFDDWANQDDFEFFSRNWLSAMVGHQVELIVESSNREIPHHRRLELEFEDGRTLKVRFDQGVAYWQVRFSSHSDMWFDFDLAAQDQLMHMAWIVETARIQNSEQKWATDVLVELKS

SEQ ID NO: 26538 - protein, 1111 aa, Pseudomonas aeruginosa
MSYSVIKYSSWLGGFLQRRGLSAPDQRGLYAYHCSLEEYGELQHLLREFGGFDAALKDPAACACLVLFGSEWYRREYRSEYAWTWDPIWKTLGFNLSPGELSKVIPKGLEGYWKRPLHFYEAGHRDFLGSLFGEGGLPFQVLREGGSRFQWLFDRLLRQYDQWHLLGFNTLQQVEQQLEKASLPQVFASRTSIELIARMVDELVALVRNYGLAQADEPVVRLDALNPKWRELFPLPLDNETGSELLNGLLKTATIEGKKRRRDATGWSCRHFWHEAQPDVLKVQVSMPEEVVLRLTTQPSTTRFELAIVEDGQAIAALGPGYALVDNGVAHIRLRLREVIGKRQDCSAQLSLVAMAGGMLIATQPIEGSAVALGEVPLGFEPVNDRWQLCGQASFNTAGEELLLVLPEGGKLNMAAEGEEAIFSDMAPAFSLHTVKVQGKAQFQVESDELYRIRTGHAVGMGLGLELAGTQIDWPTKPALTFVGLPRVQWPTAAGELQQQGGDLYVAGKQPGSGLLQEVLGTQYVSVRNRSGNALLRRRVGILPTDFRVELRSGEKPGQGSILVHSRQRCLLQIVDDSLQVQQVKREDHTELRLSAKGFPPVRVRLSVTPSLMADPVEIDLPFPNSGFLAFDGTGKHLKRDLSVDDLLGARLYLFGRAGAPTRFSLELTLRGSAARNACYSWTYTVAEKPLELSLFNIREQIVDLLSLQSGIDQVVELRVFGNGQDTSYRIRRYSTEMQLDRDRQMLCAANLHDGADAIPEPVLMLLHDPMRSSIALRSRTSEGVPTGDFELPIAVERDGPWLVLPKSGSSVSFRPLFIAGGWKPLAPSDGIQSLQKAVLTFDHASPVSSFTPVLDAMAVNPMHSGWQFLRALYEGYGYLPLATFEVWKALVGHTRALAMALFKFEMEATFLGRLETEFPIFWEFLPITEIHLAAKRFAAFLKVKGVAEEAIDALIGRMFSRLGETYSAYGQSVQRFLSGKPVGPEIKVPLATFKSVLHGWYLELIRERSEAKWPEFGGKRLERWHSSQGCSVIAFRSEMDYRNAVLYLPVFAAAVACGKARFTDAFADGVEAIFFLRQVRDFDSKWFNSIYQYCLLNSVMDMQKAESVNG

SEQ ID NO: 26539 - protein, 2071 aa, Pseudomonas aeruginosa; identical to SEQ ID NO: 26535

SEQ ID NO: 26540 - protein, 1036 aa, Pseudomonas aeruginosa
MCEAAGQRKVAHEKTRSLVIDGRRQWRLQTTIKSEGKRFIGLVAVNGGLPMRLVESAQGGLSRLLRMVTEQALEYRLQDERLRQAIEAQAELLPACYQQAPVYELLDSLVKAVLHIRKAYALQSAQDPIARLQEECPHWEELFPIALDSQAAASLIKGLVRDTVSITPQSRRPPFQIQRGLRFSSDGSIPVYELSFVMQAQARRDQVAEALGMAVDALPPHFQLLLRIGEREYLVGEALLRDEEYQLIARPLPAIHSLHNAAQLIVSRWGATLHIANLPGGEALSHDEPLIFENTYPFARLLAQGDALVKGESALAAMPARTIVYAEEGEARELHDCLADGQMLMELPAGTTRLTYKQQPFVVTISASATRHPEAYWHGNSLEALSVPGLLFRGTPRLRIEQGTGFSSYAPAHELFVRTQGKELPLAQARAPGLCRLIWRKDGQRLLNTRAVLLPDEASITYAPGATTLEGSIRLHHWPDVPVRCESEQIALERRHDGTGLTLRLKSTGSRPATTVPLCLQWPDGEQKLTLPFPGYGVTLLRNDTPLKLNQALTIEELIGCRAVLMSAQGAENWRIRLTSSGTDSRSTLSQEIRYTGIREIRLFELIPAIQQMMSCHPGLDHVVQLELIHAHQTHARLQVGRYSTRIRLHSQREMASLNDSGSDVLLEQPHAEGLILGLPLAEPEHDPVSLPLHFSEQVFTGSWLVSLPDDAVGPWLLYTSAESPLHSRATIVPPTASQLSKPLTPLREALCEGDGEERMRQLRAALRAMAADPQADDWQTLELLLDRLHHLPLASLDICQALIREPQALTMATLLLDDFSSRLAERLPCELPFEWLLIAPEHWFGTFATLRQQLAADNPRMLSVIRNDIQSKSQFLSRWQPALRFIFDQGLHHSFDLQSPDVGFFLKNPAMLTASWQSYLFDGENSAMQQMFRRNPAETHQYPGSGNTDIGAFLKTPHGQMLLRCCKLPANDFKLATVMLPFMAAFDTYAGRGQQWQADPPRLFSLRNARQFDTVWFDSVYQLGLAMAQAASMQK

SEQ ID NO: 26541 - protein, 2111 aa, Pseudomonas aeruginosa
MDKYFSGLVEQALSRTTESTLSILSITDPGLREHLGSLMRAECGKEGAFLAPPLFEQTFGWEESSLTMEQLASDERLLSKEIIASLDGKANGRYRFGASWKPFTHQLASWRSLLEKKHSVVVTSGTGSGKTECFMVPVLEDLYREYHDAGRKPLVGVRALFLYPLNALINSQRERLNAWTQSFGSGIRYCLYNGNTPELQAKVRSEQSQKPNEILSRELMRSQPAPILVTNGTMLEYMMVRQVDAPIVRISREQKSLRWIVLDEAHTYVGSQAAELALQLRRVMTAFGVTPKDVRFVATSATIAGEDAAGQLKQFLSDLSGVPVAQIDVWGGNRVIPSLAPCQQTPVALDALESMPAVNANDPEVHPDRYDALVHSPQARALRNLLVTSPKPLKLTEMVSHMRQEGEWSLSQGEILRWLDVCSGTRPSASEPAFLKLRAHFFQRTTHGLWACFDKNCSAKSGTALQQSWPFGYVYANQRQTCSCGSPVFELAFCNDCNEPHLLARDKNGKLIQWESSGGDEFSLQAETPVEEDAADASAGQLSAKTPLVLCSFENTGSAYIPVEIDKFAGSFAAVSGERVRLGVRDLDAVCSRTSCGLSGLHGASPFRRAMLGGPFYVANAVPTVLEYCQDYQEEDQKPDYGPQSLPGRGRRLITFTDSRQGTARMAVRMQQEAERSRLRGLVLEILSWHQRSQTTSSADASSLDPSVLHQLIAKAKADVELYRSIGIKEEARAAEEKVARLSAMLAATTGSKIRPKLVSLAWPELANELKQKADLKGSMLLYNKYQKPEIFRDNDGPYKLAEMLLFREFMRRPRRQNSLETQGLVKVEYAGLAKVQEVPACWEQKGLTLDDWRDFLKVALDFHVRDNSYIQVDEGWLSWIGSRFSAKSLRNPESQESDEIRVKRWPQIRNGNHSQRLIKLLLLGAGLNPASTADVDLVNAWLRAAWLQLTRPGSTLKADENRYFLPREHMQFSLVDRAYVCPVTNKLLDTTFKGLTPYLPTHLDFSRLTEEQCKRYQAELVELPGLWEFDRSQDDYAPGLVRVRNLVANDPLVSDLRARNLWTDINDRAVEGGYYYRTAEHSAQQSSERLGSYEEMFKKGQLNVLNCSTTMEMGVDIGGISAVVMNNVPPHPANYLQRAGRAGRSKESRALAYTLCKNNPHDQQVFANPGWPFETKIPAPVVALNSERLVQRHVNSLLLADFLCNVVGPTQTEKTSLNTQWFYDDEHGVSQCDRFIERLGQVVSDLDDALKDLVRGTALAGVDAAQLRRRAVDAIKPLQSRWLKNYRFLLSEEKQAKASSPYLKRLQIEKTRHCNEYLLRDFAARTFLPGYGFPTDVVNFDNFTIEDYVRERDAGSALKQDREDNVSRYKGLPSRNLSIAIREYAPGAEIVLDGRVFRSAGVSLHWHNLNADSKEAQKLDIAWRCDVCGTVDYEEALVKADELTCSNVDCQALIKPQNIRKVLRPTGFVTDAYVSVSNDIQHQKFIPVEAAWVFVNASKTPLPNPAVGSMTYGADGKVFHHSSGEHGAGFALCMSCGRAESMQPDGTFPRDLSPSGDHYPPRPTKEDRDQNNKRLPCQGSGSILPSVSLGAVATTDVFELTLHHPVRGEFISDSAQGSVIAMTLAVALRAALAEILGVSASELGYATRPSKLPSGQSIRVLQLFDVISGGAGFATSAPLYVERLLREMVERLHCKHCETGCSECVLDSQTRHDHDKLDRQAALDWLGSDFIHHVGLTAENKLSFADGQYAPGSIESVLRRLINEGAERVTLLTSGDTAEWDLLAPQFRKAIQTYVLADELTVDLLVPADINDGELMQDLQRLSSLGVNVGNVITKPGEHVVAQAFIGGEVITLASRSLLATVPGCSWHQSDELVVLSRSQPGLYWKAMDLSQASSGSSGKVGIVDISIHEELNGALLQFGERFWELLGARDQQVAEVIATAKINRLTYSDRYIQNPAVVTILGAVLKNLKSRISADAVVQVKTLFKSGRMQGRKAFDDWACQDDFEFFSRKWLSAMVGCQVELIVESSNRDIPHHRRLEIEFEDGRTLKVRFDQGVAYWQVRFSSHSDMWFDFDLAAQDQLMHMARVVESARIQNSEQKWATDVLVELKV

SEQ ID NO: 26542 - protein, 1109 aa, Pseudomonas aeruginosa
MSYSVIKYSSWLGCFLQRRGLSAPDQRGLYAYHCSLEEYGELQHLLRELGGFDAALKDPAACACLVLFGSEWYRREYRSEYAWTWDPIWKALGFRLSPVDLSKAIPKGLEVYWKRPLHLYEAGHRDFLGSLFGEGGLPFQVLREGGSRFRSLFDRLLKQYDQWHLLGLNTLQQVEQQLEKASLPQVFASRTSVELIARMADELVALVRNYGLTQADEPVMHLDAMNPKWRELFPLPLDNQTGNELLNGLLKTATNEGKRRRRDGWSCQHFWHEAQADVLKVQVSMPEVVVFRLTTQPSTTRFELVIAEEGQVIADLGPGYALVDNGVAHIRLRLREVIGKRRDCSIPLSLVAMAGGMQISTLPIDSSAVALGEVPLGFEPMNDRWQLCGQASFNTASEELLLVLPDGGSLGTVGSNEEAIFSDMPPAFSRRTVKVQGKVQVLVEGEECYRIRTGHAAGMGIGLELTGAQTGWPTKPTMTFVGLPRVQWPTAAGELQQQGGDLYVAGKQPGSGLLQEMLGTQYVSVRNRTGDTLLRRRVGILPTDFRVELRSGDAPGMGSVLVYSQQRCLLQVNDESLQVQQIRHEAHTELRLSAKGFPPIRVRLSVFPSLMADPVEIDLPFPSSGCLAFDGNGKQLKRTFSVDDLLGARLFLFGRSGTPTRFGIELTLRGSVARNACYSWTYTVVNKPLEINLFNIQEQIVDLLSLQSGIDQVVEMRVYGNGQDSHYRIRKYAMEMQLDHGRQLLSAVNLHDGADAIPEPVLMLLHDPMRNSIALRSRASEGVPTGDFELPAAVERDGPWLVLPRAGSSASFRPLFVAGGWQPLASDDMIQSLQKAVLTFDHASPVSSFLPVLDAMATNPMHSGWQFLRALYEGYGYLPLATFEVWKTLVGHTRALAMALFKFEMDAKFLGRLEAEFPLFWEFLPIAEIHLAAKRFAAFLKVKGVAEEAVDSLIGRMFSKLGETYPSYGQSVQRFLSGKPVGPEIKVPLAVFKDVLHGWYLELIRERSEAQWPEFGGKRLERWYNSQSDSVIAFRSDMDYRNAVLYLPVFAAAVACGKAQFTDVFTDGVEAIFFLRRVRDFDSKWFNSIYQYCLLNSVMEMHKAESVNG

SEQ ID NO: 26543 - protein, 2071 aa, Pseudomonas aeruginosa
MLYQKNYFSALTGNLSTRSERAAQGLLSLGNPQLRQFLHDQLTAAPGTPGAWLADPVFEPTFGWQESSETMSSLAGGDLLHRRLAEAMAAPPKEPHDLAEEYAFPSNRHPFTHQLAAWEILNRPEPQSLVVTSGTGSGKTECFLVPVLNQLAKAIDAGEDPEGVRALFIYPLNALINSQQNRLDAWTDGFGGQIRHCLYTGALENERKTSDQQYKGQVIDRKSLRASPPQLLVTNATMLEYMLIRKDDEPILQKSAGKLRWIILDEAHTHIGSQAAEMALLLRRVMLAFQVKPQDVRFVATSATFGSDTQTIESLRTFLADIGGVDPQQVHVVQGHRDIPALLNATPDAEQDTPEAIGAIEADQEQSTLRYRRLEASPTARRLRALFMPDGQVKPQSLQGLIRESGLPSAQVLAWLDLLSGTKSAEGLSFLPLRAHLFHNVIPAIRACVDRHCSHKAGTALAHADWPFGMVYLEERTHCRCGAPLMPLVSCEECNESFLQAATKSSSSALVDPTQQQDDEFALEDETTEADDQTKDKDTVSSIQILITNRAVKNGSADFLDRATHRLTPNRPADGGIELQLFRTAKNECPCCGANIQGRSLLRPTRIGTPFTLSTVIGTLLEFCPPDPMPTGKPFQGRKLISFTDSRQGTARIAIKLQQDSERNRIRGLIYQRLLQAQPVNGLSAEDLQDLQDLQTATQLSRIEQKHLQSLLDRQAEATKGAEISWTDMANHLAGTPELQMGMLDYYNNLAPNTFGKQDSVALASMLLAREFYRRPKRANSLETLGLVQVCYPKLANVTGKPMAWPAHLDAESWRTYLKVLLDFFVRENTILNINERWQSLIGARIRPKWVVAPVLGEKPEKLQSRFVRWPAVNTVNGIQSRAILLLCKAFNWSTAAHQDQIDSILSEAWRVLTQQAKLLISSGDGYQLDLKDLSFRLPETVYQCPVSRRFIDTPFEQLSPYTPRTDREMVVKVTPYTLPRPPEALLHVPGDEGLLAIRDWLNSEPQIQQLRKDALWSDVMDRVIEGGHYFRAAEHSAQQPKSKLDSYEGLFKTGRLNLLSCSTTMEMGVDIGGISVVAMNNVPPHPANYLQRAGRAGRRREGRSLALAVCKNTPHDQSVFNNPLWPFNTPMRMPKVSLQSPDLVQRHVNAWLLSHWLKHVVAAQEIKSMTAGAFFLDGELPMSLAARFCLWCDNQAVDTETLVGQALKDITRRSILDTTPQPELFKHASRRMKEIMQAWQQEYSASHAQLLQIADKKAAAYRAMDAQLSRIAKEYLLSELADRRFLPGYGFPTDIVSFDNRCMQTLKREDGDQREDNRARYRSLASRDRITGLREYAPGAELVMDGLVYKSSGITLNWHAPASAENVKELQLFKKAWRCGQCGASDSAINPGLEINCQECGAPIERDNIREYLVPAGFAVDFFDEPHNDISRLQYVPVNAPWLNVPASWVCLANPALGQFRASQQAQLFNYTSGANQKGFAICLECGKAEPMLSYPDASAPANEQYLPAIFRQKAQHRRLRGGKSNEQGDGTNICPGSHNSWKIKQNVHLGHDSLTDALELVLRNPTSGELLNDDITAYSIAVALREAIAADLGIQTEELGCASHPIKVDGQPTRAIQVFDLRSGGYTTQAAERLNEASLWRKVIARLDSCNCSHACQNCLLSFDTRFEAERLNRHVALEWINQTWLAGLALPAEIAVFGPKSQAEIATLQEAVERAITRDDNAKTVAIYFTAPAEEWDLAVARRLRHQLHSWESVGHLVQLHLLESTVSSLPRDQKEWLAKLAFNGVQICLHNSIPDLGALALNVSLQGPQGCIAWASDNTNLAAPGHTWDLAEAGARIIRGTPSDLKAERILNAADLMPAPPPGLIKIEIGNQLDGSLDNFARRFWEHLGTEANGLINDALTGKDPITELVYSDRYVCSPLVVNLLVSVIHELGRLSDADFAIRILGRQYQREDNRSPWQYRHDWHSARERDEALRQALAYCGREGEVLSLPTLPHYRRLQLKLRSGNQLTIQFDQGLSYWEAERSEKSYQLRFDFASRELGEEIMERIRCKVSAAGEENTQIFLSSS

SEQ ID NO: 26544 - protein, 1036 aa, Pseudomonas aeruginosa; identical to SEQ ID NO: 26540

SEQ ID NO: 26545 - protein, 2071 aa, Pseudomonas aeruginosa
MLYQKNYFSALTGNLSTRSERAAQGLLSLGNPQLRQFLHDQLTAAPGTPGAWLADPVFEPTFGWQESSETMSSLAGGDLLHRRLAEAMAAPPKEPHDLAEEYAFPSNRHPFTHQLAAWEILNRPEPQSLVVTSGTGSGKTECFLVPVLNQLAKAIDAGEDPEGVRALFIYPLNALINSQQNRLDAWTDGFGGQIRHCLYTGALENERKTSDQQYKGQVIDRKSLRASPPQLLVTNATMLEYMLIRKDDEPILQKSAGKLRWIILDEAHTHIGSQAAEMALLLRRVMLAFQVKPQDVRFVATSATFGSDTQTIESLRTFLADIGGVDPQQVHVVQGHRDIPALLNATPDAEQDTPEAIGAIEADQEQSTLRYRRLEASPTARRLRALFMPDGQVKPQSLQGLIRESGLPSAQVLAWLDLLSGTKSAEGLSFLPLRAHLFHNVIPAIRACVDRHCSHKAGTALAHADWPFGMVYLEERTHCRCGAPLMPLVSCEECNESFLQAATKSSSSALVDPTQQQDDEFALEDETTEADDQTKDKDTVSSIQILITNRAVKNGSADFLDRATHRLTPNRPADGGIELQLFRTAKNECPCCGANIQGRSLLRPTRIGTPFTLSTVIGTLLEFCPPDPMPTGKPFQGRKLISFTDSRQGTARIAIKLQQDSERNRIRGLIYQRLLQAQPVNGLSAEDLQDLQDLQTATQLSRIEQKHLQSLLDRQAEATKGAEISWTDMANHLAGTPELQMGMLDYYNNLAPNTFGKQDSVALASMLLAREFYRRPKRANSLETLGLVQVCYPKLANVTGKPMAWPAHLDAESWRTYLKVLLDFFVRENTILNINERWQSLIGARIRPKWVVAPVLGEKPEKLQSRFVRWPAVNTVNGIQSRAILLLCKAFNWSTAAHQDQIDSILSEAWRVLTQQAKLLISSGDGYQLDLKDLSFRLPETVYQCPVSRRFIDTPFEQLSPYTPRTDREMVVKVTPYTLPRPPEALLHVPGDEGLLAIRDWLNSEPQIQQLRKDALWSDVMDRVIEGGHYFRAAEHSAQQPKSKLDSYEGLFKTGRLNLLSCSTTMEMGVDIGGISVVAMNNVPPHPANYLQRAGRAGRRREGRSLALAVCKNTPHDQSVFNNPLWPFNTPMRMPKVSLQSPDLVQRHVNAWLLSHWLKHVVAAQEIKSMTAGAFFLDGELPMSLAARFCLWCDNQAVDTETLVGQALKDITRRSILDTTPQPELFKHASRRMKEIMQAWQQEYSASHAQLLQIADKKAAAYRAMDAQLSRIAKEYLLSELADRRFLPGYGFPTDIVSFDNRCMQTLKREDGDQREDNRARYRSLASRDRITGLREYAPGAELVMDGLVYKSSGITLNWHAPASAENVKELQLFKKAWRCGQCGASDSAINPGLEINCQECGAPIERDNIREYLVPAGFAVDFFDEPHNDISRLQYVPVNAPWLNVPASWVCLANPALGQFRASQQAQLFNYTSGANQKGFAICLECGKAEPMLSYPDASAPANEQYLPAIFRQKAQHRRLRGGKSNEQGDGTNICPGSHNSWKIKQNVHLGHDSLTDALELVLRNPTSGELLNDDITAYSIAVALREAIAADLGIQTEELGCASHPIKVDGQPTRAIQVFDLRSGGYTTQAAERLNEASLWRKVIARLDSCNCSHACQNCLLSFDTRFEAERLNRHVALEWINQTWLTGLALPAELAVFGPKSQAEIATLQEAVERAITRDDNAKTVAIYFTAPAEEWDLAVARRLRHQLHSWESVGHLVQLHLLESTVSSLPRDQKEWLAKLAFNGVQICLHNSIPDLGALALNVSLQGPQGCIAWASDNTNLAAPGHTWDLAEAGARIIRGTPSDLKAERILNAADLMPAPPPGLIKIEIGNQLDGSLDNFARRFWEHLGTEANGLINDALTGKDPITELVYSDRYVCSPLVVNLLVSVIHELGRLSDADFAIRILGRQYQREDNRSPWQYRHDWHSARERDEALRQALAYCGREGEVLSLPTLPHYRRLQLKLRSGNQLTIQFDQGLSYWEAERSEKSYQLRFDFASRELGEEIMERIRCKVSAAGEENTQIFLSSS

SEQ ID NO: 26546 - protein, 1036 aa, Pseudomonas aeruginosa; identical to SEQ ID NO: 26540

SEQ ID NO: 26547 - protein, 2111 aa, Pseudomonas aeruginosa
MDKYFSGLVEQALSRATESTLSILSITDPDLREHLESLMRAECGKEGAFLAPPVFEQTFSWEESAFTMEQLASKEHLLSKEIVASLDGKANGRYRFGASWKPFTHQLASWRSLLEKKHSVVVTSGTGSGKTECFMVPVLEDLYREYRDAARQPLVGVRALFLYPLNALINSQRERLNAWTQSFGSGIRYCLYNGNTPELQANVRSEQSLKPNEILSRELMRTQPAPILVTNGTMLEYIMVRQVDAPIVRISREQKSLRWIVLDEAHTYVGSQAAELALQLRRVMTAFGVTPKDVRFVATSATIAGEDAAGQLKQFLSDLSGGPVTQIDVWGGNRVIPPLAPCQQTLVALDTLESMPPVIADDPEVHPDRYEALVHSPQARALRNLLVTTPKPLKLTEMVSQMRQEGGWSLSQDEILRWLDVCSGTRLSASEPAFLKLRAHFFQRTTHGLWACFDKCCSAKSGTALQQNWPFGYVYANQRQTCSCGSPVFELAFCNDCNEPHLLARDKNGKLIQWESSGGDEFSLQTETPVEEDAGAGGSGVLSVKTPLVLCSFENAGSAYIPVEVDKFAGSFAAVSAERVRFGVRDLNAKCSHNSCGFSGLHGASPFRRAMLGGPFYVANAVPTVLEYCQDYQEEDQTPEHGPQSLPGRGRRLITFTDSRQGTARMAVRMQQEAERSRLRGLVVEILSWHQRSQASSQVDSSRIDPSVLQQLIAKAKEEVELYRSVGIKEEVRAAEEKVTRFTAMLASATGAKVRPTLVSLAWSELSNELKQKADLKGSMLLYNKYQKPEIFRDHDGPYKLAEMLLFREFMRRPKRQNSLETQGLVKVAYVGMDKVQEVPAYWGQKGLTLDDWRDFLKVALDFHVRENSYIQVDEGWLSWIGSRFSAKSLRNPESKEADEIRVKRWPQIRNGNHSQRLIKLLLLGAGLNPANTADVDLVNAWLRAAWLQLARPGSALKADENRYYLPREHMLFSLVDRAYVCPVTNKLLDTTFKGFTPYLPAHLDFSQLTEEQRESYQAEPIELPDLWEFDRSQDDYAPGLARVRNLVANDPLVSDLRARNLWTDINDRVVEGGFYYRTAEHSAQQSSERLGSYEEMFKKGQLNVLNCSTTMEMGVDIGGISAVVMNNVPPHPANYLQRAGRAGRSKESRAITYTLCKNNPHDQQVFANPSWPFETRIPAPVVALNSERLVQRHINSLLLADFLCNVVGLTQTEKTSLNTQWFYDDEHGLSQCDRFIERLGQVVSDLDDALKDLVKGTALVGVDPAQLRRRSIDSIKPLQSRWLKSYRFLLSEEKHAKANSPYLKRLQIEKARHCNEYLLRDLAARTFLPGYGFPTDVVNFDNFTIEDYIREQDAGKKLKHDREDNVSRYKGLPSRNLSIAIREYAPGAEIVLDGRVFRSAGVSLHWHNLNADSKEAQKMDIAWRCDVCGALDYEEGLIKTDELTCSNVDCQSLIKPQNIRKVLQPSGFVTDAYESASNDIQHQKFIPVETAWVFVNANKTPLPNPAVGAMAYGADGKVFHHSSGEHGTGYALCMSCGRAESMQPDSGFPRDLSPSGEHYPPRPTKEDKDQNNKRLPCQGSGSILPSVSLGAVATTDVFELTLHHPVRGEFIADSAQGSAIAMTLAVALRAALAEILGVSASELGYATRPSKLPSGQSIRVLQLFDVISGGAGFATSAPLHVEELLRGMVKKLDCKHCETGCSECLLDSQTRHDHDKLDRKAALDWLGPDFIHHVGLTAENKLSFADGQYAPGSIESVLRRLINEGAKRITLVASGDVAEWDLLAPQFRKAIQAYVLADELTVELLVPADITDGVLVQDLQRLSDLGVNVGNAITEPGEHLVAQVFKESEVVTLASRSLVATVPGRSWHQSDELVVLSKSQPEFGWQVMDLSSAASDSFGKVAIVDISIHEELNGSLLQFGERFWELLGARDQQVADVIATAKINRLTYSDRYIQNPAVVTILGAVLKDLKSRISADAVVQVKTLFKSGRLQGRKAFDDWANQDDFEFFSRNWLSAMVGHQVELIVESSNREIPHHRRLELEFEDGRTLKVRFDQGVAYWQVRFSSHSDMWFDFDLAAQDQLMHMARIVETARIQNSEQKWATDVLVELKS

SEQ ID NO: 26548 - protein, 1111 aa, Pseudomonas aeruginosa
MSYSVIKYSSWLGRFLQRRGLSAPDQRGLYAYHCSLEEYGELQHLLREFGGFDTALKDPAACACLVLFGSEWYRREYRSEYAWTWDPIWKTLGFNLSPGELSKVIPKGLEGYWKRPLHFYEAGHRDFLGSLFGEGGLPFQVLREGGSRFQWLFDRLLRQYDQWHLLGFNTLQQVEQQLEKASLPQVFASRTSIELIARMVDELVALVRNYGLAQADEPVVRLDALNPKWRELFPLPLDNETGSELLNGLLKTATIEGKKRRRDATGWSCRHFWHEAQPDVLKVQVSMPEEVVLRLTTQPSTTRFELAIVEDGQAIAALGPGYALVDNGVAHIRLRLREVIGKRQDCSAQLSLVAMAGGMLIATQPIEGSAVALGEVPLGFEPVNDRWQLCGQASFNTAGEELLLVLPEGGKLNMAAEGEEAIFSDMAPAFSLHTVKVQGKAQFQVESDELYRIRTGHAVGMGLGLELAGTQIDWPTKPALTFVGLPRVQWPTAAGELQQQGGDLYVAGKQPGSGLLQEVLGTQYVSVRNRSGNALLRRRVGILPTDFRVELRSGEKPGQGSILVHSRQRCLLQIVDDSLQVQQVKREDHTELRLSAKGFPPVRVRLSVTPSLMADPVEIDLPFPNSGFLAFDGTGKHLKRDLSVDDLLGARLYLFGRAGAPTRFSLELTLRGSAARNACYSWTYTVAEKPLELSLFNIREQIVDLLSLQSGIDQVVELRVFGNGQDTSYRIRRYSTEMQLDRDRQMLCAANLHDGADAIPEPVLMLLHDPMRSSIALRSRTSEGVPTGDFELPIAVERDGPWLVLPKSGSSVSFRPLFIAGGWKPLAPSDGIQSLQKAVLTFDHASPVSSFTPVLDAMAVNPMHSGWQFLRALYEGYGYLPLATFEVWKALVGHTRALAMALFKFEMEATFLGRLETEFPIFWEFLPITEIHLAAKRFAAFLKVKGVAEEAIDALIGRMFSRLGETYSAYGQSVQRFLSGKPVGPEIKVPLATFKSVLHGWYLELIRERSEAKWPEFGGKRLERWHSSQGCSVIAFRSEMDYRNAVLYLPVFAAAVACGKARFTDAFADGVEAIFFLRQVRDFDSKWFNSIYQYCLLNSVMDMQKAESVNG

SEQ ID NO: 26549 - protein, 2065 aa, Pseudomonas aeruginosa
MLYQKNYFSALTDNLSTRSERAAQGLLSLGNPQLRQFLHDQLTAAPGTPGAWLADPVFEPTFGWQESAETMGSLAGGNLLHWRLADTMAHPPKKEDGEGLIDPFPKDRRLFTHQLAAWEILNRAEPQSLVVTSGTGSGKTECFLVPVLNQLAKAIDAGEDPEGVRALFIYPLNALINSQQNRLDAWTHGFGGQIRHCLYTGALENERRNRDQQYDGQVIDRKSLRASPPQLLVTNATMLEYMLIRKDDEPILQKSAGKLRWIILDEAHTHIGSQAAEIALLLRRVMLAFQVKPQDVRFVATSATFGSDTQTIESLRTFLADIGGVDPQQVHVVQGHRDIPALLNATPDAEQDTPEAIGAIEADQEQSTLRYQRLEASPTARRLRALFMPDGQVKPQSLQGLIRESGLPSAQVLAWLDLLSGTKSAEGLSFLPLRAHLFHNVIPAIRTCVDRNCSHKTGTALAHADWPFGMVYLEERTHCRCGAPLMPLVSCEECNESFLQAATTSHGMLIDQSQQQLDEFALDEEPTDTDEPAEDSALLSQTLITNRPVNHSYPEFLDRASQRLMFDGPKNGYIELQVFRSQKNECPCCGATLQGRSLLRPARIGTPFTLSTVIGTLLEFCPPDPMPTGKPFQGRKLISFTDSRQGTARIAIKLQQDSERNRIRGLIYQRLLQAQPIDGLSAEDLQDLQDLQTATQLSRIEQKHLQSLLDRQAEATKGAEISWTDMANHLAGTPELQMGMLDYYNNLAPNTFGKQDSVALASMLLASEFYRRPKRANSLETLGLVQVCYPKLANVTGKPMAWPAHLDAESWRTYLKVLLDFFVRENTILNINERWQSLIGARIRPKWVVAPVLGEKPEKLQSRFVRWPAVNTVNGIQSRAILLLCKAFNWSTATHQNQIDSILSEAWRVLTQQAKLLITSGDGYQLDLKDLSFRLPETVYLCPVSRRFIDTPFEQLSPYTPRTDREMVVKVTPYTLPRPPEALLHVPGDEGLLAIRDWLNSEPQIQQLRKDALWSDVMDRVIEGGHYFRAAEHSAQQSQQKLKGYEKLFEKGKLNLLSCSTTMEMGVDIGGISVVAMNNVPPHPANYLQRAGRAGRRREGRSLALAVCKNTPHDQSVFNNPLWPFNTPMRMPKVSLQSPDLVQRHVNAWLLSHWLKHVVAAQEIKSMTAGAFFLDGELPMSLAARFCLWCDNQRVDTEALVEQSLKDITRRSILDTAPQPELFKHTSRRMKDIMQAWQQEYSASEAQLQQITDKKAAAYRAMEAQLSRIEKEYLLSELADRRFLPGYGFPTDIVSFDNRCMQTLKREDGDQREDNRACYRSLASRDRITGLREYAPGAELVMDGLVYKSSGITLNWHAPASAENVKELQLFKKAWRCGQCGASDSAINPGLEINCQECGAPIERDKIREYLVPAGFAVDFFDEPHNDISRLQYVPIKAPWLNVPANWICLVNPALGQFRASQQAHLFNYTSGANQQGFAICLECGKAEPMLSYPDASAPANEQYLPAIFRQKAQHRRLRGGRSDDGDNICPGSHNSWKIKQNVHLGHDSLTDALELVLRNPTSGELLNDDITAYSIAVALREAIAADLGIQTEELGCDNHPIKVDGQPTRAIRVFDLRSGGYTTQAAERLNEASLWRKVIARLDSCNCSHACQNCLLSFDTRFEAERLNRHVALEWINQTWLAGLALPAELAVFGPKSQAEIATLQEAVERAITRDDNAKTVAIYFTAPAEEWDLAVARRLRHQLHSWESVGHLVQLHLLESTVSSLPRDQKEWLAKLAFNGVQICLHNSIPDLGALALNVSLQGPQGCIAWASDNTNLAAPGHTWDLAEAGARIIRGTPSDLKAERILNAADLMPAPPPGLIKIEIGNQLDGSLDNFARRFWEHLGTEANGLINDALTGKDPITELVYSDRYVCSPLVVNLLVSVIHELGRLSDADFAIRILGRQYQREDNRSPWQCRHDWHSARERDEALRQALAYCGREGEVLSLPTLPHYRRLQLKLRSGNQLTIQFDQGLSYWEAERSEKSYQLRFDFTSRELGEEIMERIRCKVSAAGEENTQIFLSSS

SEQ ID NO: 26550 - protein, 1036 aa, Pseudomonas aeruginosa
MCEAAGQQGLPQDKTRRLVIDGRHLWRLQTAIKNEGKRFIGLVAVNGGLPMRLVESAQGGLSGLLRMVTEQALEYRLQDERLRQAIEAQAELLPACYQQAPVYELLDSLVKAVLHIRKAYALQSAQDPIARLQEECPHWEELFPIALDSQAAASLIKGLVRDTVSITPQSRRPPFQIQRGLRFSSDGSIPVYELSFVMQAQARRDQVAEALGMAVDALPPHFQLLLRIGEREYLVGEALLRDEEYQLIARPLPAIHSLHNAAQLIVSRWGATLHIANLPGGEALSHDEPLIFENTYPFARLLAQGDALVKGESALAAMPARTIVYAEEGEARELHDCLADGQMLMELPAGTTRLTYKQQPFVVTISASATRHPEAYWHGNSLEALSVPGLLFRGTPRLRIEQGTGFSSYAPAHELFVRTQGKELPLAQARAPGLCRLIWRKDGQRLLNTRAVLLPDEASITYAPGATTLEGSIRLHHWPDVPVRCESEQIALERRHDGTGLTLRLKSTGSRPATTVPLCLQWPDGEQKLTLPFPGYGVTLLRNDTPLKLNQALTIEELIGCRAVLMSAQGAENWRIRLTSSGTDSRSTLSQEIRYTGIREIRLFELIPAIQQMMSCHPGLDHVVQLELIHAHQTHARLQVGRYSTRIRLHSQREMASLNDSGSDVLLEQPHAEGLILGLPLAEPEHDPVSLPLHFSEQVFTGSWLVSLPDDAVGPWLLYTSAESPLHSRATIVPPTASQLSKPLTPLREALCEGDGEERMRQLRAALRAMAADPQADDWQTLELLLDRLHHLPLASLDICQALIREPQALTMATLLLDDFSSRLAERLPCELPFEWLLIAPEHWFGTFATLRQQLAADNPRMLSVIRNDIQSKSQFLSRWQPALRFIFDQGLHHSFDLQSPDVAFFLRNPAMLTDSWLSQLLDGEHSAMQQMFRRNPAETHQYPGSGNTDIGAFLKTPHGQMLLRHCKLPANDFKLATVMLPFMAAFDTYAGRGQQWQADPARLFSLRNARQFDTVWFDSAYQLGLAMAQAASMQK

SEQ ID NO: 26551 - protein, 2111 aa, Pseudomonas aeruginosa; identical to SEQ ID NO: 26547

SEQ ID NO: 26552 - protein, 1111 aa, Pseudomonas aeruginosa; identical to SEQ ID NO: 26548

SEQ ID NO: 26553 - protein, 2071 aa, Pseudomonas aeruginosa
MLYQKNYFSALTGNLSTRSERAAQGLLSLGNPQLRQFLHDQLTAAPGTPGAWLADPVFEPTFGWQESSETMSSLAGGDLLHRRLAEAMAAPPKEPHDLAEEYAFPSNRHPFTHQLAAWEILNRPEPQSLVVTSGTGSGKTECFLVPVLNQLAKAIDAGEDPEGVRALFIYPLNALINSQQNRLDAWTDGFGGQIRHCLYTGALENERKTSDQQYKGQVIDRKSLRASPPQLLVTNATMLEYMLIRKDDEPILQKSAGKLRWIILDEAHTHIGSQAAEMALLLRRVMLAFQVKPQDVRFVATSATFGSDTQTIESLRTFLADIGGVDPQQVHVVQGHRDIPALLNATPDAEQDTPEAIGAIEADQEQSTLRYRRLEASPTARRLRALFMPDGQVKPQSLQGLIRESGLPSAQVLAWLDLLSGTKSAEGLSFLPLRAHLFHNVIPAIRACVDRHCSHKAGTALAHADWPFGMVYLEERTHCRCGAPLMPLVSCEECNESFLQAATKSSSSALVDPTQQQDDEFALEDETTEADDQTKDKDTVSSIQILITNRAVKNGSADFLDRATHRLTPNRPADGGIELQLFRTAKNECPCCSANIQGRSLLRPTRIGTPFTLSTVIGTLLEFCPPDPMPTGKPFQGRKLISFTDSRQGTARIAIKLQQDSERNRIRGLIYQRLLQAQPVNGLSAEDLQDLQDLQTATQLSRIEQKHLQSLLDRQAEATKGAEISWTDMANHLAGTPELQMGMLDYYNNLAPNTFGKQDSVALASMLLAREFYRRPKRANSLETLGLVQVCYPKLANVTGKPMAWPAHLDAESWRTYLKVLLDFFVRENTILNINERWQSLIGARIRPKWVVAPVLGEKPEKLQSRFVRWPAVNTVNGIQSRAILLLCKAFNWSTAAHQDQIDSILSEAWRVLTQQAKLLISSGDGYQLDLKDLSFRLPETVYQCPVSRRFIDTPFEQLSPYTPRTDREMVVKVTPYTLPRPPEALLHVPGDEGLLAIRDWLNSEPQIQQLRKDALWSDVMDRVIEGGHYFRAAEHSAQQPKSKLDSYEGLFKTGRLNLLSCSTTMEMGVDIGGISVVAMNNVPPHPANYLQRAGRAGRRREGRSLALAVCKNTPHDQSVFNNPLWPFNTPMRMPKVSLQSPDLVQRHVNAWLLSHWLKHVVAAQEIKSMTAGAFFLDGELPMSLAARFCLWCDNQAVDTETLVGQALKDITRRSILDTTPQPELFKHASRRMKEIMQAWQQEYSASHAQLLQIADKKAAAYRAMDAQLSRIAKEYLLSELADRRFLPGYGFPTDIVSFDNRCMQTLKREDGDQREDNRARYRSLASRDRITGLREYAPGAELVMDGLVYKSSGITLNWHAPASAENVKELQLFKKAWRCGQCGASDSAINPGLEINCQECGAPIERDNIREYLVPAGFAVDFFDEPHNDISRLQYVPVNAPWLNVPASWVCLANPALGQFRASQQAQLFNYTSGANQKGFAICLECGKAEPMLSYPDASAPANEQYLPATFRQKAQHRRLRGGKSNEQGDGTNICPGSHNSWKIKQNVHLGHDSLTDALELVLRNPTSGELLNDDITAYSIAVALREAIAADLGIQTEELGCASHPIKVDGQPTRAIQVFDLRSGGYTTQAAERLNEASLWRKVIARLDSCNCSHACQNCLLSFDTRFEAERLNRHVALEWINQTWLAGLALPAELAVFGPKSQAEIATLQEAVERAITRDDNAKTVAIYFTAPAEEWDLAVARRLRHQLHSWESVGHLVQLHLLESTVSSLPRDQKEWLAKLAFNGVQICLHNSIPDLGALALNVSLQGPQGCIAWASDNTNLAAPGHTWDLAEAGARIIRGTPSDLKAERILNAADLMPAPPPGLIKIEIGNQLDGSLDNFARRFWEHLGTEANGLINDALTGKDPITELVYSDRYVCSPLVVNLLVSVIHELGRLSDADFAIRILGRQYQREDNRSPWQYRHDWHSARERDEALRQALAYCGREGEVLSLPTLPHYRRLQLKLRSGNQLTIQFDQGLSYWEAERSEKSYQLRFDFASRELGEEIMERIRCKVSAAGEENTQIFLSSS

SEQ ID NO: 26554 - protein, 1036 aa, Pseudomonas aeruginosa
MCEAAGQRKVAHEKTRSLVIDGRRQWRLQTTIKSEGKRFIGLVAVNGGLPMRLVESAQGGLSRLLRMVTEQALEYRLQDERLRQAIEAQAELLPACYQQAPVYELLDSLVKAVLHIRKAYALQSAQDPIARLQEECPHWEELFPIALDSQAAASLIKGLVRDTVSITPQSRRPPFQIQRGLRFSSDGSIPVYELSFVMQAQARRDQVAEALGMAVDALPPHFQLLLRIGEREYLVGEALLRDEEYQLIARPLPAIHSLHNAAQLIVSRWGATLHIANLPGGEALNHDEPLIFENTYPFARLLAQGDALVKGESALAAMPARTIVYAEEGEARELHDCLADGQMLMELPAGTTRLTYKQQPFVVTISASATRHPEAYWHGNSLEALSVPGLLFRGTPRLRIEQGTGFSSYAPAHELFVRTQGKELPLAQARAPGLCRLIWRKDGQRLLNTRAVLLPDEASITYAPGATTLEGSIRLHHWPDVPVRCESEQIALERRHDGTGLTLRLKSTGSRPATTVPLCLQWPDGEQKLTLPFPGYGVTLLRNDTPLKLNQALTIEELIGCRAVLMSAQGAENWRIRLTSSGTDSRSTLSQEIRYTGIREIRLFELIPAIQQMMSCHPGLDHVVQLELIHAHQTHARLQVGRYSTRIRLHSQREMASLNDSGSDVLLEQPHAEGLILGLPLAEPEHDPVSLPLHFSEQVFTGSWLVSLPDDAVGPWLLYTSAESPLHSRATIVPPTASQLSKPLTPLREALCEGDGEERMRQLRAALRAMAADPQADDWQTLELLLDRLHHLPLASLDICQALIREPQALTMATLLLDDFSSRLAERLPCELPFEWLLIAPEHWFGTFATLRQQLAADNPRMLSVIRNDIQSKSQFLSRWQPALRFIFDQGLHHSFDLQSPDVGFFLKNPAMLTASWQSYLFDGENSAMQQMFRRNPAETHQYPGSGNTDIGAFLKTPHGQMLLRCCKLPANDFKLATVMLPFMAAFDTYAGRGQQWQADPPRLFSLRNARQFDTVWFDSVYQLGLAMAQAASMQK

SEQ ID NO: 26555 - protein, 2071 aa, Pseudomonas aeruginosa
MLYQKNYFSALTGNLSTRSERAAQGLLSLGNPQLRQFLHDQLTAAPGTPGAWLADPVFEPTFGWQESSETMSSLAGGDLLHRRLAEAMAAPPKEPHDLAEEYAFPSNRHPFTHQLAAWEILNRPEPQSLVVTSGTGSGKTECFLVPVLNQLAKAIDAGEDPEGVRALFIYPLNALINSQQNRLDAWTDGFGGQIRHCLYTGALENERKTSDQQYKGQVIDRKSLRASPPQLLVTNATMLEYMLIRKDDEPILQKSAGKLRWIILDEAHTHIGSQAAEMALLLRRVMLAFQVKPQDVRFVATSATFGSDTQTIESLRTFLADIGGVDPQQVHVVQGHRDIPALLNATPDAEQDTPEAIGAIEADQEQSTLRYRRLEASPTARRLRALFMPDGQVKPQSLQGLIRESGLPSAQVLAWLDLLSGTKSAEGLSFLPLRAHLFHNVIPAIRACVDRHCSHKAGTALAHADWPFGMVYLEERTHCRCGAPLMPLVSCEECNESFLQAATKSSSSALVDPTQQQDDEFALEDETTEADDQTKDKDTVSSIQILITNRAVKNGSADFLDRATHRLTPNRPADGGIELQLFRTAKNECPCCGANIQGRSLLRPTRIGTPFTLSTVIGTLLEFCPPDPMPTGKPFQGRKLISFTDSRQGTARIAIKLQQDSERNRIRGLIYQRLLQAQPVNGLSAEDLQDLQDLQTATQLSRIEQKHLQSLLDRQAEATKGAEISWTDMANHLAGTPELQMGMLDYYNNLAPNTFGKQDSVALASMLLAREFYRRPKRANSLETLGLVQVCYPKLANVTGKPMAWPAHLDAESWRTYLKVLLDFFVRENTILNINERWQSLIGARIRPKWVVAPVLGEKPEKLQSRFVRWPAVNTVNGIQSRAILLLCKAFNWSTAAHQDQIDSILSEAWRVLTQQAKLLISSGDGYQLDLKDLSFRLPETVYQCPVSRRFIDTPFEQLSPYTPRTDREMVVKVTPYTLPRPPEALLHVPGDEGLLAIRDWLNSEPQIQQLRKDALWSDVMDRVIEGGHYFRAAEHSAQQPKSKLDSYEGLFKTGRLNLLSCSTTMEMGVDIGGISVVAMNNVPPHPANYLQRAGRAGRRREGRSLALAVCKNTPHDQSVFNNPLWPFNTPMRMPKVSLQSPDLVQRHVNAWLLSHWLKHVVAAQEIKSMTAGAFFLDGELPMSLAARFCLWCDNQAVDTETLVGQALKDITRRSILDTTPQPELFKHASRRMKEIMQAWQQEYSASHAQLLQIADKKAAAYRAMDAQLSRIAKEYLLSELADRRFLPGYGFPTDIVSFDNRCMQTLKREDGDQREDNRARYRSLASRDRITGLREYAPGAELVMDGLVYKSSGITLNWHAPASAENVKELQLFKKAWRCGQCGASDSAINPGLEINCQECGAPIERDNIREYLVPAGFAVDFFDEPHNDISRLQYVPVNAPWLNVPASWVCLANPALGQFRASQQAQLFNYTSGANQKGFAICLECGKAEPMLSYPDASAPANEQYLPAIFRQKAQHRRLRGGKSNEQGDGTNICPGSHNSWKIKQNVHLGHDSLTDALELVLRNPTSGELLNDDITAYSIAVALREAIAADLGIQTEELGCASHPIKVDGQPTRAIQVFDLRSGGYTTQAAERLNEASLWRKVIARLDSCNCSHACQNCLLSFDTRFEAERLNRHVALEWINQTWLAGLALPAELAVFGPKSQAEIATLQEAVERAITRDDNAKTVAIYFTAPAEEWDLAVARRLRHQLHSWESVGHLVQLHLLESTVSSLPRDQKEWLAKLAFNGVQICLHNSIPDLGALALNVSLQGPQGCIAWASDNTNLAAPGHTWDLAEAGARIIRGTPSDLKAERILNAADLMPAPPPGLIKIEIGNQLDGSLDNFARRFWEHLGTEANGLINDALTGKDPITELVYSDRYVCSPLVVNLLVSVIHELGRLSDADFAIRILGRQYQREDNRSPWQYRHDWHSARERDEALRQALAYCGREGEVLSLPTLPHYRRLQLKLRSGNQLTIQFDQGLSYWEAERSEKSYQLRFDFASRELGEEIMERIRCKVSAAGEENTQIFLSSS

SEQ ID NO: 26556 - protein, 1036 aa, Pseudomonas aeruginosa; identical to SEQ ID NO: 26540

SEQ ID NO: 26557 - protein, 2071 aa, Pseudomonas aeruginosa; identical to SEQ ID NO: 26555

SEQ ID NO: 26558 - protein, 1036 aa, Pseudomonas aeruginosa; identical to SEQ ID NO: 26540

SEQ ID NO: 26559 - protein, 2071 aa, Pseudomonas aeruginosa; identical to SEQ ID NO: 26545

SEQ ID NO: 26560 - protein, 1036 aa, Pseudomonas aeruginosa; identical to SEQ ID NO: 26540

SEQ ID NO: 26561 - protein, 2071 aa, Pseudomonas aeruginosa; identical to SEQ ID NO: 26555

SEQ ID NO: 26562 - protein, 1036 aa, Pseudomonas aeruginosa; identical to SEQ ID NO: 26540

SEQ ID NO: 26563 - protein, 2071 aa, Pseudomonas aeruginosa; identical to SEQ ID NO: 26555

SEQ ID NO: 26564 - protein, 1036 aa, Pseudomonas aeruginosa; identical to SEQ ID NO: 26540

SEQ ID NO: 26565 - protein, 2111 aa, Pseudomonas aeruginosa; identical to SEQ ID NO: 26541

SEQ ID NO: 26566 - protein, 1109 aa, Pseudomonas aeruginosa; identical to SEQ ID NO: 26542

SEQ ID NO: 26567 - protein, 2111 aa, Pseudomonas aeruginosa
MDKYFSGLVEQALSRATESTLSILSITDPDLREHLESLMRAECGKEGAFLAPPVFEQTFSWEESAFTMEQLASKEHLLSKEIVASLDGKANGRYRFGASWKPFTHQLASWRSLLEKKHSVVVTSGTGSGKTECFMVPVLEDLYREYRDAARQPLVGVRALFLYPLNALINSQRERLNAWTQSFGSGIRYCLYNGNTPELQANVRSEQSLKPNEILSRELMRTQPAPILVTNGTMLEYIMVRQVDAPIVRISREQKSLRWIVLDEAHTYVGSQAAELALQLRRVMTAFGVTPKDVRFVATSATIAGEDAAGQLKQFLSDLSGGPVTQIDVWGGNRVIPPLAPCQQTLVALDTLESMPPVIADDPEVHPDRYEALVHSPQARALRNLLVTTPKPLKLTEMVSQMRQEGGWSLSQDEILRWLDVCSGTRLSASEPAFLKLRAHFFQRTTHGLWACFDKCCSAKSGTALQQNWPFGYVYANQRQTCSCGSPVFELAFCNDCNEPHLLARDKNGKLIQWESSGGDEFSLQTETPVEEDAGAGGSGVLSVKTPLVLCSFENAGSAYIPVEVDKFAGSFAAVSAERVRFGVRDLDAKCSHNSCGFSGLHGASPFRRAMLGGPFYVANAVPTVLEYCQDYQEEDQTPEHGPQSLPGRGRRLITFTDSRQGTARMAVRMQQEAERSRLRGLVVEILSWHQRSQASSQVDSSRIDPSVLQQLIAKAKEEVELYRSVGIKEEVRAAEEKVTRFTAMLASATGAKVRPTLVSLAWSELSNELKQKADLKGSMLLYNKYQKPEIFRDHDGPYKLAEMLLFREFMRRPKRQNSLETQGLVKVAYVGMDKVQEVPAYWGQKGLTLDDWRDFLKVALDFHVRENSYIQVDEGWLSWIGSRFSAKSLRNPESKEADEIRVKRWPQIRNGNHSQRLIKLLLLGAGLNPANTADVDLVNAWLRAAWLQLARPGSALKADENRYYLPREHMLFSLVDRAYVCPVTNKLLDTTFKGFTPYLPAHLDFSQLTEEQRESYQAEPIELPDLWEFDRSQDDYAPGLARVRNLVANDPLVSDLRARNLWTDINDRVVEGGFYYRTAEHSAQQSSERLGSYEEMFKKGQLNVLNCSTTMEMGVDIGGISAVVMNNVPPHPANYLQRAGRAGRSKESRAITYTLCKNNPHDQQVFANPSWPFETRIPAPVVALNSERLVQRHINSLLLADFLCNVVGLTQTEKTSLNTQWFYDDEHGLSQCDRFIERLGQVVSDLDDALKDLVKGTALVGVDPAQLRRRSIDSIKPLQSRWLKSYRFLLSEEKHAKANSPYLKRLQIEKARHCNEYLLRDLAARTFLPGYGFPTDVVNFDNFTIEDYIREQDAGKKLKHDREDNVSRYKGLPSRNLSIAIREYAPGAEIVLDGRVFRSAGVSLHWHNLNADSKEAQKMDIAWRCDVCGALDYEEGLIKTDELTCSNVDCQSLIKPQNIRKVLQPSGFVTDAYESASNDIQHQKFIPVETAWVFVNANKTPLPNPAVGAMAYGADGKVFHHSSGEHGTGYALCMSCGRAESMQPDSGFPRDLSPSGEHYPPRPTKEDKDQNNKRLPCQGSGSILPSVSLGAVATTDVFELTLHHPVRGEFIADSAQESAIAMTLAVALRAALAEILGVSASELGYATRPSKLPSGQSIRVLQLFDVISGGAGFATSAPLHVEELLRGMVKKLDCKHCETGCSECLLDSQTRHDHDKLDRKAALDWLGPDFIHHVGLTAENKLSFADGQYAPGSIESVLRRLINEGAKRITLVASGDVAEWDLLAPQFRKAIQAYVLADELTVELLVPADITDGVLVQDLQRLSDLGVNVGNAITEPGEHLVAQVFKESEVVTLASRSLVATVPGRSWHQSDELVVLSKSQPEFGWQVMDLSSAASDSFGKVAIVDISIHEELNGSLLQFGERFWELLGARDQQVADVIATAKINRLTYSDRYIQNPAVVTILGAVLKDLKSRISADAVVQVKTLFKSGRLQGRKAFDDWANQDDFEFFSRNWLSAMVGHQVELIVESSNREIPHHRRLELEFEDGRTLKVRFDQGVAYWQVRFSSHSDMWFDFDLAAQDQLMHMARIVETARIQNSEQKWATDVLVELKS

SEQ ID NO: 26568 - protein, 1111 aa, Pseudomonas aeruginosa
MSYSVIKYSSWLGRFLQRRGLSAPDQRGLYAYHCSLEEYGELQHLLREFGGFDAALKDPAACACLVLFGSEWYRREYRSEYAWTWDPIWKTLGFNLSPGELSKVIPKGLEGYWKRPLHFYEAGHRDFLGSLFGEGGLPFQVLREGGSRFQWLFDRLLRQYDQWHLLGFNTLQQVEQQLEKASLPQVFASRTSIELIARMVDELVALVRNYGLAQADEPVVRLDALNPKWRELFPLPLDNETGSELLNGLLKTATIEGKKRRRDATGWSCRHFWHEAQPDVLKVQVSMPEEVVLRLTTQPSTTRFELAIVEDGQAIAALGPGYALVDNGVAHIRLRLREVIGKRQDCSAQLSLVAMAGGMLIATQPIEGSAVALGEVPLGFEPVNDRWQLCGQASFNTAGEELLLVLPEGGKLNMAAEGEEAIFSDMAPAFSLHTVKVQGKAQFQVESDELYRIRTGHAVGMGLGLELAGTQIDWPTKPALTFVGLPRVQWPTAAGELQQQGGDLYVAGKQPGSGLLQEVLGTQYVSVRNRSGNALLRRRVGILPTDFRVELRSGEKPGQGSILVHSRQRCLLQIVDDSLQVQQVKREDHTELRLSAKGFPPVRVRLSVTPSLMADPVEIDLPFPNSGFLAFDGTGKHLKRDLSVDDLLGARLYLFGRAGAPTRFSLELTLRGSAARNACYSWTYTVAEKPLELSLFNIREQIVDLLSLQSGIDQVVELRVFGNGQDTSYRIRRYSTEMQLDRDRQMLCAANLHDGADAIPEPVLMLLHDPMRSSIALRSRTSEGVPTGDFELPIAVERDGPWLVLPKSGSSVSFRPLFIAGGWKPLAPSDGIQSLQKAVLTFDHASPVSSFTPVLDAMAVNPMHSGWQFLRALYEGYGYLPLATFEVWKALVGHTRALAMALFKFEMEATFLGRLETEFPIFWEFLPITEIHLAAKRFAAFLKVKGGAEEAIDALIGRMFSRLGETYSAYGQSVQRFLSGKPVGPEIKVPLATFKSVLHGWYLELIRERSEAKWPEFGGKRLERWHSSQGCSVIAFRSEMDYRNAVLYLPVFAAAVACGKARFTDAFADGVEAIFFLRQVRDFDSKWFNSIYQYCLLNSVMDMQKAESVNG

SEQ ID NO: 26569 - protein, 2071 aa, Pseudomonas aeruginosa; identical to SEQ ID NO: 26553

SEQ ID NO: 26570 - protein, 1036 aa, Pseudomonas aeruginosa; identical to SEQ ID NO: 26554

SEQ ID NO: 26571 - protein, 2111 aa, Pseudomonas aeruginosa
MDKYFSGLVEQALSRATESTLSILSITDPDLREHLESLMRAECGKEGAFLAPPVFEQTFSWEESAFTMEQLASKEHLLSKEIVASLDGKANGRYRFGASWKPFTHQLASWRSLLEKKHSVVVTSGTGSGKTECFMVPVLEDLYREYRDAARQPLVGVRALFLYPLNALINSQRERLNAWTQSFGSGIRYCLYNGNTPELQANVRSEQSLKPNEILSRELMRTQPAPILVTNGTMLEYIMVRQVDAPIVRISREQKSLRWIVLDEAHTYVGSQAAELALQLRRVMTAFGVTPKDVRFVATSATIAGEDAAGQLKQFLSDLSGGPVTQIDVWGGNRVIPPLAPCQQTLVALDTLESMPPVIADDPEVHPDRYEALVHSPQARALRNLLVTTPKPLKLTEMVSQMRQEGGWSLSQDEILRWLDVCSGTRLSASEPAFLKLRAHFFQRTTHGLWACFDKCCSAKSGTALQQNWPFGYVYANQRQTCSCGSPVFELAFCNDCNEPHLLARDKNGKLIQWESSGGDEFSLQTETPVEEDAGAGGSGVLSVKTPLVLCSFENAGSAYIPVEVDKFAGSFAAVSAERVRFGVRDLDAKCSHNSCGFSGLHGASPFRRAMLGGPFYVANAVPTVLEYCQDYQEEDQTPEHGPQSLPGRGRRLITFTDSRQGTARMAVRMQQEAERSRLRGLVVEILSWHQRSQASSQVDSSRIDPSVLQQLIAKAKEEVELYRSVGIKEEVRAAEEKVTRFTAMLASATGAKVRPTLVSLAWSELSNELKQKADLKGSMLLYNKYQKPEIFRDHDGPYKLAEMLLFREFMRRPKRQNSLETQGLVKVAYVGMDKVQEVPAYWGQKGLTLDDWRDFLKVALDFHVRENSYIQVDEGWLSWIGSRFSAKSLRNPESKEADEIRVKRWPQIRNGNHSQRLIKLLLLGAGLNPANTADVDLVNAWLRAAWLQLARPGSALKADENRYYLPREHMLFSLVDRAYVCPVTNKLLDTTFKGFTPYLPAHLDFSQLTEEQRESYQAEPIELPDLWEFDRSQDDYAPGLARVRNLVANDPLVSDLRARNLWTDINDRVVEGGFYYRTAEHSAQQSSERLGSYEEMFKKGQLNVLNCSTTMEMGVDIGGISAVVMNNVPPHPANYLQRAGRAGRSKESRAITYTLCKNNPHDQQVFANPSWPFETRIPAPVVALNSERLVQRHINSLLLADFLCNVVGLTQTEKTSLNTQWFYDDEHGLSQCDRFIERLGQVVSDLDDALKDLVKGTALVGVDPAQLRRRSIDLIKPLQSRWLKSYRFLLSEEKHAKANSPYLKRLQIEKARHCNEYLLRDLAARTFLPGYGFPTDVVNFDNFTIEDYIREQDAGKKLKHDREDNVSRYKGLPSRNLSIAIREYAPGAEIVLDGRVFRSAGVSLHWHNLNADSKEAQKMDIAWRCDVCGALDYEEGLIKTDELTCSNVDCQSLIKPQNIRKVLQPSGFVTDAYESASNDIQHQKFIPVETAWVFVNANKTPLPNPAVGAMAYGADGKVFHHSSGEHGTGYALCMSCGRAESMQPDSGFPRDLSPSGEHYPPRPTKEDKDQNNKRLPCQGSGSILPSVSLGAVATTDVFELTLHHPVRGEFIADSAQGSAIAMTLAVALRAALAEILGVSASELGYATRPSKLPSGQSIRVLQLFDVISGGAGFATSAPLHVEELLRGMVKKLDCKHCETGCSECLLDSQTRHDHDKLDRKAALDWLGPDFIHHVGLTAENKLSFADGQYAPGSIESVLRRLINEGAKRITLVASGDVAEWDLLAPQFRKAIQAYVLADELTVELLVPADITDGVLVQDLQRLSDLGVNVGNAITEPGEHLVAQVFKESEVVTLASRSLVATVPGRSWHQSDELVVLSKSQPEFGWQVMDLSSAASDSFGKVAIVDISIHEELNGSLLQFGERFWELLGARDQQVADVIATAKINRLTYSDRYIQNPAVVTILGAVLKDLKSRISADAVVQVKTLFKSGRLQGRKAFDDWANQDDFEFFSRNWLSAMVGHQVELIVESSNREIPHHRRLELEFEDGRTLKVRFDQGVAYWQVRFSSHSDMWFDFDLAAQDQLMHMARIVETARIQNSEQKWATDVLVELKS

SEQ ID NO: 26572 - protein, 1111 aa, Pseudomonas aeruginosa
MSYSVIKCSSWLGRFLQRRGLSAPDQRGLYAYHCSLEEYGELQHLLREFGGFDAALKDPAACACLVLFGSEWYRREYRSEYAWTWDPIWKTLGFNLSPGELSKVIPKGLEGYWKRPLHFYEAGHRDFLGSLFGEGGLPFQVLREGGSRFQWLFDRLLRQYDQWHLLGFNTLQQVEQQLEKASLPQVFASRTSIELIVRMVDELVALVRNYGLAQADEPVVHLDTMNPKWRELFPLPLDNETGSELLNGLLKTATIEGKKRRRDATGWSCRHFWHEAQPDVLKVQVSMPEEVELRLTTQPSTTRFELAIVEDGQAIAALGPGYALVDNGVAHIRLRLREVIGKRQDCSAQLSLVAMAGGMLIATQPIEGSAVALGEVPLGFEPVNDRWQLCGQASFNTAGEELLLVLPEGGKLNMAAEGEEAIFSDMAPAFSLHTVKVQGKAQFQVESDELYRIRTGHAVGMGLGLELAGTQIDWPTKPALTFVGLPRVQWPTAAGELQQHGGDLYVAGKQPGSGLLQEVLGTQYVSVRNRSGNALLRRRVGILPTDFRVELRSGEKLGQGSILVHSRQRCLLQIVDDSLQVQQVKHEDHTELRLSAKGFPPVRVRLSVTPSLMADPVEIDLPFPNSGFLAFDGTGKHLKRDLSVDDLLGARLYLFGRAGAPTRFSLELTLRGSAARNACYSWTYTVAEKPLELSLFNIREQIVDLLSLQSGIDQVVELRVFGNGQDTSYRIRRYSTEMQLDRDRQMLCAANLHDGADAIPEPVLMLLHDPMRSSIALRSRTSEGVPTGDFELPIAVERDGPWLVLPKSGSSVSFRPLFIAGGWKPLAPSDGIQSLQKAVLTFDHASPVSSFTPVLDAMAVNPMHSGWQFLRALYEGYGYLPLATFEVWKALVGHTRALAMALFKFEMEATFLGRLETEFPIFWEFLPITEIHLAAKRFAAFLKVKGVAEEAIDALIGRMFSRLGETYSAYGQSVQRFLSGKPVGPEIKVPLATFKSVLHGWYLELIRERSEAKWPEFGGKRLERWHSSQGCSVIAFRSEMDYRNAVLYLPVFAAAVACGKARFTDAFADGVEAIFFLRQVRDFDSKWFNSIYQYCLLNSVMDMQKAESVNG

SEQ ID NO: 26573 - protein, 2111 aa, Pseudomonas aeruginosa; identical to SEQ ID NO: 26541

SEQ ID NO: 26574 - protein, 1109 aa, Pseudomonas aeruginosa; identical to SEQ ID NO: 26542

SEQ ID NO: 26575 - protein, 2071 aa, Pseudomonas aeruginosa; identical to SEQ ID NO: 26555

SEQ ID NO: 26576 - protein, 1036 aa, Pseudomonas aeruginosa; identical to SEQ ID NO: 26540

SEQ ID NO: 26577 - protein, 2111 aa, Pseudomonas aeruginosa; identical to SEQ ID NO: 26547

SEQ ID NO: 26578 - protein, 1111 aa, Pseudomonas aeruginosa; identical to SEQ ID NO: 26548

SEQ ID NO: 26579 - protein, 2071 aa, Pseudomonas aeruginosa
MLYQKNYFSALTGNLSTRSERAAQGLLSLGNPQLRQFLHDQLTAAPGTPGAWLADPVFEPTFGWQESSETMSSLAGGDLLHRRLAEAMAAPPKEPHDLAEEYAFPSNRHPFTHQLAAWEILNRPEPQSLVVTSGTGSGKTECFLVPVLNQLAKAIDAGEDPEGVRALFIYPLNALINSQQNRLDAWTDGFGGQIRHCLYTGALENERKTSDQQYKGQVIDRKSLRASPPQLLVTNATMLEYMLIRKDDEPILQKSAGKLRWIILDEAHTHIGSQAAEMALLLRRVMLAFQVKPQDVRFVATSATFGSDTQTIESLRTFLADIGGVDPQQVHVVQGHRDIPALLNATPDAEQDTPEAIGAIEADQEQSTLRYRRLEASPTARRLRALFMPDGQVKPQSLQGLIRESGLPSAQVLAWLDLLSGTKSAEGLSFLPLRAHLFHNVIPAIRACVDRHCSHKAGTALAHADWPFGMVYLEERTHCRCGAPLMPLVSCEECNESFLQAATKSSSSALVDPTQQQDDEFALEDETTEADDQTKDKDTVSSIQILITNRAVKNGSADFLDRATHRLTPNRPADGGIELQLFRTAKNECPCCGANIQGRSLLRPTRIGTPFTLSTVIGTLLEFCPPDPMPTGKPFQGRKLISFTDSRQGTARIAIKLQQDSERNRIRGLIYQRLLQAQPVNGLSAEDLQDLQDLQTATQLSRIEQKHLQSLLDRQAEATKGAEISWTDMANHLAGTPELQMGMLDYYNNLAPNTFGKQDSVALASMLLAREFYRRPKRANSLETLGLVQVCYPKLANVTGKPMAWPAHLDAESWRTYLKVLLDFFVRENTILNINERWQSLIGARIRPKWVVAPVLGEKPEKLQSRFVRWPAVNTVNGIQSRAILLLCKAFNWSTAAHQDQIDSILSEAWRVLTQQAKLLISSGDGYQLDLKDLSFRLPETVYQCPVSRRFIDTPFEQLSPYTPRTDREMVVKVTPYTLPRPPEALLHVPGDEGLLAIRDWLNSEPQIQQLRKDALWSDVMDRVIEGGHYFRAAEHSAQQPKSKLDSYEGLFKTGRLNLLSCSTTMEMGVDIGGISVVAMNNVPPHPANYLQRAGRAGRRREGRSLALAVCKNTPHDQSVFNNPLWPFNTPMRMPKVSLQSPDLVQRHVNAWLLSHWLKHMVAAQEIKSMTAGAFFLDGELPMSLAARFCLWCDNQAVDTETLVGQALKDITRRSILDTTPQPELFKHASRRMKEIMQAWQQEYSASHAQLLQIADKKAAAYRAMDAQLSRIAKEYLLSELADRRFLPGYGFPTDIVSFDNRCMQTLKREDGDQREDNRARYRSLASRDRITGLREYAPGAELVMDGLVYKSSGITLNWHAPASAENVKELQLFKKAWRCGQCGASDSAINPGLEINCQECGAPIERDNIREYLVPAGFAVDFFDEPHNDISRLQYVPVNAPWLNVPASWVCLANPALGQFRASQQAQLFNYTSGANQKGFAICLECGKAEPMLSYPDASAPANEQYLPAIFRQKAQHRRLRGGKSNEQGDGTNICPGSHNSWKIKQNVHLGHDSLTDALELVLRNPTSGELLNDDITAYSIAVALREAIAADLGIQTEELGCASHPIKVDGQPTRAIQVFDLRSGGYTTQAAERLNEASLWRKVIARLDSCNCSHACQNCLLSFDTRFEAERLNRHVALEWINQTWLAGLALPAELAVFGPKSQAEIATLQEAVERAITRDDNAKTVAIYFTAPAEEWDLAVARRLRHQLHSWESVGHLVQLHLLESTVSSLPRDQKEWLAKLAFNGVQICLHNSIPDLGALALNVSLQGPQGCIAWASDNTNLAAPGHTWDLAEAGARIIRGTPSDLKAERILNAADLMPAPPPGLIKIEIGNQLDGSLDNFARRFWEHLGTEANGLINDALTGKDPITELVYSDRYVCSPLVVNLLVSVIHELGRLSDADFAIRILGRQYQREDNRSPWQYRHDWHSARERDEALRQALAYCGREGEVLSLPTLPHYRRLQLKLRSGNQLTIQFDQGLSYWEAERSEKSYQLRFDFASRELGEEIMERIRCKVSAAGEENTQIFLSSS

SEQ ID NO: 26580 - protein, 1036 aa, Pseudomonas aeruginosa; identical to SEQ ID NO: 26540

SEQ ID NO: 26581 - protein, 2071 aa, Pseudomonas aeruginosa; identical to SEQ ID NO: 26553

SEQ ID NO: 26582 - protein, 1036 aa, Pseudomonas aeruginosa; identical to SEQ ID NO: 26554

SEQ ID NO: 26583 - protein, 2065 aa, Pseudomonas aeruginosa
MLYQKNYFSALTDNLSTRSERAAQGLLSLGNPQLRQFLHDQLTAAPGTPGAWLADPVFEPTFGWQEGAETMGSLAGGNVLHWRLADTMAHPPKKEDGEGLIDPFPKDRRLFTHQLAAWEILNRAEPQSLVVTSGTGSGKTECFLVPVLNQLAKAIDAGEDPEGVRALFIYPLNALINSQQNRLDAWTHGFGGQIRHCLYTGALENERRNRDQQYDGQVIDRKSLRASPPQLLVTNATMLEYMLIRKDDEPILQKSAGKLRWIILDEAHTHIGSQAAEIALLLRRVMLAFQVKPQDVRFVATSATFGSDTQTIESLRTFLADIGGVDPQQVHVVQGHRDIPALLNATPDAEQDTPEAIGAIEADQEQSTLRYQRLEASPTARRLRALFMPDGQVKPQSLQGLIRESGLPSAQVLAWLDLLSGTKSAEGLSFLPLRAHLFHNVIPAIRTCVDRNCSHKTGTALAHADWPFGMVYLEERTHCRCGAPLMPLVSCEECNESFLQAATTSHGMLIDQSQQQLDEFALDEEPTDTDEPAEDSALLSQTLITNRPVNHSYPEFLDRASQRLMFDGPKNGYIELQVFRSQKNECPCCGATLQGRSLLRPARIGTPFTLSTVIGTLLEFCPPDPMPTGKPFQGRKLISFTDSRQGTARIAIKLQQDSERNRIRGLIYQRLLQAQPIDGLSAEDLQDLQDLQTATQLSRIEQKHLQSLLDRQAEATKGAEISWTDMANHLAGTPELQMGMLDYYNNLAPNTFGKQDSVALASMLLASEFYRRPKRANSLETLGLVQVCYPKLANVTGKPMAWPAHLDAESWRTYLKVLLDFFVRENTILNINERWQSLIGARIRPKWVVAPVLGEKPEKLQSRFVRWPAVNTVNGIQSRAILLLCKAFNWSTATHQNQIDSILSEAWRVLTQQAKLLITSGDGYQLDLKDLSFRLPETVYLCPVSRRFIDTPFEQLSPYTPRTDREMVVKVTPYTLPRPPEALLHVPGDEGLLAIRDWLNSEPQIQQLRKDALWSDVMDRVIEGGHYFRAAEHSAQQSQQKLKGYEKLFEKGKLNLLSCSTTMEMGVDIGGISVVAMNNVPPHPANYLQRAGRAGRRREGRSLALAVCKNTPHDQSVFNNPLWPFNTPMRMPKVSLQSPDLVQRHVNAWLLSHWLKHVVAAQEIKSMTAGAFFLDGELPMSLAARFCLWCDNQRVDTEALVEQSLKDITRRSILDTAPQPELFKHTSRRMKDIMQAWQQEYSASEAQLQQITDKKAAAYRAMEAQLSRIEKEYLLSELADRRFLPGYGFPTDIVSFDNRCMQTLKREDGDQREDNRARYRSLASRDRITGLREYAPGAELVMDGLVYKSSGITLNWHAPASAENVKELQLFKKAWRCGQCGASDSAINPGLEINCQECGAPIERDKIREYLVPAGFAVDFFDEPHNDISRLQYVPIKAPWLNVPANWICLVNPALGQFRASQQAHLFNYTSGANQQGFAICLECGKAEPMLSYPDASAPANEQYLPAIFRQKAQHRRLRGGRSDDGDNICPGSHNSWKIKQNVHLGHDSLTDALELVLRNPTSGELLNDDITAYSIAVALREAIAADLGIQTEELGCDNHPIKVDGQPTRAIRVFDLRSGGYTTQAAERLNEASLWRKVIARLDSCNCSHACQNCLLSFDTRFEAERLNRHVALEWINQTWLAGLALPAELAVFGPKSQAEIATLQEAVERAITRDDNAKTVAIYFTAPAEEWDLAVARRLRHQLHSWESVGHLVQLHLLESTVSSLPRDQKEWLAKLAFNGVQICLHNSIPDLGALALNVSLQGPQGCIAWASDNTNLAAPGHTWDLAEAGARIIRGTPSDLKAERILNAADLMPAPPPGLIKIEIGNQLDGSLDNFARRFWEHLGTEANGLINDALTGKDPITELVYSDRYVCSPLVVNLLVSVIHELGRLSDADFAIRILGRQYQREDNRSPWQCRHDWHSARERDEALRQALAYCGREGEVLSLPTLPHYRRLQLKLRSGNQLTIQFDQGLSYWEAERSEKSYQLRFDFTSRELGEEIMERIRCKVSAAGEENTQIFLSSS

SEQ ID NO: 26584 - protein, 1036 aa, Pseudomonas aeruginosa
MCEAAGQQGLPQDKTRRLVIDGRHLWRLQTAIKNEGKRFIGLVAVNGGLPMRLVESAQGGLSGLLRMVTEQALRYELQDEQLRQAIEAQAELLPACYQQAPVYELLDNLVKAVLHIRKTYVLQGAQDPIARLQEECPHWEDLFPIALDSQAAASLIKGLVRDTVSITPQSRRPPFQIQRGLRFSSDGSMPIYELTFAMQAQARRDQVAEALGMAMEALPPHFQLLLRIGEREYLVGEALLRDEEYQLIARPLPAIHSLHNAAQLIVSRWGATLHIANLPGGEALSHDEPLIFENTYPFARLLAQGDALVKGESALAAMPARTIVYAEEGEARELHDCLADGQMLMELPAGTTRLTYKQQPFVVTISASATRHPEAYWHGNSLEALSVPGLLFRGTPRLRIEQGTGFSSYAPAHELFIRTQGRELPLAQARAPGLCRLIWRKDGQRLLNTRAVLLPDEASITYAPGASTLEGSIRLHHWPDVPVRCESEQVALERRHDGTGLLLRLKSNGSRPATTVPLCLQWPDGEQRLTLPFPGYGVTLLRNDTPLKLNQALTIEELIGCRAVLMSTQGAENWQIRLTSSGADARSTLSQEIRYTGIREIRLFELIPAIQQMLSCHPGLDHVVQLELIHAHQTHARLQVGRYSTRIRLHSQREMASLNDSGSDVLLEEPHAEGLILGLPLAEPEHDPVSLPLHFSEQVFTGNWLVSLPTDAVGPWLLYTPDESTLHSRPTVVPPTASQLSKPLTPLREALCEGDGEERMRLLRAALRAMAADPQADDWQTLELLLDRLHHLPLASLDICQALIREPQAVTMATLLLDDFSSRLAERLPCELPFEWLLIAPKHWFDTFATLRQQLAADNPRMLSVIRNDIQSKSQFLSRWQPALRFIFDQGLHHSFDLQSPDVAFFLRNPAMLTDSWLSQLLDGEHSAMQQMFRRNPAETHQYPGSGNTDIGAFLKTPHGQMLLRHCKLPANDFKLATVMLPFMAAFDTYAGRGQQWQADPARLFSLRNARQFDTVWFDSAYQLGLAMAQAASMQK

SEQ ID NO: 26585 - protein, 2071 aa, Pseudomonas aeruginosa; identical to SEQ ID NO: 26555

SEQ ID NO: 26586 - protein, 1036 aa, Pseudomonas aeruginosa; identical to SEQ ID NO: 26540

SEQ ID NO: 26587 - protein, 2071 aa, Pseudomonas aeruginosa; identical to SEQ ID NO: 26545

SEQ ID NO: 26588 - protein, 1036 aa, Pseudomonas aeruginosa; identical to SEQ ID NO: 26540

SEQ ID NO: 26589 - protein, 2071 aa, Pseudomonas aeruginosa; identical to SEQ ID NO: 26545

SEQ ID NO: 26590 - protein, 1036 aa, Pseudomonas aeruginosa; identical to SEQ ID NO: 26540

SEQ ID NO: 26591 - protein, 2071 aa, Pseudomonas aeruginosa; identical to SEQ ID NO: 26545

SEQ ID NO: 26592 - protein, 1036 aa, Pseudomonas aeruginosa; identical to SEQ ID NO: 26540

SEQ ID NO: 26593 - protein, 2071 aa, Pseudomonas aeruginosa; identical to SEQ ID NO: 26579

SEQ ID NO: 26594 - protein, 1036 aa, Pseudomonas aeruginosa; identical to SEQ ID NO: 26540

SEQ ID NO: 26595 - protein, 2111 aa, Pseudomonas aeruginosa
MDKYFSGLVEQALSRATESTLSILSITDPDLREHLESLMRAECGKEGAFLAPPVFEQTFSWEESAFTMEQLASKEHLLSKEIVASLDGKANGRYRFGASWKPFTHQLASWRSLLEKKHSVVVTSGTGSGKTECFMVPVLEDLYREYRDAARQPLVGVRALFLYPLNALINSQRERLNAWTQSFGSGIRYCLYNGNTPELQANVRSEQSLKPNEILSRELMRTQPAPILVTNGTMLEYIMVRQVDAPIVRISREQKSLRWIVLDEAHTYVGSQAAELALQLRRVMTAFGVTPKDVRFVATSATIAGEDAAGQLKQFLSDLSGGPVTQIDVWGGNRVIPPLAPCQQTLVALDTLESMPPVIADDPEVHPDRYEALVHSPQARALRNLLVTTPKPLKLTEMVSQMRQEGGWSLSQDEILRWLDVCSGTRLSASEPAFLKLRAHFFQRTTHGLWACFDKCCSAKSGTALQQNWPFGYVYANQRQTCSCGSPVFELAFCNDCNEPHLLARDKNGKLIQWESSGGDEFSLQTETPVEEDAGAGGSGVLSVKTPLVLCSFENAGSAYIPVEVDKFAGSFAAVSAERVRFGVRDLDAKCSHNSCGFSGLHGASPFRRAMLGGPFYVANAVPTVLEYCQDYQEEDQTPEHGPQSLPGRGRRLITFTDSRQGTARMAVRMQQEAERSRLRGLVVEILSWHQRSQASSQVDSSRIDPSVLQQLIAKAKEEVELYRSVGIKEEVRAAEEKVTRFTAMLASATGAKVRPTLVSLAWSELSNELKQKADLKGSMLLYNKYQKPEIFRDHDGPYKLAEMLLFREFMRRPKRQNSLETQGLVKVAYVGMDKVQEVPAYWGQKGLTLDDWRDFLKVALDFHVRENSYIQVDEGWLSWIGSRFSAKSLRNPESKEADEIRVKRWPQIRNGNHSQRLIKLLLLGAGLNPANTADVDLVNAWLRAAWLQLARPGSALKADENRYYLPREHMLFSLVDRAYVCPVTNKLLDTTFKGFTPYLPAHLDFSQLTEEQRESYQAEPIELPDLWEFDRSQDDYAPGLARVRNLVANDPLVSDLRARNLWTDINDRVVEGGFYYRTAEHSAQQSSERLGSYEEMFKKGQLNVLNCSTTMEMGVDIGGISAVVMNNVPPHPANYLQRAGRAGRSKESRAITYTLCKNNPHDQQVFANPSWPFETRIPAPVVALNSERLVQRHINSLLLADFLCNVVGLTQTEKTSLNTQWFYDDEHGLSQCDRFIERLGQVVSDLDDALKDLVKGTALVGVDPAQLRRRSIDSIKPLQSRWLKSYRFLLSEEKHAKANSPYLKRLQIEKARHCNEYLLRDLAARTFLPGYGFPTDVVNFDNFTIEDYIREQDAGKKLKHDREDNVSRYKGLPSRNLSIAIREYAPGAEIVLDGRVFRSAGVSLHWHNLNADSKEAQKMDIAWRCDVCGALDYEEGLIKTDELTCSNVDCQSLIKPQNIRKVLQPSGFVTDAYESASNDIQHQKFIPVETAWVFVNANKTPLPNPAVGAMAYGADGKVFHHSSGEHGTGYALCMSCGRAESMQPDSGFPRDLSPSGEHYPPRPTKEDKDQNNKRLPCQGSGSILPSVSLGAVATTDVFELTLHHPVRGEFIADSAQGSAIAMTLAVALRAALAEILGVSASELGYATRPSKLPSGQSIRVLQLFDVISGGAGFATSAPLHVEELLRGMVKKLDCKHCETGCSECLLDSQTRHDHDKLDRKAALDWLGPDFIHHVGLTAENKLSFADGQYAPGSIESVLRRLINEGAKRITLVASGDVAEWDLLAPQFRKAIQAYVLADELTVELLVPADITDGVLVQDLQRLSDLGVNVGNAITEPGEHLVAQVFKESEVVTLASRSLVATVPGRSWHQSDELVVLSKSQPEFGWQVMDLSSAASDSFGKVAIVDISIHEELNGSLLQFGERFWELLGARDQQVADVIATAKINRLTYSDRYIQNPAVVTILGAVLKDLKSRISADAVVQVKTLFKSGRLQGRKAFDDWANQDDFEFFSRNWLSAMVGHQVELIVESSNREIPHHRRLELEFEDGRTLKVRFDQGVAYWQVRFSSHSDMWFDFDLAAQDQLMHMARIVETARIQNSEQKWATDVLVELKS

SEQ ID NO: 26596 - protein, 1111 aa, Pseudomonas aeruginosa
MSYSVIKYSSWLGRFLQRRGLSAPDQRGLYAYHCSLEEYGELQHLLREFRGFDAALKDPAACACLVLFGSEWYRREYRSEYAWTWDPIWKTLGFNLSPGELSKVIPKGLEGYWKRPLHFYEAGHRDFLGSLFGEGGLPFQVLREGGSRFQWLFDRLLRQYDQWHLLGFNTLQQVEQQLEKASLPQVFASRTSIELIARMVDELVALVRNYGLAQADEPVVRLDALNPKWRELFPLPLDNETGSELLNGLLKTATIEGKKRRRDATGWSCRHFWHEAQPDVLKVQVSMPEEVVLRLTTQPSTTRFELAIVEDGQAIAALGPGYALVDNGVAHIRLRLREVIGKRQDCSAQLSLVAMAGGMLIATQPIEGSAVALGEVPLGFEPVNDRWQLCGQASFNTAGEELLLVLPEGGKLNMAAEGEEAIFSDMAPAFSLHTVKVQGKAQFQVESDELYRIRTGHAVGMGLGLELAGTQIDWPTKPALTFVGLPRVQWPTAAGELQQQGGDLYVAGKQPGSGLLQEVLGTQYVSVRNRSGNALLRRRVGILPTDFRVELRSGEKPGQGSILVHSRQRCLLQIVDDSLQVQQVKREDHTELRLSAKGFPPVRVRLSVTPSLMADPVEIDLPFPNSGFLAFDGTGKHLKRDLSVDDLLGARLYLFGRAGAPTRFSLELTLRGSAARNACYSWTYTVAEKPLELSLFNIREQIVDLLSLQSGIDQVVELRVFGNGQDTSYRIRRYSTEMQLDRDRQMLCAANLHDGADAIPEPVLMLLHDPMRSSIALRSRTSEGVPTGDFELPIAVERDGPWLVLPKSGSSVSFRPLFIAGGWKPLAPSDGIQSLQKAVLTFDHASPVSSFTPVLDAMAVNPMHSGWQFLRALYEGYGYLPLATFEVWKALVGHTRALAMALFKFEMEATFLGRLETEFPIFWEFLPITEIHLAAKRFAAFLKVKGVAEEAIDALIGRMFSRLGETYSAYGQSVQRFLSGKPVGPEIKVPLATFKSVLHGWYLELIRERSEAKWPEFGGKRLERWHSSQGCSVIAFRSEMDYRNAVLYLPVFAAAVACGKARFTDAFADGVEAIFFLRQVRDFDSKWFNSIYQYCLLNSVMDMQKAESVNG

SEQ ID NO: 26597 - protein, 2111 aa, Pseudomonas aeruginosa; identical to SEQ ID NO: 26595

SEQ ID NO: 26598 - protein, 1111 aa, Pseudomonas aeruginosa
MSYSVIKYSSWLGRFLQRRGLSAPDQRGLYAYHCSLEEYGELQHLLREFGGFDAALKDPAACACLVLFGSEWYRREYRSEYAWTWDPIWKTLGFNLSPGELSKVIPKGLEGYWKRPLHFYEAGHRDFLGSLFGEGGLPFQVLREGGSRFQWLFDRLLRQYDQWHLLGFNTLQQVEQQLEKASLPQVFASRTSIELIARMVDELVALVRNYGLAQADEPVVRLDALNPKWRELFPLPLDNETGSELLNGLLKTATIEGKKRRRDATGWSCRHFWHEAQPDVLKVQVSMPEEVVLRLTTQPSTTRFELAIVEDGQAIAALGPGYALVDNGVAHIRLRLREVIGKRQDCSAQLSLVAMAGGMLIATQPIEGSAVALGEVPLGFEPVNDRWQLCGQASFNTAGEELLLVLPEGGKLNMAAEGEEAIFSDMAPAFSLHTVKVQGKAQFQVESDELCRIRTGHAVGMGLGLELAGTQIDWPTKPALTFVGLPRVQWPTAAGELQQQGGDLYVAGKQPGSGLLQEVLGTQYVSVRNRSGNALLRRRVGILPTDFRVELRSGEKPGQGSILVHSRQRCLLQIVDDSLQVQQVKREDHTELRLSAKGFPPVRVRLSVTPSLMADPVEIDLPFPNSGFLAFDGTGKHLKRDLSVDDLLGARLYLFGRAGAPTRFSLELTLRGSAARNACYSWTYTVAEKPLELSLFNIREQIVDLLSLQSGIDQVVELRVFGNGQDTSYRIRRYSTEMQLDRDRQMLCAANLHDGADAIPEPVLMLLHDPMRSSIALRSRTSEGVPTGDFELPIAVERDGPWLVLPKSGSSVSFRPLFIAGGWKPLAPSDGIQSLQKAVLTFDHASPVSSFTPVLDAMAVNPMHSGWQFLRALYEGYGYLPLATFEVWKALVGHTRALAMALFKFEMEATFLGRLETEFPIFWEFLPITEIHLAAKRFAAFLKVKGVAEEAIDALIGRMFSRLGETYSAYGQSVQRFLSGKPVGPEIKVPLATFKSVLHGWYLELIRERSEAKWPEFGGKRLERWHSSQGCSVIAFRSEMDYRNAVLYLPVFAAAVACGKARFTDAFADGVEAIFFLRQVRDFDSKWFNSIYQYCLLNSVMDMQKAESVNG

SEQ ID NO: 26599 - protein, 2111 aa, Pseudomonas aeruginosa; identical to SEQ ID NO: 26595

SEQ ID NO: 26600 - protein, 1111 aa, Pseudomonas aeruginosa
MSYSVIKYSSWLGRFLQRRGLSAPDQRGLYAYHCSLEEYGELQHLLREFGGFDAALKDPAACACLVLFGSEWYRREYRSEYAWTWDPIWKTLGFNLSPGELSKVIPKGLEGYWKRPLHFYEAGHRDFLGSLFGEGGLPFQVLREGGSRFQWLFDRLLRQYDQWHLLGFNTLQQVEQQLEKASLPQVFASRTSIELIARMVDELVALVRNYGLAQADEPVVRLDALNPKWRELFPLPLDNETGSELLNGLLKTATIEGKKRRRDATGWSCRHFWHEAQPDVLKVQVSMPEEVVLRLTTQPSTTRFELAIVEDGQAIAALGPGYALVDNGVAHIRLRLREVIGKRQDCSAQLSLVAMAGGMLIATQPIEGSAVALGEVPLGFEPVNDRWQLCGQASFNTAGEELLLVLPEGGKLNMAAEGEEAIFSDMAPAFSLHTVKVQGKAQFQVESDELYRIRTGHAVGMGLGLELAGTQIDWPTKPALTFVGLPRVQWPTAAGELQQQGGDLYVAGKQPGSGLLQEVLGTQYVSVRNRSGNALLRRRVGILPTDFRVELRSGEKPGQGSILVHSRQRCLLQIVDDSLQVQQVKREDHTELRLSAKGFPPVRVRLSVTPSLMADPVEIDLPFPNSGFLAFDGTGKHLKRDLSVDDLLGARLYLFGRAGAPTRFSLELTLRGSAARNACYSWTYTVAEKPLELSLFNIREQIVDLLSLQSGIDQVVELRVFGNGQDTSYRIRRYSTEMQLDRDRQMLCAANLHDGADAIPEPVLMLLHDPMRSSIALRSRTSEGVPTGDFELPIAVERDGPWLVLPKSGSSVSFRPLFIAGGWKPLAPSDGIQSLQKAVLTFDHASPVSSFTPVLDAMAVNPMHSGWQFLRALYEGYGYLPLATFEVWKALVGHTRALAMALFKFEMEATFLGRLETEFPIFWEFLPITEIHLAAKRFAAFLKVKGVAEEAIDALIGRMFSRLGETYSAYGQSVQRFLSGKPVGPEIKVPLATFKSVLHGWYLELIRERSEAKWPEFGGKRLERWHSSQGCSVIAFRSEMDYRNAVLYLPVFAAAVACGKARFTDAFADGVEAIFFLRQVRDFDSKWFNSIYQYCLLNSVMDMQKAESVNG

SEQ ID NO: 26601 - protein, 2071 aa, Pseudomonas aeruginosa; identical to SEQ ID NO: 26545

SEQ ID NO: 26602 - protein, 1036 aa, Pseudomonas aeruginosa; identical to SEQ ID NO: 26540

SEQ ID NO: 26603 - protein, 2111 aa, Pseudomonas aeruginosa; identical to SEQ ID NO: 26547

SEQ ID NO: 26604 - protein, 1111 aa, Pseudomonas aeruginosa; identical to SEQ ID NO: 26548

SEQ ID NO: 26605 - protein, 2071 aa, Pseudomonas aeruginosa; identical to SEQ ID NO: 26555

SEQ ID NO: 26606 - protein, 1036 aa, Pseudomonas aeruginosa; identical to SEQ ID NO: 26540

SEQ ID NO: 26607 - protein, 2111 aa, Pseudomonas aeruginosa; identical to SEQ ID NO: 26547

SEQ ID NO: 26608 - protein, 1111 aa, Pseudomonas aeruginosa; identical to SEQ ID NO: 26548

SEQ ID NO: 26609 - protein, 2071 aa, Pseudomonas aeruginosa; identical to SEQ ID NO: 26545

SEQ ID NO: 26610 - protein, 1036 aa, Pseudomonas aeruginosa; identical to SEQ ID NO: 26540

SEQ ID NO: 26611 - protein, 2071 aa, Pseudomonas aeruginosa; identical to SEQ ID NO: 26535

SEQ ID NO: 26612 - protein, 1036 aa, Pseudomonas aeruginosa; identical to SEQ ID NO: 26540

SEQ ID NO: 26613 - protein, 2063 aa, Pseudomonas aeruginosa
MLYQKNYFSALTDNLSTRSERAAQGLLSLGNPQLRQFLHDQLTAAPGTPGAWLADPVFEPTFGWQESAETMSSLAGGNMLHQRLARAMESPPKDLAQEYTFPGNRHPFTHQLAAWDILNRAVPQSLVVTSGTGSGKTECFLVPVLNQLAKEIDTGEDPEGVRALFIYPLNALINSQQNRLDAWTDGFGGQIRHCLYTGALENERKASDQQYKGQVIDRKSLRASPPQLLVTNATMLEYMLIRKDDEPILQKSAGKLRWIILDEAHTHIGSQAAEMALLLRRVMLAFQVKPQDVRFVATSATFGSDTQTIESLRTFLADIGGVDPQQVHVVQGHRDIPALLNATPDAEQDTPEAIGAIEADQEQSALRYQRLEASPTARRLRALFMPDGQVKPQSLQGLTRESGLTPAQALAWLDLLSGTKNAEGLSFLPLRAHLFHNVIPAIRACVDRQCSHKAGTALEHADWPFGMVYLEERTHCRCGAPLMPLVSCEECNESFLQAVTTNHGRLIDQSQQQVDEFSLDEEPTDTDDQADDIALLSRVLITNRPTNYSYPEFLDRDSQRLKHDGPKDGYLELQVFRSQKNECPCCGANIQGRSLLRPARIGTPFTLSTVIGALLEFCPPDPMPTGKPFQGRKLISFTDSRQGTARIAVKLQQDSERNRIRGLIYQRLLQAHPVNSLSEEELRELQELQELDAAQKLGRFEQKYLGQLLEKQANSAKGAEISWTDMTNYLAGTPELQMGMLDYYNNLAPNTFGKQDSVALANMLLAREFYRRPKRANSLETLGIVQVCYPKLASITSKPTAWPAHLDIESWRTYLKVLLDFFVRENTILNIDKRWQSLIGSRISPKWAVAPVLGKKPEKLQSRFARWPTVNTVNGIQSRAILLLCKAFNWSTAAHQDHIDSILSEAWRVLQGKLLTSFGDSYQLDLKELSFRLPETVYLCPVSRRFIDTPFEQLSPYTPRTDRDMVVRVTPYRLPRLPEKLLHVPGDAGLLAIRDWLNNDPQIQQMRKDALWSDVMDLVIEGGNYFRAAEHSAQQPKNKLDSYEGLFKLGKLNLLSCSTTMEMGVDIGGISVVAMNNVPPHPANYLQRAGRAGRRREGRSLALAVCKNTPHDQSVFNNPLWPFNTPMRMPKVSLQSPDLVQRHVNAWLLSHWLKHVVSAKEIKSMTAGTFFLEGEMPMSLAARFCLWCDTQTVDTEALVAKALKDITRRSILDTAPQPKLLKHASSRIAEIMQAWRQEHSASHAQLQQIADKKAAAYRAMEAQLSRIEKEYLLSELADRRFLPGYGFPTDIVSFDNHCMHTLKREVNDQREDNRARYRSLASRDRITGLREYAPGAELVMDGLVYKSSGITLNWHAPASAENIKELQLFKKAWHCSKCGASNTAINPGQEINCQACGAQIERENVREYLVPAGFAVDFFDEPHNDISRLQYVPVNPPLLNVPASWVCLANPALGQFRASQRAHLFHYTSGANQMGFAICLECGKAEPMLSHPDGSAPENEKYLPAAFRQKAQHRRLRGGKSDDGDNICPGSHNSWKIKQNVHLGHDSLTDALELVLRNPSSGELLDDAITAYSIAVALREAIAAELGVQTEELGCDSHRIKVDGQPTQAIRVFDLRSGGYTTQAAERLNDASLWRRVITRLDSCNCAHACQNCLLSFDTRFEAERLNRHVALGWINQTWLAGLALPAELAVFGPKSQAEIATLQEAVERAITRDDNAKTVAIYFTAPAEEWDLAVARRLRHQLHSWESVGHLVQLHLLESTVSSLPRDQKEWLAKLAFNGVQICLHNSIPDLGALALNVSLQGPQGCIAWASDNTNLAAPGHTWDLAEAGARIIRGTPSDLKAERILNAADLMPAPPPGLIKIEIGNQLDGSLDNFARRFWEHLGTEANGLINDALTGKDPITELVYSDRYVCSPLVVNLLVNVIHELGRLSDADFAIRILGRQYQREDNRSPWQCRHDWHSARERDEALRQALAYCGREGEVLSLPTLPHYRRLQLKLRSGNQLTIQFDQGLSYWEAERSEKSYQLRFDFASRELGEEIMERIRCKVSAAGEENTQIFLSSS

SEQ ID NO: 26614 - protein, 1036 aa, Pseudomonas aeruginosa
MCEAAGQRKVSHEKTRSLVIDGRRQWRLQTTIKSEGKRFIGLVAVNGGLPMRLVESAQGGLSGLLRMVSEQALRYNLHDEQVHQAIEAQAALLPACYQQAPVYELLENLVKAVLHIRKTYSLQGAHDPISKLREECPQWEELFPIALDSQAAASLIKGLVKGIVSITPQSRRPPFQIQRGLRFSSDGSAPVYELSFAMQAQAAREQVAEALGTTGAALPPHFQLLLRIGEREYLVGEALLRGEEYQLIARPLPTIRSLHEPAQLIVSRWGATLHIANLPGGEALSPDEPLIFENAYPFARLLAQGDALVKGESALALMPAKTIVFSEEGEARELYDCLADEQVLIELPAGVTRLTYRKQPFIVTISTSASHHPEAYWQGDSLEVLSVPGLLFRGKPRLRIEQATGFTSHAPAHELFVRAQGKEVSLAQAKAPGLCRLTWRKDGQRLMNNRAVLLPEDASIAYVPGASPFEGSVRLRLWPDIPVHCENEQIELKRHHDGAALILQLKSIGSRPATTVPLCLQWPDGEQRLTLPFPGYGVTLLRNGIQLKSNQALTIEDLVGCRALLMSAQGAENWLVRLTSSGDASRSTLSQEIRYTGIREIRLFELIPAIQQMLSCHPRLDHVVQLELIHSHQTHARLQVGRYSTQLRLHSDREMASLSDGGRDLLLDQEEAEDLVHGLPLAEPEHDPVSLPLHFSEQVFTGNWKVSLPDDAVGPWLLYTRDDSPLHSRPTIVPSTANDLSKPLSPLRKALCEANGEERMHLLRATLRLMAADPKVEDWQILELLLDRLHHLPLASLDICQALIREPQALAMATLLLDDFSSRLAERLPCELPFEWLLIAPEHWFDTFATLRQQLAADDPRLLSLIRNDIQSKSQFLSRWQPALHFIFDQGLHRSFDLQSRDVGLFLKNPAVLTTAWQSHLFDGENSAMQQMFRRNPAETHQYPGSGNTDVGAFLKTPHGHMLLRCSKLPANDFKLATVMLPFMAAFDTYAGRGRQWQADPARLFSLRNARQFDSVWFDSAYQLGLAMAQAASMQK

SEQ ID NO: 26615 - protein, 2066 aa, Pseudomonas aeruginosa
MLYQNNYFSALTTNLSTRSERAAQGLLSLGSPHLRQFLHDQLTASPGTPGAWLADPVFEPTFGWEESNETIGSLSSGNLLHPRLAEAMASPPKDLAQEYTFPGTRHPFTHQLAAWKTLNSPEPQSLVVTSGTGSGKTECFLVPVLNHLAKEIDAGEDLEGVRALFIYPLNALINSQQNRLDAWTDGFGGQIRHCLYTGALENERKASDQQYKGQVIDRKSMRERPPQLLVTNATMLEYMLIRKDDEPILRKSARKLRWIILDEAHTHIGSQAAEMALLLRRVMLAFQVKPQDVRFVATSATFGSDMQTIESLRKFLADIGGVAPEQVHVVQGHRDIPALLDAKPEAAQDTPESIGAIEGEQEQSALRYQRLEASPTARRLRSLFIPDGQVKPQSLQGLTRTSGLTAAQTLAWLDLMSGTKNANGLSFLPLRAHLFHNVIPAIRACVDRNCAYKAGTALDHADWPFGMVYLEERTHCRCNAPLMPLVSCEECNESFLQAKPTSNGKLIDQSQQQVDEFSLDEDSADAEDQADNNSESLSQILITNRPVTHGRPEFLDRTSQKLMFDGPKEGYIELQVFQSHKNECPCCGATIQGRSLLRPARIGTPFTLSTVISTLLEFCPPDPMPAGKPFQGRKLISFTDSRQGTARIAVKLQQDSERNRIRGLIYQHLLRAKPVNLLSPEQQEHLKLLEEQEASNSLDATGKMLLGMLRQQQKPARSGTEISWTEMVNHLAGTPELQMGMLDYYHSLAPKLFSKQDSIALAGMLLAREFYRRPKRSNSLETMGLVQVCYPKLASITSKPMAWPAHQTVESWRTYLKVLLDFFIRENTILNIDRRWQSLIGARISPKWVVAPVFDGKAEKLPGRYARWPAVNTVNGVQSRAILMLCKAFNWSTAVHHDQIDSILREAWQVLTQQAKLLILSGDGYQLNLKDLSFRLPNEVYLCPVSRRFIDTPFEQLSPYTPRTDREIVVKVTPYSLPHPPEALLHVPGDDGLLAIRDWLNNQPHIQQLRKDALWSDVMDLVTEGGNYFRAAEHSAQQPKNKLDTYEGMFKAGKLNLLSCSTTMEMGVDIGGISVVAMNNVPPHPANYLQRAGRAGRRREGRSLALAVCKNTPHDQSVFNNPLWPFTTPMRMPKVSLQSPELVQRHINAWLLSHWLKHVVAAQEIKSMTAGAFFLDGEMPMSLAKRFCLWCNNQASEAEPLVVQAIRDITRRSILDSTPQSELLKRASSSLAEIMQAWRQEHEVSHSQLLQIADKKAAASRAMEAQLSRIEKEYLLSELADRRFLPGYGFPTDIVSFDNRCMQTLKLEEVDKREDNRARYRSLASRDRVTGLREYAPGAELVMDGLVYKSSGITLNWHAPASAEGIKELQLFKKAWRCGQCGASDTAINPGLEINCQDCGAPIERDEIREYLVPAGFAVDFFDEPHNDISHLQYVPVKAPWLNVPASWVCLANPALGQFRSSQQAHLFHYTSGANQQGFAICLECGKAEPMLSHPDTSAPANEQYLPAIFRQKAQHRRLRGGKNDDGENICPGGQNSWKIKQGIHLGHDSLTDALELVLRTPSNGELLNDDITGYSIAVALREAIAAELGVQTEELGCDCHPIRVDGSPTRAIRIFDLRSGGYTSQAAERLNDSSLWQRVITRLDSCNCSHACQRCLLSFDTRFEADRLNRHAALEWINQTWLTSLELPAELAVFGSQSQAEITSLQEAVERAITQDDSAKTVTVYLAAPAEDWDLAVARRLRHQLQNWEDAGHQVQLNLLESTFAALPADQREWLAKLSFNGIEICLHKAMPDLGVLALNISVHGPRSGFAWASDNANLAAPGRTWDLAAAGVRIIRGVSPTLKAERVLDTSDLMPPAPQGLVKVEIGNHLDGSLDGFARRLWEHLRQEARSLLADAVTGQDPITELVYSDRYVCSPLVVNLLVNVIHEIGAHSDEGFAIRIQGRQYQKDDNRSPWQCRHDWRTSQERDHAVRQALEYCGLEADVLSLPALPHYRQLQLQLRSGKQLTIQFDQGFSYWEAERSGKPYLLRFDFSSPQLGEEIMTRIQCRVLAASDENTQVFISSS

SEQ ID NO: 26616 - protein, 1028 aa, Pseudomonas aeruginosa
MSHEKTRKLVIEGRRQWRLQTAIKNEGKRFIGLVVVNGGLPMRLVESAQGGLSGLLRMVTLQAVDYNLHDEQLRQAIEAQAALLPACYQQAPVYELLDNLIKAVLHIRRTYALTGAQDPIAKLQEECPQWEELFPIALDNQAAASLIKGLVRGIVDITPQAKQLPFQILRGLRLSSDGSMPVYELSFAMQAQAKRDRIAEALGMVADRLPPHFQLLLRIGEREHLVGEALLRDDEYQLIARPLPPIQTVHEAAQLIVSRWGATLHIANLPGGEALSHDEPLIFENSYPFARLIAQGDALVKGLSALAVMPARTIVLAEEGETRELHDCLADGQMLMELPAGKTRLAYRGQAFIVTVSAIATHRPEAYWQGNSLEALSVPGLLFRGTPRLRVDQGLGHSSYAPSHELFVRSHSKELPLGEAQAPGLCRLIWRKDGQRLLSTRAVLLPEGASITYVPAASTLEGVIRLDNWPDVPVRCENEEIELDSRHDGTSLVLRLKSTSARPATSVPLCMQWPDGEHRLTLPFPGYGVTLQRNNLPLKSNQALTIDELIGCRALLMSAHGAEHWQVRLTSVGPDARPTLSQEIRYTGIREIRLFELIPTIQQMLSCHPGLDHAVQLELMHTHQTRARLQVGRYSTRIRPHSQKQMVSLSNGGRDLILEQPQAEGLMLALPLAEPDHEPVSLPLHFSEQVFTGNWLVSLPTDATGPWLLYTSDESPLHSRPTVVPPTMIGLSKPLTPLRQALCAADGEVRMSMLRAALRTMVADPHDKDWQTLELLLERLHHLPPASLDICQALIREPQALAMTTLLLDGFSSRMAERLPSELPFEWLLIAPDHWFDTFSILRQQLAAGDDRLLSIIRHDIQSKSQYLSRWQPALRFIFEQGFHRYFDLQSQDVGFFLKNPAVLTGIWLDRLFEGGEKSAMQRMFQRNPAETHQYPAAGNTNIGAFLKTTHGQLLLRRSKLPANDFKLAVVMLPFMAAFDAHAGHGRQWQADPARLLSLRNARLFDTVWFDSAYELGLAMAQADSMLK

SEQ ID NO: 26617 - protein, 2102 aa, Pseudomonas aeruginosa; identical to SEQ ID NO: 26533

SEQ ID NO: 26618 - protein, 1099 aa, Pseudomonas aeruginosa; identical to SEQ ID NO: 26534

SEQ ID NO: 26619 - protein, 2071 aa, Pseudomonas aeruginosa; identical to SEQ ID NO: 26545

SEQ ID NO: 26620 - protein, 1036 aa, Pseudomonas aeruginosa; identical to SEQ ID NO: 26540

SEQ ID NO: 26621 - protein, 2111 aa, Pseudomonas aeruginosa; identical to SEQ ID NO: 26541

SEQ ID NO: 26622 - protein, 1109 aa, Pseudomonas aeruginosa; identical to SEQ ID NO: 26542

SEQ ID NO: 26623 - protein, 2111 aa, Pseudomonas aeruginosa; identical to SEQ ID NO: 26595

SEQ ID NO: 26624 - protein, 1111 aa, Pseudomonas aeruginosa; identical to SEQ ID NO: 26600

SEQ ID NO: 26625 - protein, 2111 aa, Pseudomonas aeruginosa; identical to SEQ ID NO: 26547

SEQ ID NO: 26626 - protein, 1111 aa, Pseudomonas aeruginosa; identical to SEQ ID NO: 26548

SEQ ID NO: 26627 - protein, 2071 aa, Pseudomonas aeruginosa; identical to SEQ ID NO: 26545

SEQ ID NO: 26628 - protein, 1036 aa, Pseudomonas aeruginosa
MCEAAGQRKVAHEKTRSLVIDGRRQWRLQTTIKSEGKRFIGLVAVNGGLPMRLVESAQGGLSRLLRMVTEQALEYRLQDERLRQAIEAQAELLPACYQQAPVYELLDSLVKAVLHIRKAYALQSAQDPIARLQEECPHWEELFPIALDSQAAASLIKGLVRDTVSITPQSRRPPFQIQRGLRFSSDGSIPVYELSFVMQAQARRDQVAEALGMAVDALPPHFQLLLRIGEREYLVGEALLRDEEYQLIARPLPAIHSLHNAAQLIVSRWGATLHIANLPGGEALSHDEPLIFENTYPFARLLAQGDALVKGESALAAMPARTIVYAEEGEARELHDCLADGQMLMELPAGTTRLTYKQQPFVVTISASATRHPEAYWHGNSLEALSVPGLLFRGTPRLRIEQGTGFSSYAPAHELFVRTQGKELPLAQARAPGLCRLIWRKDGQRLLNTRAVLLPDEASITYAPGATTLEGSIRLHHWPDVPVRCESEQIALERRHDGTGLTLRLKSTGSRPATTVPLCLQWPDGEQKLTLPFPGYGVTLLRNDTPLKLNQALTIEELIGCRAVLMPAQGAENWRIRLTSSGTDSRSTLSQEIRYTGIREIRLFELIPAIQQMMSCHPGLDHVVQLELIHAHQTHARLQVGRYSTRIRLHSQREMASLNDSGSDVLLEQPHAEGLILGLPLAEPEHDPVSLPLHFSEQVFTGSWLVSLPDDAVGPWLLYTSAESPLHSRATIVPPTASQLSKPLTPLREALCEGDGEERMRQLRAALRAMAADPQADDWQTLELLLDRLHHLPLASLDICQALIREPQALTMATLLLDDFSSRLAERLPCELPFEWLLIAPEHWFGTFATLRQQLAADNPRMLSVIRNDIQSKSQFLSRWQPALRFIFDQGLHHSFDLQSPDVGFFLKNPAMLTASWQSYLFDGENSAMQQMFRRNPAETHQYPGSGNTDIGAFLKTPHGQMLLRCCKLPANDFKLATVMLPFMAAFDTYAGRGQQWQADPPRLFSLRNARQFDTVWFDSVYQLGLAMAQAASMQK

SEQ ID NO: 26629 - protein, 2071 aa, Pseudomonas aeruginosa; identical to SEQ ID NO: 26545

SEQ ID NO: 26630 - protein, 1036 aa, Pseudomonas aeruginosa; identical to SEQ ID NO: 26628

SEQ ID NO: 26631 - protein, 2071 aa, Pseudomonas aeruginosa
MLYQKNYFSALTGNLSTRSERAAQGLLSLGNPQLRQFLHDQLTAAPGTPGAWLADPVFEPTFGWQESSETMSSLAGGDLLHRRLAEAMAAPPKEPHDLAEEYAFPSNRHPFTHQLAAWEILNRPEPQSLVVTSGTGSGKTECFLVPVLNQLAKAIDAGEDPEGVRALFIYPLNALINSQQNRLDAWTDGFGGQIRHCLYTGALENERKTSDQQYKGQVIDRKSLRASPPQLLVTNATMLEYMLIRKDDEPILQKSAGKLRWIILDEAHTHIGSQAAEMALLLRRVMLAFQVKPQDVRFVATSATFGSDTQTIESLRTFLADIGGVDPQQVHVVQGHRDIPALLNATPDAEQDTPEAIGAIEADQERSTLRYRRLEASPTARRLRALFMPDGQVKPQSLQGLIRESGLPSAQVLAWLDLLSGTKSAEGLSFLPLRAHLFHNVIPAIRACVDRHCSHKAGTALAHADWPFGMVYLEERTHCRCGAPLMPLVSCEECNESFLQAATKSSSSALVDPTQQQDDEFALEDETTEADDQTKDKDTVSSIQILITNRAVKNGSADFLDRATHRLTPNRPADGGIELQLFRTAKNECPCCGANIQGRSLLRPTRIGTPFTLSTVIGTLLEFCPPDPMPTGKPFQGRKLISFTDSRQGTARIAIKLQQDSERNRIRGLIYQRLLQAQPVNGLSAEDLQDLQDLQTATQLSRIEQKHLQSLLDRQAEATKGAEISWTDMANHLAGTPELQMGMLDYYNNLAPNTFGKQDSVALASMLLAREFYRRPKRANSLETLGLVQVCYPKLANVTGKPMAWPAHLDAESWRTYLKVLLDFFVRENTILNINERWQSLIGARIRPKWVVAPVLGEKPEKLQSRFVRWPAVNTVNGIQSRAILLLCKAFNWSTAAHQDQIDSILSEAWRVLTQQAKLLISSGDGYQLDLKDLSFRLPETVYQCPVSRRFIDTPFEQLSPYTPRTDREMVVKVTPYTLPRPPEALLHVPGDEGLLAIRDWLNSEPQIQQLRKDALWSDVMDRVIEGGHYFRAAEHSAQQPKSKLDSYEGLFKTGRLNLLSCSTTMEMGVDIGGISVVAMNNVPPHPANYLQRAGRAGRRREGRSLALAVCKNTPHDQSVFNNPLWPFNTPMRMPKVSLQSPDLVQRHVNAWLLSHWLKHVVAAQEIKSMTAGAFFLDGELPMSLAARFCLWCDNQAVDTETLVGQALKDITRRSILDTTPQPELFKHASRRMKEIMQAWQQEYSASHAQLLQIADKKAAAYRAMDAQLSRIAKEYLLSELADRRFLPGYGFPTDIVSFDNRCMQTLKREDGDQREDNRARYRSLASRDRITGLREYAPGAELVMDGLVYKSSGITLNWHAPASAENVKELQLFKKAWRCGQCGASDSAINPGLEINCQECGAPIERDNIREYLVPAGFAVDFFDEPHNDISRLQYVPVNAPWLNVPASWVCLANPALGQFRASQQAQLFNYTSGANQKGFAICLECGKAEPMLSYPDASAPANEQYLPAIFRQKAQHRRLRGGKSNEQGDGTNICPGSHNSWKIKQNVHLGHDSLTDALELVLRNPTSGELLNDDITAYSIAVALREAIAADLGIQTEELGCASHPIKVDGQPTRAIQVFDLRSGGYTTQAAERLNEASLWRKVIARLDSCNCSHACQNCLLSFDTRFEAERLNRHVALEWINQTWLAGLALPAELAVFGPKSQAEIATLQEAVERAITRDDNAKTVAIYFTAPAEEWDLAVARRLRHQLHSWESVGHLVQLHLLESTVSSLPRDQKEWLAKLAFNGVQICLHNSIPDLGALALNVSLQGPQGCIAWASDNTNLAAPGHTWDLAEAGARIIRGTPSDLKAERILNAADLMPASPPGLIKIEIGNQLDGSLDNFARRFWEHLGTEANGLINDALTGKDPITELVYSDRYVCSPLVVNLLVSVIHELGRLSDADFAIRILGRQYQREDNRSPWQYRHDWHSARERDEALRQALAYCGREGEVLSLPTLPHYRRLQLKLRSGNQLTIQFDQGLSYWEAERSEKSYQLRFDFASRELGEEIMERIRCKVSAAGEENTQIFLSSS

SEQ ID NO: 26632 - protein, 1036 aa, Pseudomonas aeruginosa; identical to SEQ ID NO: 26540

SEQ ID NO: 26633 - protein, 2071 aa, Pseudomonas aeruginosa; identical to SEQ ID NO: 26545

SEQ ID NO: 26634 - protein, 1036 aa, Pseudomonas aeruginosa; identical to SEQ ID NO: 26628

SEQ ID NO: 26635 - protein, 2071 aa, Pseudomonas aeruginosa; identical to SEQ ID NO: 26545

SEQ ID NO: 26636 - protein, 1036 aa, Pseudomonas aeruginosa; identical to SEQ ID NO: 26628

SEQ ID NO: 26637 - protein, 2071 aa, Pseudomonas aeruginosa; identical to SEQ ID NO: 26631

SEQ ID NO: 26638 - protein, 1036 aa, Pseudomonas aeruginosa; identical to SEQ ID NO: 26540

SEQ ID NO: 26639 - protein, 2071 aa, Pseudomonas aeruginosa; identical to SEQ ID NO: 26545

SEQ ID NO: 26640 - protein, 1036 aa, Pseudomonas aeruginosa; identical to SEQ ID NO: 26540

SEQ ID NO: 26641 - protein, 2071 aa, Pseudomonas aeruginosa; identical to SEQ ID NO: 26545

SEQ ID NO: 26642 - protein, 1036 aa, Pseudomonas aeruginosa; identical to SEQ ID NO: 26540

SEQ ID NO: 26643 - protein, 2071 aa, Pseudomonas aeruginosa; identical to SEQ ID NO: 26545

SEQ ID NO: 26644 - protein, 1036 aa, Pseudomonas aeruginosa; identical to SEQ ID NO: 26540

SEQ ID NO: 26645 - protein, 2071 aa, Pseudomonas aeruginosa; identical to SEQ ID NO: 26545

SEQ ID NO: 26646 - protein, 1036 aa, Pseudomonas aeruginosa; identical to SEQ ID NO: 26540

SEQ ID NO: 26647 - protein, 2111 aa, Pseudomonas aeruginosa; identical to SEQ ID NO: 26595

SEQ ID NO: 26648 - protein, 1111 aa, Pseudomonas aeruginosa; identical to SEQ ID NO: 26600

SEQ ID NO: 26649 - protein, 2071 aa, Pseudomonas aeruginosa 148; identical to SEQ ID NO: 26535

SEQ ID NO: 26650 - protein, 970 aa, Pseudomonas aeruginosa 148
MVTEQALEYRLQDERLRQAIEAQAELLPACYQQAPVYELLDSLVKAVLHIRKAYALQSAQDPIARLQEECPHWEELFPIALDSQAAASLIKGLVRDTVSITPQSRRPPFQIQRGLRFSSDGSIPVYELSFVMQAQARRDQVAEALGMAVDALPPHFQLLLRIGEREYLVGEALLRDEEYQLIARPLPAIHSLHNAAQLIVSRWGATLHIANLPGGEALSHDEPLIFENTYPFARLLAQGDALVKGESALAAMPARTIVYAEEGEARELHDCLADGQMLMELPAGTTRLTYKQQPFVVTISASATRHPEAYWHGNSLEALSVPGLLFRGTPRLRIEQGTGFSSYAPAHELFVRTQGKELPLAQARAPGLCRLIWRKDGQRLLNTRAVLLPDEASITYAPGATTLEGSIRLHHWPDVPVRCESEQIALERRHDGTGLTLRLKSTGSRPATTVPLCLQWPDGEQKLTLPFPGYGVTLLRNDTPLKLNQALTIEELIGCRAVLMSAQGAENWRIRLTSSGTDSRSTLSQEIRYTGIREIRLFELIPAIQQMMSCHPGLDHVVQLELIHAHQTHARLQVGRYSTRIRLHSQREMASLNDSGSDVLLEQPHAEGLILGLPLAEPEHDPVSLPLHFSEQVFTGSWLVSLPDDAVGPWLLYTSAESPLHSRATIVPPTASQLSKPLTPLREALCEGDGEERMRQLRAALRAMAADPQADDWQTLELLLDRLHHLPLASLDICQALIREPQALTMATLLLDDFSSRLAERLPCELPFEWLLIAPEHWFGTFATLRQQLAADNPRMLSVIRNDIQSKSQFLSRWQPALRFIFDQGLHHSFDLQSPDVGFFLKNPAMLTASWQSYLFDGENSAMQQMFRRNPAETHQYPGSGNTDIGAFLKTPHGQMLLRCCKLPANDFKLATVMLPFMAAFDTYAGRGQQWQADPPRLFSLRNARQFDTVWFDSVYQLGLAMAQAASMQK

SEQ ID NO: 26651 - protein, 2071 aa, Pseudomonas aeruginosa BL02; identical to SEQ ID NO: 26545

SEQ ID NO: 26652 - protein, 1115 aa, Pseudomonas aeruginosa BL02
MPLVQWISDFLSRRGLQEPDGRPLFAYKTSSEEFETLRQLLHGLNLGQHAHPEYAQAWLLFAAEWWKREYPGGAWRWGPLCEAAGQRKVAHEKTRSLVIDGRRQWRLQTTIKSEGKRFIGLVAVNGGLPMRLVESAQGGLSRLLRMVTEQALEYRLQDERLRQAIEAQAELLPACYQQAPVYELLDSLVKAVLHIRKAYALQSAQDPIARLQEECPHWEELFPIALDSQAAASLIKGLVRDTVSITPQSRRPPFQIQRGLRFSSDGSIPVYELSFVMQAQARRDQVAEALGMAVDALPPHFQLLLRIGEREYLVGEALLRDEEYQLIARPLPAIHSLHNAAQLIVSRWGATLHIANLPGGEALSHDEPLIFENTYPFARLLAQGDALVKGESALAAMPARTIVYAEEGEARELHDCLADGQMLMELPAGTTRLTYKQQPFVVTISASATRHPEAYWHGNSLEALSVPGLLFRGTPRLRIEQGTGFSSYAPAHELFVRTQGKELPLAQARAPGLCRLIWRKDGQRLLNTRAVLLPDEASITYAPGATTLEGSIRLHHWPDVPVRCESEQIALERRHDGTGLTLRLKSTGSRPATTVPLCLQWPDGEQKLTLPFPGYGVTLLRNDTPLKLNQALTIEELIGCRAVLMSAQGAENWRIRLTSSGTDSRSTLSQEIRYTGIREIRLFELIPAIQQMMSCHPGLDHVVQLELIHAHQTHARLQVGRYSTRIRLHSQREMASLNDSGSDVLLEQPHAEGLILGLPLAEPEHDPVSLPLHFSEQVFTGSWLVSLPDDAVGPWLLYTSAESPLHSRATIVPPTASQLSKPLTPLREALCEGDGEERMRQLRAALRAMAADPQADDWQTLELLLDRLHHLPLASLDICQALIREPQALTMATLLLDDFSSRLAERLPCELPFEWLLIAPEHWFGTFATLRQQLAADNPRMLSVIRNDIQSKSQFLSRWQPALRFIFDQGLHHSFDLQSPDVGFFLKNPAMLTASWQSYLFDGENSAMQQMFRRNPAETHQYPGSGNTDIGAFLKTPHGQMLLRCCKLPANDFKLATVMLPFMAAFDTYAGRGQQWQADPPRLFSLRNARQFDTVWFDSVYQLGLAMAQAASMQK

SEQ ID NO: 26653 - protein, 2071 aa, Pseudomonas aeruginosa BL03
MLYQKNYFSALTGNLSTRSERAAQGLLSLGNPQLRQFLHDQLTAAPGTPGAWLADPVFEPTFGWQESSETMSSLAGGDLLHRRLAEAMAAPPKEPHDLAEEYAFPSNRHPFTHQLAAWEILNRPEPQSLVVTSGTGSGKTECFLVPVLNQLAKAIDAGEDPEGVRALFIYPLNALINSQQNRLDAWTDGFGGQIRHCLYTGALENERKTSDQQYKGQVIDRKSLRASPPQLLVTNATMLEYMLIRKDDEPILQKSAGKLRWIILDEAHTHIGSQAAEMALLLRRVMLAFQVKPQDVRFVATSATFGSDTQTIESLRTFLADIGGVDPQQVHVVQGHRDIPALLNATPDAEQDTPEAIGAIEADQEQSTLRYRRLEASPTARRLRALFMPDGQVKPQSLQGLIRESGLPSAQVLAWLDLLSGTKSAEGLSFLPLRAHLFHNVIPAIRACVDRHCSHKAGTALAHADWPFGMVYLEERTHCRCGAPLMPLVSCEECNESFLQAATKSSSSALVDPTQQQDDEFALEDETTEADDQTKDKDTVSSIQILITNRAVKNGSADFLDRATHRLTPNRPADGGIELQLFRTAKNECPCCGANIQGRSLLRPTRIGTPFTLSTVIGTLLEFCPPDPMPTGKPFQGRKLISFTDSRQGTARIAIKLQQDSERNRIRGLIYQRLLQAQPVNGLSAEDLQGLQDLQTATQLSRIEQKHLQSLLDRQAEATKGAEISWTDMANHLAGTPELQMGMLDYYNNLAPNTFGKQDSVALASMLLAREFYRRPKRANSLETLGLVQVCYPKLANVTGKPMAWPAHLDAESWRTYLKVLLDFFVRENTILNINERWQSLIGARIRPKWVVAPVLGEKPEKLQSRFVRWPAVNTVNGIQSRAILLLCKAFNWSTAAHQDQIDSILSEAWRVLTQQAKLLISSGDGYQLDLKDLSFRLPETVYQCPVSRRFIDTPFEQLSPYTPRTDREMVVKVTPYTLPRPPEALLHVPGDEGLLAIRDWLNSEPQIQQLRKDALWSDVMDRVIEGGHYFRAAEHSAQQPKSKLDSYEGLFKTGRLNLLSCSTTMEMGVDIGGISVVAMNNVPPHPANYLQRAGRAGRRREGRSLALAVCKNTPHDQSVFNNPLWPFNTPMRMPKVSLQSPDLVQRHVNAWLLSHWLKHVVAAQEIKSMTAGAFFLDGELPMSLAARFCLWCDNQAVDTETLVGQALKDITRRSILDTTPQPELFKHASRRMKEIMQAWQQEYSASHAQLLQIADKKAAAYRAMDAQLSRIAKEYLLSELADRRFLPGYGFPTDIVSFDNRCMQTLKREDGDQREDNRARYRSLASRDRITGLREYAPGAELVMDGLVYKSSGITLNWHAPASAENVKELQLFKKAWRCGQCGASDSAINPGLEINCQECGAPIERDNIREYLVPAGFAVDFFDEPHNDISRLQYVPVNAPWLNVPASWVCLANPALGQFRASQQAQLFNYTSGANQKGFAICLECGKAEPMLSYPDASAPANEQYLPAIFRQKAQHRRLRGGKSNEQGDGTNICPGSHNSWKIKQNVHLGHDSLTDALELVLRNPTSGELLNDDITAYSIAVALREAIAADLGIQTEELGCASHPIKVDGQPTRAIQVFDLRSGGYTTQAAERLNEASLWRKVIARLDSCNCSHACQNCLLSFDTRFEAERLNRHVALEWINQTWLTGLALPAELAVFGPKSQAEIATLQEAVERAITRDDNAKTVAIYFTAPAEEWDLAVARRLRHQLHSWESVGHLVQLHLLESTVSSLPRDQKEWLAKLAFNGVQICLHNSIPDLGALALNVSLQGPQGCIAWASDNTNLAAPGHTWDLAEAGARIIRGTPSDLKAERILNAADLMPAPPPGLIKIEIGNQLDGSLDNFARRFWEHLGTEANGLINDALTGKDPITELVYSDRYVCSPLVVNLLVSVIHELGRLSDADFAIRILGRQYQREDNRSPWQYRHDWHSARERDEALRQALAYCGREGEVLSLPTLPHYRRLQLKLRSGNQLTIQFDQGLSYWEAERSEKSYQLRFDFASRELGEEIMERIRCKVSAAGEENTQIFLSSS

SEQ ID NO: 26654 - protein, 1115 aa, Pseudomonas aeruginosa BL03; identical to SEQ ID NO: 26652

SEQ ID NO: 26655 - protein, 2071 aa, Pseudomonas aeruginosa BL09; identical to SEQ ID NO: 26535

SEQ ID NO: 26656 - protein, 1115 aa, Pseudomonas aeruginosa BL09; identical to SEQ ID NO: 26652

SEQ ID NO: 26657 - protein, 2071 aa, Pseudomonas aeruginosa BL12; identical to SEQ ID NO: 26535

SEQ ID NO: 26658 - protein, 1115 aa, Pseudomonas aeruginosa BL12; identical to SEQ ID NO: 26652

SEQ ID NO: 26659 - protein, 2071 aa, Pseudomonas aeruginosa BL13
MLYQKNYFSALTGNLSTRSERAAQGLLSLGNPQLRQFLHDQLTAAPGTPGAWLADPVFEPTFGWQESSETMSSLAGGDLLHRRLAEAMAAPPKEPHDLAEEYAFPSNRHPFTHQLAAWEILNRPEPQSLVVTSGTGSGKTECFLVPVLNQLAKAIDAGEDPEGVRALFIYPLNALINSQQNRLDAWTDGFGGQIRHCLYTGALENERKTSDQQYKGQVIDRKSLRASPPQLLVTNATMLEYMLIRKDDEPILQKSAGKLRWIILDEAHTHIGSQAAEMALLLRRVMLAFQVKPQDVRFVATSATFGSDTQTIESLRTFLADIGGVDPQQVHVVQGHRDIPALLNATPDAEQDTPEAIGAIEADQEQSTLRYRRLEASPTARRLRALFMPDGQVKPQSLQGLIRESGLPSAQVLAWLDLLSGTKSAEGLSFLPLRAHLFHNVIPAIRACVDRHCSHKAGTALAHADWPFGMVYLEERTHCRCGAPLMPLVSCEECNESFLQAATKSSSSALVDPTQQQDDEFALEDETTEADDQTKDKDTVSSIQILITNRAVKNGSADFLDRATHRLTPNRPADGGIELQLFRTAKNECPCCGANIQGRSLLRPTRIGTPFTLSTVIGTLLEFCPPDPMPTGKPFQGRKLISFTDSRQGTARIAIKLQQDSERNRIRGLIYQRLLQAQPVNGLSAEDLQDLQDLQTATQLSRIEQKHLQSLLDRQAEATKGAEISWTDMANHLAGTPELQMGMLDYYNNLAPNTFGKQDSVALASMLLAREFYRRPKRANSLETLGLVQVCYPKLANVTGKPMAWPAHLDAESWRTYLKVLLDFFVRENTILNINERWQSLIGARIRPKWVVAPVLGEKPEKLQSRFVRWPAVNTVNGIQSRAILLLCKAFNWSTAAHQDQIDSILSEAWRVLTQQAKLLISSGDGYQLDLKDLSFRLPETVYQCPVSRRFIDTPFEQLSPYTPRTDREMVVKVTPYTLPRPPEALLHVPGDEGLLAIRDWLNSEPQIQQLRKDALWSDVMDRVIEGGHYFRAAEHSAQQPKSKLDSYEGLFKTGRLNLLSCSTTMEMGVDIGGISVVAMNNVPPHPANYLQRAGRAGRRREGRSLALAVCKNTPHDQSVFNNPLWPFNTPMRMPKVSLQSPDLVQRHVNAWLLSHWLKHVVAAQEIKSMTAGAFFLDGELPMSLAARFCLWCDNQAVDTETLVGQALKDITRRSILDTTPQPELFKHASRRMKEIMQAWQQEYSASHAQLLQIADKKAAAYRAMDAQLSRIAKEYLLSELADRRFLPGYGFPTDIVSFDNRCMQTLKREDGDQREDNRARYRSLASRDRITGLREYAPGAELVMDGLVYKSSGITLNWHAPASAENVKELQLFKKAWRCGQCGASDSAINPGLEINCQECGAPIERDNIREYLVPAGFAVDFFDEPHNDISRLQYVPVNAPWLNVPASWVCLANPALGQFRASQQAQLFNYTSGANQKGFAICLECGKAEPMLSYPDASAPANEQYLPAIFRQKAQHRRLRGGKSNEQGDGTNICPGSHNSWKIKQNVHLGHDSLTDALELVLRNPTSGELLNDDITAYSIAVALREAIAADLGIQTEELGCASHPIKVDGQPTRAIQVFDLRSGGYTTQAAERLNEASLWRKVIARLDSCNCSHACQNCLLSFDTRFEAERLNRHVALEWINQTWLAGLALPAELAVFGPKSQAEIATLQEAVERAITRDDNAKTVTIYFTAPAEEWDLAVARRLRHQLHSWESVGHLVQLHLLESTVSSLPRDQKEWLAKLAFNGVQICLHNSIPDLGALALNVSLQGPQGCIAWASDNTNLAAPGHTWDLAEAGARIIRGTPSDLKAERILNAADLMPAPPPGLIKIEIGNQLDGSLDNFARRFWEHLGTEANGLINDALTGKDPITELVYSDRYVCSPLVVNLLVSVIHELGRLSDADFAIRILGRQYQRGDNRSPWQYRHDWHSARERDEALRQALAYCGREGEVLSLPTLPHYRRLQLKLRSGNQLTIQFDQGLSYWEAERSEKSYQLRFDFASRELGEEIMEHIRCKVSAAGEENTQIFLSSS

SEQ ID NO: 26660 - protein, 1115 aa, Pseudomonas aeruginosa BL13; identical to SEQ ID NO: 26652

SEQ ID NO: 26661 - protein, 2071 aa, Pseudomonas aeruginosa BL20; identical to SEQ ID NO: 26535

SEQ ID NO: 26662 - protein, 1115 aa, Pseudomonas aeruginosa BL20; identical to SEQ ID NO: 26652

SEQ ID NO: 26663 - protein, 2071 aa, Pseudomonas aeruginosa BWHPSA011; identical to SEQ ID NO: 26555

SEQ ID NO: 26664 - protein, 1115 aa, Pseudomonas aeruginosa BWHPSA011; identical to SEQ ID NO: 26652

SEQ ID NO: 26665 - protein, 2071 aa, Pseudomonas aeruginosa BWHPSA023; identical to SEQ ID NO: 26545

SEQ ID NO: 26666 - protein, 1115 aa, Pseudomonas aeruginosa BWHPSA023; identical to SEQ ID NO: 26652

SEQ ID NO: 26667 - protein, 2071 aa, Pseudomonas aeruginosa BWHPSA028; identical to SEQ ID NO: 26535

SEQ ID NO: 26668 - protein, 1115 aa, Pseudomonas aeruginosa BWHPSA028; identical to SEQ ID NO: 26652

SEQ ID NO: 26669 - protein, 1470 aa, Pseudomonas aeruginosa BWHPSA039
MLYQKNYFSALTGNLSTRSERAAQGLLSLGNPQLRQFLHDQLTAAPGTPGAWLADPVFEPTFGWQESSETMSSLAGGDLLHRRLAEAMAAPPKEPHDLAEEYAFPSNRHPFTHQLAAWEILNRPEPQSLVVTSGTGSGKTECFLVPVLNQLAKAIDAGEDPEGVRALFIYPLNALINSQQNRLDAWTDGFGGQIRHCLYTGALENERKTSDQQYKGQVIDRKSLRASPPQLLVTNATMLEYMLIRKDDEPILQKSAGKLRWIILDEAHTHIGSQAAEMALLLRRVMLAFQVKPQDVRFVATSATFGSDTQTIESLRTFLADIGGVDPQQVHVVQGHRDIPALLNATPDAEQDTPEAIGAIEADQEQSTLRYRRLEASPTARRLRALFMPDGQVKPQSLQGLIRESGLPSAQVLAWLDLLSGTKSAEGLSFLPLRAHLFHNVIPAIRACVDRHCSHKAGTALAHADWPFGMVYLEERTHCRCGAPLMPLVSCEECNESFLQAATKSSSSALVDPTQQQDDEFALEDETTEADDQTKDKDTVSSIQILITNRAVKNGSADFLDRATHRLTPNRPADGGIELQLFRTAKNECPCCGANIQGRSLLRPTRIGTPFTLSTVIGTLLEFCPPDPMPTGKPFQGRKLISFTDSRQGTARIAIKLQQDSERNRIRGLIYQRLLQAQPVNGLSAEDLQDLQDLQTATQLSRIEQKHLQSLLDRQAEATKGAEISWTDMANHLAGTPELQMGMLDYYNNLAPNTFGKQDSVALASMLLAREFYRRPKRANSLETLGLVQVCYPKLANVTGKPMAWPAHLDAESWRTYLKVLLDFFVRENTILNINERWQSLIGARIRPKWVVAPVLGEKPEKLQSRFVRWPAVNTVNGIQSRAILLLCKAFNWSTAAHQDQIDSILSEAWRVLTQQAKLLISSGDGYQLDLKDLSFRLPETVYQCPVSRRFIDTPFEQLSPYTPRTDREMVVKVTPYTLPRPPEALLHVPGDEGLLAIRDWLNSEPQIQQLRKDALWSDVMDRVIEGGHYFRAAEHSAQQPKSKLDSYEGLFKTGRLNLLSCSTTMEMGVDIGGISVVAMNNVPPHPANYLQRAGRAGRRREGRSLALAVCKNTPHDQSVFNNPLWPFNTPMRMPKVSLQSPDLVQRHVNAWLLSHWLKHVVAAQEIKSMTAGAFFLDGELPMSLAARFCLWCDNQAVDTETLVGQALKDITRRSILDTTPQPELFKHASRRMKEIMQAWQQEYSASHAQLLQIADKKAAAYRAMDAQLSRIAKEYLLSELADRRFLPGYGFPTDIVSFDNRCMQTLKREDGDQREDNRARYRSLASRDRITGLREYAPGAELVMDGLVYKSSGITLNWHAPASAENVKELQLFKKAWRCGQCGASDSAINPGLEINCQECGAPIERDNIREYLVPAGFAVDFFDEPHNDISRLQYVGVWGAMEPKTNVSSESHRKGAFRSPAHPPGITL

SEQ ID NO: 26670 - protein, 1115 aa, Pseudomonas aeruginosa BWHPSA039; identical to SEQ ID NO: 26652

SEQ ID NO: 26671 - protein, 2071 aa, Pseudomonas aeruginosa C20; identical to SEQ ID NO: 26545

SEQ ID NO: 26672 - protein, 1115 aa, Pseudomonas aeruginosa C20; identical to SEQ ID NO: 26652

SEQ ID NO: 26673 - protein, 2071 aa, Pseudomonas aeruginosa C23; identical to SEQ ID NO: 26545

SEQ ID NO: 26674 - protein, 1115 aa, Pseudomonas aeruginosa C23; identical to SEQ ID NO: 26652

SEQ ID NO: 26675 - protein, 2071 aa, Pseudomonas aeruginosa C2773C; identical to SEQ ID NO: 26555

SEQ ID NO: 26676 - protein, 1140 aa, Pseudomonas aeruginosa C2773C
MRLKKGHDPRTAFEAAHSFTKKELCVPLVQWISDFLSRRGLQEPDGRPLFAYKTSSEEFETLRQLLHGLNLGQHAHPEYAQAWLLFAAEWWKREYPGGAWRWGPLCEAAGQRKVAHEKTRSLVIDGRRQWRLQTTIKSEGKRFIGLVAVNGGLPMRLVESAQGGLSRLLRMVTEQALEYRLQDERLRQAIEAQAELLPACYQQAPVYELLDSLVKAVLHIRKAYALQSAQDPIARLQEECPHWEELFPIALDSQAAASLIKGLVRDTVSITPQSRRPPFQIQRGLRFSSDGSIPVYELSFVMQAQARRDQVAEALGMAVDALPPHFQLLLRIGEREYLVGEALLRDEEYQLIARPLPAIHSLHNAAQLIVSRWGATLHIANLPGGEALSHDEPLIFENTYPFARLLAQGDALVKGESALAAMPARTIVYAEEGEARELHDCLADGQMLMELPAGTTRLTYKQQPFVVTISASATRHPEAYWHGNSLEALSVPGLLFRGTPRLRIEQGTGFSSYAPAHELFVRTQGKELPLAQARAPGLCRLIWRKDGQRLLNTRAVLLPDEASITYAPGATTLEGSIRLHHWPDVPVRCESEQIALERRHDGTGLTLRLKSTGSRPATTVPLCLQWPDGEQKLTLPFPGYGVTLLRNDTPLKLNQALTIEELIGCRAVLMSAQGAENWRIRLTSSGTDSRSTLSQEIRYTGIREIRLFELIPAIQQMMSCHPGLDHVVQLELIHAHQTHARLQVGRYSTRIRLHSQREMASLNDSGSDVLLEQPHAEGLILGLPLAEPEHDPVSLPLHFSEQVFTGSWLVSLPDDAVGPWLLYTSAESPLHSRATIVPPTASQLSKPLTPLREALCEGDGEERMRQLRAALRAMAADPQADDWQTLELLLDRLHHLPLASLDICQALIREPQALTMATLLLDDFSSRLAERLPCELPFEWLLIAPEHWFGTFATLRQQLAADNPRMLSVIRNDIQSKSQFLSRWQPALRFIFDQGLHHSFDLQSPDVGFFLKNPAMLTASWQSYLFDGENSAMQQMFRRNPAETHQYPGSGNTDIGAFLKTPHGQMLLRCCKLPANDFKLATVMLPFMAAFDTYAGRGQQWQADPPRLFSLRNARQFDTVWFDSVYQLGLAMAQAASMQK

SEQ ID NO: 26677 - protein, 2071 aa, Pseudomonas aeruginosa CF127; identical to SEQ ID NO: 26555

SEQ ID NO: 26678 - protein, 1115 aa, Pseudomonas aeruginosa CF127; identical to SEQ ID NO: 26652

SEQ ID NO: 26679 - protein, 2071 aa, Pseudomonas aeruginosa NCMG1179; identical to SEQ ID NO: 26555

SEQ ID NO: 26680 - protein, 970 aa, Pseudomonas aeruginosa NCMG1179; identical to SEQ ID NO: 26650

SEQ ID NO: 26681 - protein, 2111 aa, Pseudomonas aeruginosa PA21_ST175; identical to SEQ ID NO: 26547

SEQ ID NO: 26682 - protein, 1111 aa, Pseudomonas aeruginosa PA21_ST175; identical to SEQ ID NO: 26548

SEQ ID NO: 26683 - protein, 2111 aa, Pseudomonas aeruginosa PA99; identical to SEQ ID NO: 26595

SEQ ID NO: 26684 - protein, 1111 aa, Pseudomonas aeruginosa PA99
MSYSVIKYSSWLGRFLQRRGLSAPDQRGLYAYHCSLEEYGELQHLLREFGGFDAALKDPAACACLVLFGSEWYRREYRSEYAWTWDPIWKTLGFNLSPGELSKVIPKGLEGYWKRPLHFYEAGHRDFLGSLFGEGGLPFQVLREGGSRFQWLFDRLLRQYDQWHLLGFNTLQQVEQQLEKASLPQVFASRTSIELIARMVDELVALVRNYGLAQADEPVVRLDALNPKWRELFPLPLDNETGSELLNGLLKTATIEGKKRRRDATGWSCRHFWHEAQPDVLKVQVSMPEEVVLRLTTQPSTTRFELAIVEDGQAIAALGPGYALVDNGVAHIRLRLREVIGKRQDCSAQLSLVAMAGGMLIATQPIEGSAVALGEVPLGFEPVNDRWQLCGQASFNTAGEELLLVLPEGGKLNMAAEGEEAIFSDMAPAFSLHTVKVQGKAQFQVESDELYRIRTGHAVGMGLGLELAGTQIDWPTKPALTFVGLPRVQWPTAAGELQQQGGDLYVAGKQPGSGLLQEVLGTQYVSVRNRSGNALLRRRVGILPTDFRVELRSGEKPGQGSILVHSRQRCLLQIVDDSLQVQQVKREDHTELRLSAKGFPPVRVRLSVTPSLMADPVEIDLPFPNSGFLAFDGTGKHLKRDLSVDDLLGARLYLFGRAGAPTRFSLELTLRGSAARNACYSWTYTVAEKPLELSLFNIREQIVDLLSLQSGIDQVVELRVFGNGQDTSYRIRRYSTEMQLDRDRQMLCAANLHDGADAIPEPVLMLLHDPMRSSIALRSRTSEGVPTGDFELPIAVERDGPWLVLPKSGSSVSFRPLFIAGGWKPLAPSDGIQSLQKAVLTFDHASPVSSFTPVLDAMAVNPMHSGWQFLRALYEGYGYLPLATFEVWKALVGHTRALAMALFKFEMEATFLGRLETEFPIFWEFLPITEIHLAAKRFAAFLKVKGVAEEAIDALIGRMFSRLGETYSAYGQSVQRFLSGKPVGPEIKVPLATFKSVLHGWYLELIRERSEAKWPEFGCKRLERWHSSQGCSVIAFRSEMDYRNAVLYLPVFAAAVACGKARFTDAFADGVEAIFFLRQVRDFDSKWFNSIYQYCLLNSVMDMQKAESVNG

SEQ ID NO: 26685 - protein, 2066 aa, Pseudomonas aeruginosa PAK; identical to SEQ ID NO: 26615

SEQ ID NO: 26686 - protein, 1028 aa, Pseudomonas aeruginosa PAK
MSHEKTRKLVIEGRRQWRLQTAIKNEGKRFIGLVVVNGGLPMRLVESAQGGLSGLLRMVTLQAVDYNLHDEQLRQAIEAQAALLPACYQQAPVYELLDNLIKAVLHIRRTYALTGAQDPIAKLQEECPQWEELFPIALDNQAAASLIKGLVRGIVDITPQAKQLPFQILRGLRLSSDGSMPVYELSFAMQAQAKRDRIAEALGMVADRLPPHFQLLLRIGEREHLVGEALLRDDEYQLIARPLPPIQTVHEAAQLIVSRWGATLHIANLPGGEALSHDEPLIFENSYPFARLIAQGDALVKGLSALAVMPARTIVLAEEGETRELHDCLADGQMLMELPAGKTRLAYRGQAFIVTVSAIATHRPEAYWQGNSLEALSVPGLLFRGTPRLRVDQGLGHSSYAPSHELFVRSHSKELPLGEAQAPGLCRLIWRKDGQRLLSTRAVLLPEGASITYVPAASTLEGVIRLDNWPDVPVRCENEEIELDSRHDGTSLVLRLKSTSARPATSVPLCMQWPDGEHRLTLPFPGYGVTLQRNNLPLKSNQALTIDELIGCRALLMSAHGAEHWQVRLTSVGPDARSTLSQEIRYTGIREIRLFELIPTIQQMLSCHPGLDHAVQLELMHTHQTRARLQVGRYSTRIRPHSQKQMVSLSNGGRDLILEQPQAEGLMLALPLAEPDHEPVSLPLHFSEQVFTGNWLVSLPTDATGPWLLYTSDESPLHSRPTVVPPTMIGLSKPLTPLRQALCAADGEVRMSMLRAALRTMVADPHDKDWQTLELLLERLHHLPPASLDICQALIREPQALAMTTLLLDGFSSRMAERLPSELPFEWLLIAPDHWFDTFSILRQQLAAGDDRLLSIIRHDIQSKSQYLSRWQPALRFIFEQGFHRYFDLQSQDVGFFLKNPAVLTGIWLDRLFEGGEKSAMQRMFQRNPAETHQYPAAGNTNIGAFLKTTHGQLLLRRSKLPANDFKLAVVMLPFMAAFDAHAGHGRQWQADPARLLSLRNARLFDTVWFDSAYELGLAMAQADSMLK

SEQ ID NO: 26687 - protein, 2068 aa, Pseudomonas aeruginosa PS42
MLYQKNYFSALTSNLSTRSERAAQGLLSLGNPQLRQFLHDQLTAAPGTPGAWLADPVFEPTFGWQESSETMSSLAGGNLLHRRLAEAMAAPPKEPHDLAEEYAFPSNRHPFTHQLAAWEILNRPEPQSLVVTSGTGSGKTECFLVPVLSQLAKEIDAGEDPEGVRALFIYPLNALINSQQNRLDAWTHGFGGQIRHCLYTGALENERRNRDQQYDGQVIDRKSLRASPPQLLVTNATMLEYMLIRKDDEPILQKSAGKLRWIILDEAHTHIGSQAAEMALLLRRVMLAFQVKPQDVRFVATSATFGSDTQTIESLRTFLADIGGVDPQQVHVVQGHRDIPALLNATPVAEQDTPEAICAIEADQEQSTLRYQRLEASPTARRLRALFMPDGQVKPQSLQGLIRESGLPSAQVLAWLDLLSGTKSAEGLSFLPLRAHLFHNVIPAIRACVDRHCSHKAGTALEHADWPFGMVYLEERTHCRCGAPLMPLVSCEECNESFLQAGTKGSSELVDPTQQQVDEFALDEDSAGAEDQAEDTVSSIQILITNRAVKNYSGDFLDRTTQRLTPNRPADGGIELQLFRTIKNECPCCGANIQGRSLLRPARIGTPFTLSTVIGTLLEFCPPDPMPTGKPFQGRKLISFTDSRQGTARIAIKLQQDSERNRIRGLIYQRLLQAQPIDGLSAEDLQDLQDLQTATQLSRIEQKHLQSLLDRQAEATKGAEISWTDMANHLAGTPELQMGMLDYYNNLAPNTFGKQDSVALASMLLAREFYRRPKRANSLETLGLVQVCYPKLANVTGKPMAWPAHLDAESWRTYLKVLLDFFVRENTILNINERWQSLIGARIRPKWVVAPVLGEKPEKLQSRFVRWPAVNTVNGIQSRAILLLCKAFNWSTAIHQDQIDSILSEAWRVLTQQAKLLITSGDGYQLDLKDLSFRLPETVYLCPVSRRFIDTPFEQLSPYTPRTDREMVVKVTPYTLPRPPEALLHVPGDEGLLAIRDWLNSEPQIQQLRNDALWSDVMDRVIEGGHYFRAAEHSAQQPKSKLDSYEGKFKTGKLNLLSCSTTMEMGVDIGGISVVAMNNVPPHPANYLQRAGRAGRRREGRSLALAVCKNTPHDQSVFNNPLWPFNTPMRMPKVSLQSPDLVQRHVNAWLLSHWLKHVVAAQEIKSMTAGAFFLDGELPMSLAARFCLWCDNQRVDTEALVEQSLKDITRRSILDTAPQPELFKHASSRIAEIMQAWRQEHSASHTQLQQITDKKAAAYRAMEAQLSRIEKEYLLSELADRRFLPGYGFPTDIVSFDNRCMQTLKREDGDQREDNRARYRSLASRDRITGLREYAPGAELVMDGLVYKSSGITLNWHAPASAENVKELQLFKKAWRCGQCGASDSAINPGLEINCQECGAPIERDNIREYLVPAGFAVDFFDEPHNDISRLQYVPVKAPWLNVPANWICLANPALGQFRASQQAHLFNYTSGANQQGFAICLECGKAEPMLSYPDASAPANEQYLPAIFRQKAQHRRLRGGKSNEQGDGTNICPGSHNSWKIKQNVHLGHDSLTDALELVLRNPTSGELLNDDITAYSIAVALREAIAADLGIQTEELGCASHPIKVDSQPTRAIQVFDLRSGGYTTQAAERLNEASLWRKVIARLDSCNCSHACQNCLLSFDTRFEAERLNRHVALEWINQTWLAGLALPAELAVFGPKSQAEIATLQEAVERAITRDDNAKTVAIYFTAPAEEWDLAVARRLRHQLHSWESVGHLVQLHLLESTVSSLPRDQKEWLAKLAFNGVQICLHNSIPDLGALALNVSLQGPQGCIAWASDNTNLAAPGHTWDLAEAGARIIRGTPSDLKAERILNAADLMPAPPPGLIKIEIGNQLDGSLDNFARRFWEHLGTEANGLINDALTGKDPITELVYSDRYVCSPLVVNLLVSVIHELGRLSDADFAIRILGRQYQREDNRSPWQCRHDWHSARERDEALRQALAYCGREGEVLSLPTLPHYRRLQLKLRSGNQLTVQFDQGLSYWEAERSEKSYQLRFDFTSRELGEEIMERISCKVSAAGEENTQIFLSSS

SEQ ID NO: 26688 - protein, 1115 aa, Pseudomonas aeruginosa PS42
MPLVQWISDFLSRRGLQEPDSRPLFAYRTSSEEFEILRQLLHGLNVGQHAHPKYAQAWLLFAAEWWKREYPGGAWRWGPLCEAAGQQGLPQDKTRRLVIDGRHLWRLQTAIKNEGKRFIGLVAVNGGLPMRLVESAQGGLSGLLRMVTEQALRYELQDEQLRQAIEAQAELLPACYQQAPVYELLDNLVKAVLHIRKTYALQGAQDPIARLQEECPHWEDLFPIALDSQAAASLIKGLVRDTVSITPQSRRPPFQIQRGLRFSSDGSMPVYELTFAMQAQARRDQVAEALGMAMEALPPHFQLLLRIGEREYLVGEALLKDEEYQLIARPLPAIHSLHNAAQLIVSRWGATLHIANLPGGEALSHDEPLIFENTYPFARLLAQGDALVKGESALAAMPARTIVYAEEGEARELHDCLADGQMLMELPAGTTRLTYKQQPFVVTISASATRHPEAYWHGNSLEALSVPGLLFRGTPRLRIEQGTGFSSYAPAHELFVRTQGRELPLAQARAPGLCRLIWRKDGQRLLNTRAVLLPDEASITYAPGASTLEGSIRLHHWPDVPVRCESEQVALERRHDRTGLLLRLKSNGSRPATTVPLCLQWPDGEQRLTLPFPGYGVTLLRNDTPLKLNQALTIEELIGCRAVLMSAQGAENWQIRLTSSGADARSTLSQEIRYTGIREIRLFELIPAIQQMLSCHPGLDHVVQLELIHAHQTHARLQVGRYSTRIRLHSQREMASLNDSGSDVLLEQPHAEGLILGLPLAEPEHDPVSLPLHFSEQVFTGSWLVSLPDDAVGPWLLYTSAESPLHSRATIVPPTASQLSKPLTPLRKALCEANGEERMCQLRAALHTMAADPEAEDWQTLELLLDRLHHLPLASLDICQALIREPQALATATLLLDDFSSRLAERLPCELPFEWLLIAPKHWFDTFATLRQQLAADNPRLLSVIRNDIQSKSQFLSRWQPALRFIFDQGLHHSFDLQSPDVAFFLRNPAMLTDSWLSQLLDGEHSAMQQMFRRNPAETHQYPGSGNTDIGEFLKTPHGQMLLRHCKLPANDFKLTTVMLPFMAAFDTYSGHGQQWQADPARLFSLRNARQFDTVWFDSAYQLGLAMAQAASMQK

SEQ ID NO: 26689 - protein, 2071 aa, Pseudomonas aeruginosa S35004; identical to SEQ ID NO: 26555

SEQ ID NO: 26690 - protein, 1115 aa, Pseudomonas aeruginosa S35004; identical to SEQ ID NO: 26652

SEQ ID NO: 26691 - protein, 2071 aa, Pseudomonas aeruginosa SG17M; identical to SEQ ID NO: 26545

SEQ ID NO: 26692 - protein, 1140 aa, Pseudomonas aeruginosa SG17M; identical to SEQ ID NO: 26676

SEQ ID NO: 26693 - protein, 2066 aa, Pseudomonas alcaligenes NBRC 14159
MLYQKNYFSALTDNLSTRSERAAQGLLSLGNPQLRQFLHDQLTAAPGTPGAWLADPVFEPTFGWQESAETMSSLAGGNMLHQRLARAMESPPKDLAQEYTFPGNRHPFTHQLAAWDILNRAVPQSLVVTSGTGSGKTECFLVPVLNQLAKEIDTGEDPEGVRALFIYPLNALINSQQNRLDAWTDGFGGQIRHCLYTGALENERKVSDQQYKGQVIDRKSLRERPPQLLVTNATMLEYMLIRKEDEPILQKSAGKLQWIILDEAHTHIGSQAAEMALLLRRVMLAFQVKPQDVRFVATSATFGSDTQTIESLRKFLADIGGVAPEQVHVVQGHRDIPTLRNAAPDAVQDTPEAISTIEAEQEQSTLRYQRLEASPTARRLRSLFTPDGQVKPQSLQGLAKDSDLPLTKVLAWLDVMSGTKNADGLSFLPLRAHLFHNVIPAIRACVDQNCPHKAGTALEHADWPFGMVYLEERTHCNCGVPLMPLVSCEECNESFLQAKPTSSGKLIDQSQQQVDEFSLDEESTDIEDPADTDNDALSQILITNRNVGHVRSEYLDRNSQKLMFDGPKDGYIELQIFQSSRNECPCCGATIQGRGLLRPARVGTPFTLSTVISTLLEFCPPDQMPSGKPFQGRKLISFTDSRQGTARIAVKLQQDSERNRIRGLIYQRLLQAQPVTVMSEEELQELCELQAQASSQKLERYAQKYLEQLLEKQAEAAKGAEIGWTDMVDYLASTSDLQLGVLDYYHSLAPKTFGKQDSVALAKMLLAREFFRRPKRANSLETLGLVQVCYPKLASITSKPLAWPAYLNVESWRAYLKVLLDFFVRQNAVLNIDKQWQPLIGVRISPKWVVAPVFDGKAERLSGRYVRWPTVNTVSSVQSRAILLLCKAFNWSTAVHQDHIDSILREAWNALTQQAKLLISSGDGYQLDFKDLSFRLPNEVYLCPVTRRFIDTPFEQLSPYTPRTDREMVVKVMPYTLPRPPETLLHSPGDEALLAIRDWLNNLPEIQKLRQDALWSDVMDLVIEGGNYFRAAEHSAQQSKSKLDTYEGLFKAGKLNLLSCSTTMEMGVDIGGISVVAMNNVPPHPANYLQRAGRAGRRREGRSLALAVCKNTPHDQSVFNNPLWPFNTPMRMPKVSLQSPDLVQRHVNAWLLSHWLKHVVAAQEIKSMTAGTFFLDGEMPMSLAARFCLWCDNQAVDTEAPVEQALKDITLRSILDTTPQHELFKRASSRMNEIMQAWRQEHSASYAQLLQIADKKAAASRAMEAQLSRIEKEYLLSELADRRFLPGYGFPTDIVSFDNRCMQTLKQEEVDKREDNRARYRSLASRDRITGLREYAPGAELVMDGLVYKSSGITLNWHAPASAENVKELQLFKKAWRCGQCGASDTAITPGLEINCQECGAPIESDEVREYLVPAGFAVDFFDEPHNDISHLQYVPVKNPWLNVPASWVCLANPALGQFRASQHAHLFHYTSGANQKGFAICLECGKAEPMLSHPDTSAPANEQYLPAVFRQKAQHRRLRGGKNDDGENVCPGSHNSWKIKQNIHLGHDSLTDALELILRNPSSGELLNDDVTGYSIAVALREAIAAELGVQTEELGCDCHPIKVDGYPSRAIRVFDLRSGGYTTQAAERLNASGLWQRVITRLDSCDCSHACQRCLLSFDNRFEADRLDRHAALAWINQSWLAGLALPTELAVFGPQSQAEITNLQEAVERAITLDDSRKIVAIYLTAPSEEWDLAVARRLRHQLHSWDSAGHQVQLHLLESTVSTLPGDQKEWLAKLAFNGVQVCLHNVIPDLGALALNVTLQGPQGCIAWASDNANLTAPGHTWDLAEAGARIIRGTLSALKAERILNAADLMPAPPTGLIKIEIGNQLDGSLDNFARRFWEHLGTEANGLINDALTGKDPITELVYSDRYVCNPLVVNLLVSVIHELGRLSDVDFAIRILGRQYQREDNRSPWQCRHDWRSARERDEALRQALAYCGLEGEVLSLPTLPHYRRLQLKLRSGNQLTIQFDQGLSYWEPERSEKSYQLRFDFASRELGEEIMERIRCKISAAGEENTQIFLSSS

SEQ ID NO: 26694 - protein, 1115 aa, Pseudomonas alcaligenes NBRC 14159
MPLVQWISDFLSRRGLQEPDGRPLFAYKTSSEEFETLRQLLHGLNLGQHAHPEYAQAWLLFAAEWWKREYPGGAWRWGPLCEAAGQRKVSHEKTRSLVIDGRRQWRLQTTIKSEGKRFIGLVAVNGGLPMRLVESAQGGLSGLLRMVSEQALRYNLHDEQVHQAIEAQAALLPACYQQAPVYELLENLVKAVLHIRKTYSLQGAHDPISKLREECPQWEELFPIALDSQAAASLIKGLVKGIVSITPQSRRPPFQIQRGLRFSSDGSAPVYELSFAMQAQAAREQVAEALGTTGAALPPHFQLLLRIGEREYLVGEALLRGEEYQLIARPLPTIRSLHEPAQLIVSRWGATLHIANLPGGEALSPDEPLIFENAYPFARLLAQGDALVKGESALALMPAKTIVFSEEGEARELYDCLADEQVLIELPAGVTRLTYRKQPFIVTISTSASHHPEAYWQGDSLEVLSVPGLLFRGKPRLRIEQATGFTSHAPAHELFVRAQGKEVSLAQAKAPGLCRLTWRKDGQRLMNNRAVLLPEDASIAYVPGASPFEGSVRLRLWPDIPVHCENEQIELKRHHDGAALILQLKSIGSRPATTVPLCLQWPDGEQRLTLPFPGYGVTLLRNGIQLKSNQALTIEDLVGCRALLMSAQGAENWLVRLTSSGDASRSTLSQEIRYTGIREIRLFELIPAIQQMLSCHPRLDHVVQLELIHSHQTHARLQVGRYSTQLRLHSDREMASLSDGGRDLLLDQEEAEDLVHGLPLAEPEHDPVSLPLHFSEQVFTGNWKVSLPDDAVGPWLLYTRDDSPLHSRPTIVPSTANDLSKPLSPLRKALCEANGEERMHLLRATLRLMAADPKVEDWQILELLLDRLHHLPLASLDICQALIREPQALAMATLLLDDFSSRLAERLPCELPFEWLLIAPEHWFDTFATLRQQLAADDPRLLSLIRNDIQSKSQFLSRWQPALHFIFDQGLHRSFDLQSRDVGLFLKNPAVLTTAWQSHLFDGENSAMQQMFRRNPAETHQYPGSGNTDVGAFLKTPHGHMLLRCSKLPANDFKLATVMLPFMAAFDTYAGRGRQWQADPARLFSLRNARQFDSVWFDSAYQLGLAMAQAASMQK

SEQ ID NO: 26695 - protein, 2066 aa, Pseudomonas alcaligenes NBRC 14159
MLYQKNYFSALTTNLSTRSERAAQGLLSLGSPHLRQFLHDQLTASPGTPGAWLADPVFEPTFGWEESNETMGSLSGGNLLHPRLAEAMASPPKDLAQEYTFPVTRHPFTHQLAAWKTLNSPEPQSLVVTSGTGSGKTECFLVPVLNHLAKEIDAGEDLEGVRALFIYPLNALINSQQNRLDAWTDGFGGQIRHCLYTGALENERKASDQQYKGQVIDRKSLRERPPQLLVTNATMLEYMLIRKDDEPILQKSAGKLRWIILDEAHTHIGSQAAEMALLLRRVMLAFQVKPQDVRFVATSATFGSDMQTIESLRKFLADIGGVTPDQVHVVQGHRDIPALLDAKPETSQDTPESIGAIEGEQEQSALRYRRLEASPTARRLRSLFIPDGQVKPQSLLGLTRASGLTAAQILAWLDLMSGTKSADGLSYLPLRAHLFHNVIPAIRACVDRNCAYKAGTALDHAEWPFGMVYLEERTHCRCNAPLMPLVSCEECNESFLQAKPTSSGRLIDQSLQQVDEFSLDEDSADTEDQADNDSESLSQILITNRPVAHGSSEFLDRTSQKLMFDGPKEGYIELQVFQSHKNECPCCGATIQGSSLMRPARIGTPFTLSTVIGTLLEFCPPDPMPSGKPFQGRKLISFTDSRQGTARIAVKLQQDSERNRIRGLIYQRLLQAQPTAAMSEEELQEFRDLQARAASQTLDRYAQKYLEQLQEKQTETAKGTAICWTDMVNHLASTPDLQLGILDYYHGLAPKTFGKHDSIALAKMLLAREFFRRPKHANSLETLGLVQVCYPKLTNITTKPMAWPAHLDVESWRTYLKVLMDFFVRQNAILNIDRQWQSLIGIRISPKWVVAPVSDGKLERLPGRYVRWPSVNTVSSAQSRPILLLCKAFNWSTAAHQDQIDSILRDAWQALTQQAKLLISSGDGYQLDLNDLSFRLPTEVYLCPVSRRFIDTPFEQLSPYTPRTDRAMVVKVTPYTLPRPPEDLLYLPGDDGLLAIRDWLNTQPEIQQLRQESLWSDVMDLVIEGGNYFHAAEHSAQQPKHKLDTYESMFKAGKLNLLSCSTTMEMGVDIGGISVVAMNNVPPHPANYLQRAGRAGRRREGRSLALTVCKNTPHDQSVFNNPLWPFTTPMRMPKVSLQSPELVQRHINAWLLSHWLKHVVAAQEIKSMTAGAFFLDGEMPMSLAKRFCLWCNNQASEADPQVVQAIKDITRRSILDSTPQSELLNRASSNLAEIMQTWRQEHEASRSQLLQIADKKAVASRAMEAQLSRIEKEYLLSELADRRFLPGYGFPTDIVSFDNRCMQTLKLEEADKREDNRVRYRSLASRDRVTGLREYAPGAELVMDGLVYKSSGITLNWHAPASAEGIKELQLFKKAWRCGQCGASDTAINPGLEINCQDCGALIERDEIREYLVPAGFAVDFFDEPHNDISRLQYVPVKAPWLNLPSSWVCLANPALGQFRSSQQAHLFHYTSGANQQGFAICLECGKAEPMLSHPDTSAPANEQYLPAIFRQKAQHRRLRGGKNDDGENICPGSHNSWKIKQSIHLGHDSLTDALELVLRRPSNGELLNDDITGYSIAVALREAIAAELGVQTEELGCDCHPIRVDGSPTRAIRIFDLRSGGYTSQAAERLNDSSLWQRVITRLDSCNCSHACQRCLLSFDTRFEADRLNRHAALEWINQTWLTGLKLPAELAVFGSQSQAEITTLQEAVERAITQDDSAKTVTVYLAAAAEDWDLSVARRLRHQLQNWEDAGHQVQLHLLESTFAALPADQREWLAKLSFNGIEIGLNKAMPDLGVLALNISVHGPRGNFAWASDNVNLAAPGRTWDLAAAGVRIIRGVSPILKTERVLDTSDLMPPTTQGLVKVEIGNHLDGSLDGFARRFWEHLRQEARSLLANAITGQDPIIELVYSDRYVCSPLVVNLLVNLIHEIGAHSDDVFAIRIQGRQYQKDDNRSPWQCWHDWRTSQERDHAIRQAFEYCGLEADVLSLPSLPHYRQLQLQLRSGKQLTIQFDQGLSYWEAERSGKPYLLRFDFSSPRLGEEIMTRIQCRVLAASDENTQIFISST

SEQ ID NO: 26696 - protein, 1116 aa, Pseudomonas alcaligenes NBRC 14159
MALAQWISDFLSRRGLQEPDGRPLFAYKTSSEEFEALRQLLQNLPGGQQVTPSYPQAWLLFAAEWWKREYSGGAWRWGPLCEAAGQRGLSHEKTRKLVIEGRRQWCLQTAIKNEGKRFIGLVAVNGGLPMRLVESAQGGLSGLLRMVTLQAVDYDLHDEQLRQAIEAQAALLPACYQQAPVYELLDNLIKAVLHIRRTYALKVAQDPIAKLQEECPQWEELFPIALDSQAAASLIKGLVRVTVGITPQSRRPPFQIQRGLRFSSDGSMPVYELSFAMQAQAKRDQVAESLGLAADRLPPHFQLLLRIGEREHLVGEALLRDDEYQLIARPLPSIQTVHESAQLIVSRWGATLHIANLPGGEALSHDEPLIFENTYPFARLIAQGDALVKGLSALAVMPARTIVLAEEGETRELHDCLADGQMLMELPAGKTRLAYRGQAFIVTISASASHRPEAYWQGNSLEALSVPGLLFRGTPRLRVDQGPGHSSYAPSHELFVRSHSKELALGEAQAPGLCRLIWRKDGQRLLSTRAVLLPAGASITYVPAASTLEGTIRLDNWPDVPVRCENEEIELDSRHDGTSLILRLKSTSAQPATSVPLCLQWPDGEHRLTLPFPGYGVTLRRDNLPLKPNQALTIDELIGCRALLMSAKGAEHWQVRLTSVGPDARATLSQEIRYTGIREIRLFELIPAIQQMLSCHPGLDHAVQLELIHTHQTRARLQVGRYSTRIRPHSQRQMVSLSDGGRDLILEQPQAEGLMLALPLAEPDHEPVSLPLHFSEQVFTGNWLVSLPTDATGPWLLYTSDESPLHSRPTVVPPTMIGLSKPLTPLRQALCEADGEVRMSMLRAALRSMVNDPQDKDWQTLELLLERLHHLPPASLDICQALIREPQALAMTTLLLDGFSSRMAERLPSELPFEWLLIAPDHWFDTFAILRRQFAASDDRLLSIIRHDIQSKSQYLSRWQPALRFIFEQGFHRYFDLQSQDVGFFLRSPAVLTGTWLDRLFEGGEKSAMQRMFQRNPAETHQYPGAGNTNIGAFLKTTHGQLLLRRSKLPANDFKLAVVMLPFMAAFDAHAGHGQQWQADPARLLSLRNARQFDTVWFDSAYELGLAMAQAGSIQK

SEQ ID NO: 26697 - protein, 2105 aa, Pseudomonas bauzanensis
MRFFRDLIEQSLERTREATLGVLGIKHPGLRHHLSQSIVNELGDDDCFLAPPVFEHTFGWNESNVKLQDLQGDLLSTSLLDTLERPHYRPDPNLSVEKRPYRFARHQYPYTHQLQAWRVLLDEEPRSAVITTGTGSGKTECFMVPILEDLVREHERSESALVGVRALFLYPLNALINSQQERLDAWTHKYGNNIRFCLYNGKTEERADKVRKDQQQKPNQILSRELLRREPAPILMTNATMLEYMLVRQVDNPILEISRQQQSLRWIVLDEAHTYVGSQAAELSLLLRRVVQAFGRQSEQIRFVATSATIAGEDAEERLKRYLADLADVPLEQVDVIGGSRVWPDLVLNSPSKNIALQEIRHIEPEADVSPARFEMLTQSTIARRLRHAVISSAKPLDLNDLLDEVADQLQGDSLGERQQEVLDWLDTMTGTHPDEGQPPFLKLRIHLFQRMLHGLWACVDPQCSAKPSHLQDWPFGNVYVTQRARCKCHAPVYELGFCDDCKTPHLLAEDRNGELHQLSTYAGDEFALNHENGSEDAPPEVLTANTSSTRLIIAGLSAAHEPYFPTTLDLESQKLGAVNVPRNIKLFLVREGKESSGKKEKDCACCSHCNNSSFGTSDFLRKAYLGAPFYIANAVPTVLEFCPDPDKADCEGRSPEELPGRGRKLITFTDSRQGTARMAVRMQQEAERSRLRGLVFETLRNAQAKADAAPKDTPSGSPAELLNLAENLEKQGLAGMAAELRKQAELLQSGAAPANEAEIIPWPQMAESLAAARDIDKFILRYNRYANPALFDGSEGGMTMARLLLAREFSRRPKNQNSTETLGLIKVGYQGLDKVTTTPPLWVDSRATPAVGAASDPRSALTLDDWRDFLKVALDFYVRENTFIPMENKMRRWMGSRFSPKALYSPKSDVQESNIIRKWPQIKQGTPHRLIRLLELATGLNRTMNADADKINSWLEAAWLALVNAGILEASDTGYRLRLETLTFSLPTDGWVCPLTRRIFDTTFRGLTPYLPQKLMSQDYRCQKIQIPAFSTLMPDGSPAPKQLQIRHLVARDAVIDQLRQESLWTDISDRTVEGGFYYRTAEHSAQQSAKRLDDYVEEFKRGDINVLNCSTTMEMGVDIGGISAVVMNNLPPHPANYLQRAGRAGRRSEARAIAYTLCKADPHNQRAFSNPKWPFVTAIPAPSITLSSARIVQRHVNSLLLSLFLRTHSSNNGDRTKLTLHWFFAPDDSPGQQLMAWLTAGPDDFDRAVKQLVRGTCLEGRSLSSITGETRLALRNLEERWLSEYRNINQKLQAASDGPYKKALALEKQRHENEYLLRYLASSAFLPGYGFPTDVVSLKTYNVEDFLHQHWKSDASREDSIFDNKEMPSRSLNIAIREYAPGAQVVIDGRVYRSAGVSLQWHADGQVNEAQKFDIAWRCPECGNTGLVENAYANNEGLCCSHCTTPIPSSERHMVLRPGGFVTDFYEETTNDVTSQKFIRVERPRIQLNAESIALPDQRCGFVRFGHEGSVFHHSSGEHEKGYAICMTCGRAESMLASGEVPKDLQPDKAHRPVGGLAGSRKERDCSGEAVKANLHLGYQIRTDVLEVFLRNPLTGEWLSDTPEDRLIATTLGVAMRDVIADRLGIASSEMGFSHRLDRDRDTRQGRSVIQLFDEVSGGAGFVLAGLSDIALLLGKALDRLQCPANCENVCSHCLASQDSRVEREELDRKLALRWLSEARLVEHLGLPDTFAELHGARYCSLGPLRELSAAINSLDRRDQTASILLCLYGDCADWDLDHPRFREQLLTWAVTERLKVRLGIADPLLLGAEQKETLALLVRLGVELVELPIEVLHAPYLVAQLSSQAGVRSLYSNINNVGVPGADWLQGHADVVWATSKLMPAVTGNSIDSRSWHQPLHGARIVEISSQLDGPVNTLRKRLTVLIDAQMPELAALIRNDQAISVSYSDRYLKSPLTLMFLTGFLELFRSDELQTISIQTLAPGGNQPSYLLNHDWMRADEQKSVLRFWLTEQFDIEPDITLMSSPRDLLHCRVITVRWASGRISKILLDQGMGYWRGRMPYRDQMNFDFNMSPHDQKDVMLEKYSYVQMQQSGEWPTYVSCVID

SEQ ID NO: 26698 - protein, 1099 aa, Pseudomonas bauzanensis
MDVAARAGSTAKAWLSEFLFTREMFKGPDGKPLYSYHVTEAEFRSLVELLRSHFKRGSVPNSSAHPAACFCLLVSEQYRRAYNSSWSWSGSESLLEVSFSPQQHAHLTATGLAYWKRPIRLRENGRDWLGSLFSEGGLPWPLVQSESHGFGRAVRRGITHFYRTEGNRRTTADLMADFENDLPVIFRNLETRRLLAGIVDQLMYLVEHHPLRDQEDPASYLDQAAPGWTGAFPIPLDESNARTLLNDWLRDAGKKRRERQESLEKARAFTCEHFLHGTLPQWLIRTELILPQETEFAVDPTSLSSTRLELAYYEGERILARGPAVYGQLTEKGIKARFSNPQVTLERRDPSEPLSLRLLDNGRVVHQQYFDGSVLDFHDVPLIFERRSERWQLAAVSSCSLISELVRVRVPKGFTTSFEGDTAIPLGEDQESGLWMEANSCFTLQKGDDCYLVALNQADGDDSKPTLSGVFALYESTPALIFLGWPNLDVPEDYPYGREDLLEFVNGVPLDRRLMSHYGSVRYTLRTRSGKTLMHRRFGVLPRDFNLSLFPEVREQPARIHIKSAAQLGTHIVSDNLIVEQQGESLNMRHQGGIPPSTFVIEVGQVLPTLQLRLPYPYQGARLLDQDGNPSGVRELLLVDLMGYRISLTSGLTQGQTFHMQLELVSAEQPHPQRVYRFRVGTVPVMLNLFSYLADMQNMLGAVDEQDAYIRLVIESERRLLQLDIRRYGGQLEWEGRHVFHIGGVSNKVVLDGVKAEAMLLSDPKQSPLQLMEKTSESVGTGSFEIPQAMQSRGPWLIYPAGDSAIRFRPGLYLISENNVDPVVEVISLHRAAELFHPWRNPDVIDQQVAAMAGDFNHSGWQYLADLKQNYHHLPLSSFETWKSLSRNQEALSFAVFRLEMDESFCARIRDELAVIWETIPLPLWVKAHRVFQDAMCLTGLPEMLVKNLVSNRASVLRFIVSGFEYLGDYLSTGSRSSLIKVPPESVLPIWYQDLRRFHEANRSWPTLLGRELSSWVEELQLPPLVKALSLAEFTDAVTYLPIFMAYVSAGQAKITDLPAPPAYLKFAIRLISDFDRQGWFVPAHALMVSYLLASQDEA

SEQ ID NO: 26699 - protein, 2112 aa, Pseudomonas citronellolis
MDKYFSGLVEQALSRATESTLSILSITDPGLREHLGSLMRAECGKEGAFLAPPLFEQTFGWEESAFTMEQLASKEHLLSKEIVASLDGKANGRYRFGASWKPFTHQLASWRSLLERKHSVVVTSGTGSGKTECFMVPVLEDLYREYCDAGRQPLVGVRALFLYPLNALINSQRERLNAWTQSFGNGIRYCLYNGNTPELQAKVRSEQSQKPNEILSRELMRTQPAPILVTNGTMLEYIMVRQVDAPIVRISREQKSLRWIVLDEAHTYVGSQAAELALQLRRVMTAFGVTPKDVRFVATSATIAGEDAAGQLKQFLSDLSGVPVTQIDVWGGNRVIPPLAPCQQTLVALDTLESMPPVIADDPEVHPDRYEALVHSPQARALRNLLVTTPKPLKLTEMVSQMRQEGGWSLSQDEILRWLDVCSGTRPSASEPAFLKLRAHFFQRTTHGLWACFDECCSAKSGTALQQNWPFGYVYANQRQTCSCGSPVFELAFCNDCNEPHLLARDKNGKLIQWESSGGDEFSLQTETPVEEDAEAGGAGILSAKTPLVLCSFENAGSAYIPVEVDKFAGSFAPVSAERVRLGVRDLDAKCSRNSCGSSGLHGNSPFRRAMLGGPFYVANAVPTVLEYCQDYQEEDQTPEHGPQSLPGRGRRLITFTDSRQGTARMAVRMQQEAERSRLRGLVVEILSWYQRSQVTSQVDSSSIDPSVLQQLIAKAKEEVELYRSVGIREEVRVAEEKVTRFTAMLASATGAKVRPTLVSLAWTELANELKQKADLKGSMLLYNKYQKPEVFRDNDGPYKLAEMLLFREFMRRPKRQNSLETQGLVKVGYVGMDKIHEVPEYWGQKGLTLDDWRDFLKVALDFHVRENSYIQVEEGWLSWIGSRFSAKSLRNPESKEADEIRVKRWPQIRNGNHSQRLIKLLLLGAGLNPANTADVDLVNAWLRAAWLQLARPGSALKADENRYYLPREHMLFSLVDRAYVCPVTNKLLDTTFKGFTPYLPAHLDFSQLTEEQRKSYQAAPVELPDLWEFDRSQDDYAPGLARVRDQMANDRLVSDLRARNLWTDINDRAVEGGFYYRTAEHSAQQSSERLGSYEEMFKKGQLNVLNCSTTMEMGVDIGGISAVVMNNVPPHPANYLQRAGRAGRSKESRAITYTLCKNNPHDQQVFANPSWPFETRIPAPVVALNSERLVQRHINSLLLADFLCNVVGPTQTEKTSLNTQWFYDDEHGLSQCDRFIERLGQVVSDLDDALKDLVKGTALVGVDPAQLRRRSIDSIKPLQSRWLKSYRFLLSEEKHAKANSPYLKRLQIEKARHCNEYLLRDLAARTFLPGYGFPTDVVNFDNFTIEDYIREQDAGKKLKHDREDNVSRYKGLPSRNLSIAIREYAPGAEIVLDGRVFRSAGVSLHWHNLNADSKEAQKMDIAWRCDVCGALDYEEGLIKTDELTCSNVDCQSLIKPQNIRKVLQPSGFVTDAYESASNDIQHQKFIPVETAWVFVNANKTPLPNPAVGAMAYGADGKVFHHSSGEHGTGYALCMSCGRAESMQPDSGFPRDLSPSGEHYPPRPTKEDKDQNNKRLPCQGSGSILPSVSLGAVATTDVFELTLHHPVRGEFIADSAQGSEIAMTLAVALRAALAEILGVSASELGYATRPSKLPNGQSIRVLQLFDVISGGAGFATSAPLHVEELLWGMVKKLDCKHCETGCSECLLDSQTRHDHDKLDRKAALDWLGPDFIHHVGLTAENKLSFADGQYAPGSIESVLRRLINEGAKRITLVASGDVAEWDLLAPQFRKAIQAYVLADELTVELLVPADITDGVLVQDLQRLSDLGVNVGNAITEPGEHLVAQVFKESEVVTLASRSLVATVPGRSWHQSDELVVLSKSQPEFGWQAMDLSSAASDSFGKVAIVDISIHEELNGPLLQFGERFWEMLGARDQQVADVIATAKINRLIYSDRYIQNPAAVTILGAVLRDLKSRISADAVVQVKTLFKSGRIQGRKAFDDWASQDDFEFFSRNWLSAMVGHQVELVVELSNREIPHHRRLELEFEDGRTLKVRFDQGVAYWQVRFSSHSDMWFDFDMAVQDQLIHMARLVEMARIQNSEQKWATDVLVELKGW

SEQ ID NO: 26700 - protein, 1111 aa, Pseudomonas citronellolis
MSYSVIKCSSWLGRFLQRRGLSAPDQRGLYAYHCSLEEYGELQHLLRELGGFDAALKDPAACACLVLFGSEWYRREYRSEYAWTWDPIWKALGFNLSPGELSKAIPKGLEGYWKRPLHFYEAGHRDFLGSLFGEGGLPFQVLREGGSRFQSLFDRLLRQYDQWHLLGFNTLQQVEQQLEKASLPQVFASRTSVELIARMVDELVALVRNYGLPQVDEPVARLDALNPKWRELFPLPLDNETGSELLNGLLKTATIEGKKRRRDAAGWSCRHFWHEAQPDVLKVQVSMPEEVVLRLTTQPSTTRFELAIVEDGQVIAALGPGYALVDNGVAHIRLRVREVIGKRQDCSAQLSLVAMAGGMLIATQPIEGSAVALGEVPLGFEPVNDRWQLCGQASFNTAGEELLLVLPDGGKLNMAAEGEEAIFSDMAPAFSLHTVKVQGKAQFQVESDELYRIRMGHAVGMGLGLELAGTQIDWPTKPALTFVGLPRVQWPTVAGELQQQGGDLYVAGKQPGSGLLQDVLGTQYVSVRNRSGDALLRRRVGILPTDFRVELRSGEKPGQGSILVHSRQRCLLQIVDDSLQVQQVKHEDHTELRLLAKGFPPVRVRLSVTPSLMADPVEIDLPFPNSGSLAFDGTGKQLKRDLSVDDLLGARLYLFGRAGAPTRFSLELTLRGSAARNACYSWTYTAAEKPLEISLFNIREQIVDLLSLQSGIDQVVELRVFGNGQDASYRIRRYSTEMQLDRDRQMLCAANLHDGTDAIPEPVLMLLHDPMRSSIALSSRTSEGVPTGDFELPIAVERDGPWLVLPKSGSSVSFRPLFIAGGWQPLAPSDGIQSLQKAVLTFDHASPVSSFTPVLDAMAVNPMHSGWQFLRALYEGYGYLPLATFEVWKALVGHTRALAMALFKFEMEAKFLGRLEAEFPIFWEFLPIAEIHLAAKRFAAFLKVKGVAEEAIDALIGRMFSRLGETYPAYGQSVQRFLSGKPVGPEIKVPLATFKSVLHGWYLELIRERSEAKWPEFGGERLVRWHSSQGGSVIAFRSEMDYRNAVLYLPVFAAAVACGKARFTDVFADGVEAIFFLRQVRDFDSKWFNSIYQYCLLNSVMDMQKAESVNG

SEQ ID NO: 26701 - protein, 2073 aa, Pseudomonas coronafaciens pv. atropurpurea
MAYFESLITELKTRSTRAIQSLLSLESKPLRDFLSEKLAATPGSKDALLADPVFEPTFGWLKSGATLQSLSGGLLSSQLVKCMQRPPAVFADEYTFPGDRQIFTHQLEAWEILGQEEPASLVVTSGTGSGKSECFLVPILNSLARDIERRGRLQGVQALFIYPLNALINSQQNRLDAWTDGFDGDLRYCLYTGALENEVKSTAKQSAGHVADRTSLRASAPPVLVTNATMLEYMLVRKEDAPILEQSKGQLRWIVLDEAHTYVGSQAAEMALLLRRVMLAFDVDPLDVRFIATSATFGSDKKTVESLQSFLADMAGIEPDQIHVVHGSRHVPEIAPLQTQHSSNDSIDQLMEIGSGQEISKERYHALTQHPLARQIRTAFLKPGGTRVNTLADLHRSLNADVSPADILTMLDILSGTRSGTTDDDPFFLPLRVHLFHNVLSGIKVCIDPKCAQKLQTVLDAPEWPYGMVYTAERLSCDCGCPLIGLVSCNDCNQPFLLAHRRGNLSLVSADDHSEDEFSINLDGEAELDGDESSSATSDVHMLIVNRVAGVQTESLWFNPVKKQVEAHASTPDAIGIRVFNQIQRDQCPCCAQESPSGRQFRRASIGTPFMLSTVISTVLEFCPEDRNDPLNKPFRGRKMISFTDSRQGTARIAVKLQQDSERNRIRSLVYHSLLGATPSASLPEEDEQDLQDYLQEERAGTIRPRDVRRLQELKDRKASLAKGVELPWTEMVSSLTTNKDLQEGLLRYYNTLSKIAFPETSGARTLAGVMLAREFVRRPKRQNNLETMGLVEITYPALAHVVKAPLEWPTGNIVSWRAYLKILLDFYVRENSFLHLDQEWQRFIGAKISPKWLLAPTSKEKNTSRIKTWPQVNLGSKRQSRPIQLLCNAFSWDAQDNQDKINHLLQEAWVALTTTSTILRSSETGYQLHLESLHFRLSSDVFLCPITRRLLDTSFSNLSPYSAPGGQNPLRPIRPVSMPRYPQAFGGDVDASEKILNARAWLNSEPQVIGLRDEGLWSDLHDRIIEGASYFRTAEHSAQQPKAKLKSYETQFRSGHINLLSCSTTMEMGIDISGITAVAMNNVPPQTANYLQRAGRAGRRGEGRAVALTICRKTPHDQHVFAKPRWPFDTNMIIPAVSLRSPDLVARHVNSYLLSYWLKTVLGREELKSMTIGPFCIEERGDSLAGRFEAWCANTAGSLPAVIKGIEKLVHRSPLVDMNPETLTRHTAAAMRDAAQSWRDDYTNASQELGYFKGCSEKKSAALRALNAQLERITGEYLLSELATRRFLPGYGFPTDIVSFNNIIRQPPDKAREYSREDNRGRYLDLATRDRVTGLREYAPGAEVVMDGLVYESRGISLNWRLPASEEILREAQLFKYAWRCSHCGASGSTFSQQPGDCGQCGSALDEQEDVLRYLVPSGFAVDFYGKDPHTDISKPTYIPVQRPWLSVNEPWLTLANPANGAFRASAKARLFNHTSGDGGQGFALCLECGRAEAMLKYPDEQAAKNEKFLPHKFRSGEQHRRLRGGRTDDGESICAGSSDSWKIQRNVHLGHDSVADALEVMIRNPMTGEYLNDEIAAFSIAVALRDAIADQMGVMSDELGFGTKHVQWQREPVRLIQVFDLRSGGYTSQAAHLMNSPVLWDNVLDSLSCHCTGACQECLIGFDTRFDGEKLDRHKALEWISKDWRAFLALPDDEAVFGADSVAETSTLLEAVERYLAQDKYGAVTLYLQGPVSLWDLPMATVLRDKVLGWQCHRKIDVTLIAEKGTLALLDEASRYSLASWVDVGITYEESDPGRMNLQGGHHLLVGLSGIDGELTWASRQPHIGIANPHWGESDGESPLVRGLLSRGSEPTRPYTLSEIRPKTGDIEVDIHKDLDGTIARFGDRLWALLCDKSPGLRAALEGNDPLQSVAYTDRYVVSPLAAALLLEALTALRERATVESGTLPVAITGREFESKSRAPQRIWHDWLSDVDRDHALQEALDYVGFEAQVRSEPGIEHGRMLKLVFESGKQIRIRLDQGFSYWQVDRNMSHRQQQLFDFKKDSVEQGKALHDIAVVLTAPEIGNTQIFIGL

SEQ ID NO: 26702 - protein, 1158 aa, Pseudomonas coronafaciens pv. atropurpurea
MSLEIWPSTAAPQMASIVPAFAKWQLGWTRMESSVLTRSGLRDWLQVFAKARGAEQPTGSALYALKVTDDEFASLRNELKHQFTGAFQPAEPSTYAACWLLYAAEWWKRCYGGGAWAWKPLFDSINAPVPSHQHIQQLVAAGRKYWHLVGEMNGGKRYIGEVAIQGGLPLRLIETAQGNVSRLLHAVLRQTISFDLSSAAIRAEVQNLHPLLPRSYRQPAIYDLLGKVVDVVKDLRHRYALKGADDPIISLQRAYPEWADEFPLRIDGEAASQLLRGLVREAGETERCDRRIPFWMRRQLSFDVDGSCVLETRVEVLPTSTPAIVAQLFGCAPEQLPASFQISLIVGGNRFALAECVVRSQGIRMAVQNVQLPDDCHMSFAQLQLSRYGETLHTAMLPGGERLEENAPWVFENTFPVARLLKVGSLRIGAPTALACIPGAAFFFSEEGEFESRLSPVDGRSLKLLTSGTSRMSYKGDVYRIHCGVQGNESELLQWRGRILDVQAEPAFVYAGMPSLHRVHKDGSSSRVTDGEIVWSTVAGEERVVSDARPALGMGTLSWKLDKETQIRQTAVCLPSNAVIESEAGSSASTGIIHLRGWPAQAVVSAGNECHVDASPDGMSWRVAVTAQPNQIPSHVSLQLAWAGGRTQKITLPFPGKGAVFLDSAGTRLASDAEFDVNNLLGSRLTLMPGRHGVTWKVCLSLKSKRGGQELATRVFSYGRSCEVRLFEFMRPIRQMLACTEDLDAYVQIEALEGGSLRAKLLVRRYATRLEIDRGNGSVHYPAHALVPDEDALKQLDVLALCITHPEDGPETLTRARSKEDSLERWWFNPETKQEGAWLIYPDAQSRNAFRPLAWSTHDQPSAQPVIPLEGLRAALAAESSGARFAALTTAVDTMTSDPGHADWRLLEELLIHTSHLPLAGLDIWRVFARRPAAMITALVHLEGFAEHVAQRITEELPFEWVLASPQDWVSSVAILRKYYHQDDGDRGVRALKRNLEAIKQSMSMSQPGTVLGIDLACHEAMSLPTQETKLLLNHNAVLDDHLLRALVEIEHSPLQSLVRQSDRGDMWPNELHQDISKFIGSASGKSILSKFPPVLGDFKRLTIAFPMWVGYEVTRGAARDWLARPDRLHALRTYQSFDPAWFDAAYHYSLVHFFKPA

SEQ ID NO: 26703 - protein, 2111 aa, Pseudomonas endophytica
MDKYFSALVEQALSRTTESTLSILSITDPGLREHLGGLMRAECGKEGSFLAPPLFEQTFGWEESPFTMAQLAAQKQLLSKEIVASLNGKANGRYRFGSTWRPFTHQLASWHSLLEKKHSVVVTSGTGSGKTECFMVPVLDDLYREYRDIGSKPLVGVRALFLYPLNALINSQRERLNAWTQSFGSGIRYCLYNGNTEELQAKKRTEQIERPNEILSRELMREQPAPILVTNGTMLEYMMVRQVDAPIVRKSREQKSLRWIVLDEAHTYVGSQAAELALQLRRVMTAFGVMPKDVRFVATSATIAGDDAAEQLKQFLSDLSGVPVTQIDVWGGKRVIPELASCRQKPVTLQQLESMPAANQEDPEIHPDRYEALVHSPIAHELRNVLVSAPKPLKLTEMASHMSRYQGQSLTQDEILRWLDLCSGTRPNESEPAFLKLRAHFFQRTTHGLWACFDKHCSAKHGTPLREKWPFGYVYVNQRQACSCGSPVFELVFCNDCNEPHLLARDHGGKLIQWESSAGDEFSLQAEASVEEDADSPGGNLLTKTPLVLGTVNSDGPSYIPVEFDKHAGSFMGVSGERVPLRMNDLDVVCSRKDCSYNGYQGAFPFRRAMLGGPFYVANAVPTVLEYCQDYQDDEQKPEFGPQSLPGRGRRLITFTDSRQGTARMAVRMQQEAERSRLRGLVVEILNWHQKSHSNAQTPSSSVEPEVLQQLIAKAKEDVKLYRSLGIKEEVRVAEDKVARFTALLAAATGLKVRPELVSLAWSELVNELKQRADLQEKGPMLLANKYQKPEIFKQTDGPQKLAEMLLFREFMRRPKRQNSLETQGLVKVSYLGLEKIQEAPAYWEQKGLRPDDWRDFLKVALDFYVRESSFIQMTEEWKDWIGSRFSSKTLRNPESKEADDNRVKRWPQIRNGNHSHRLAKLLLLGAGLNPSSSSDVDLVNAWLRDAWLQLTRPGAALKSDENRYYLPREHMLFLLVDRAFVCPITNKLLDTTFKGFTPYLPAHMDFSKLTDEKRKSFVCEQVELPSIWEFDRSQEDYAPGLAKIRTQVAADAPINELRTRNLWTDINDRAVEGGFYYRTAEHSAQQSSERLGSYEDMFKKGQINVLNCSTTMEMGVDIGGISAVVMNNVPPHPANYLQRAGRAGRSKESRALAYTLCKNNPHDQQVFANPSWPFETKIPAPAVALNSARLVQRHVNSIVLSDFLCNVVGPTQTEKTSLNAQWFYDDTKGGSQCDRFLERLGLAVCDMDEALSLLVKGTALAGITPDQLRRRSIDQLKALQGRWLASYRNLLSEEQQAKPNSPYLKRLQVEKARHCNEYLLRDLSARTFLPGYGFPTDVVNFDNFTIEDYIREGGAERKVKRDRDDNVSRYKGLPSRNLAIAIREYAPGAEIVLDGRVFKSAGVSLHWHNLNADTNEAQRMDIAWRCDVCGELGYEEGLVKSDELTCTNDECLAIIKSANIRKVLQPSGFITDAYQSASNDIQHQKFVPVETAWVFVRAAKTPLPNPAVGAMAYGTEGQVFHHSSGENGAGFALCMSCGRAASMLSADEFPPSLSPSGEHFPPRPSKADKDQDNKRLPCQGSGSIVPNVSLGVTSFTDVFELMLHHPVSGEYIADNDQGRCVAMTLAVAMRSALAEILGVSASELGYATRPSKLENGQPIRILQLYDVISGGAGFASSAPLHVENLLSRMVKTLHCDHCESGCSECLLDSQTRHDHDRLDRKLAKDWLGDDFAHYVGLSMEDKLSLPDGKYAPGSIESVLRRLINEGVEKVTLVAAGDPNEWDLLAPQFRKAIQRYLNIDEVAVELLVPDGITDEDLLQDLQRLSLLGVSVGCYSSDYKNHFLVQASKAGQIITLASRSELAAMPGRWWHQSDALVVVSQSQPALSWNAFDLTIVGSKPADSSLIIDLPIHQELNGPLLTFGDRFWALLAENAQIADVLETATICRIRYSDRYIQNPSVIAILGTLFKFLKGRIADDAELQVSTLFKLGKLQGRKAFDDWSRKDDFEFFVSKWLSAMAGQTVNLVLETSNRDIPHRRRLDLEFEDGRSLTVRFDQGIAYWQVRFRSHADIWFDFDLEARDQVMHMAKVVETAQVQNSEQKWSTDVLVELNG

SEQ ID NO: 26704 - protein, 1111 aa, Pseudomonas endophytica
MPQSVFKFSSWLGTFLLRRGVQVPDYRGLYAYHCSHEEYLDLLHQLRELGTFDKAVNDTAASACLVLFCSEWYRREYQRDHGWSWEPIWKTLGFSLSPGDLGKTIPKGLEHYWKRPMHFYESERRDFLGSLFSEGGLPFQVLREGGSRFHALFDRILKQYDQWHILGYSTAQQVEQQLEKANLPKVFASQTSVELIAHMADQLVSLVRDYGLGQAAEPVARLDAMNPKWRELFPLPLDNQTGSELLNGLLKTATVEDGKRRKESSGWACRHFLHEAEPNVLKVQISLPAEVVFQLAIPPSTTRFELTILEGGEAIARLGPGYAVVDKGAARIRLRQREVMGRRGDCSLPLSLVAMAGGMVVASLPIENSTVALGEVPVGFEPVNDRWQLCGQASFNSLSEDLLLVLPPDSALGQVDDPGDVSITEISSVLALRTFNVQGKAEFKVDCEGLYRIRTGHSAGSGLGLELAGSQLGWATKPALTFLGLPKVQWPGATDKLQTQGGDLFVGGKQPGNSSLQEMLGAQYVAVRNRGGDTLLRRKIGILPADLRLELRSGERPGQGSILVHTQQRCLLRIVGDGLHTQQIKREDHVELKLSTEGLPPIRVRLSVTPSLLSDPVEIELPFPNSGCLAIDGRGKQLKRDISVDDLLGGRIYLFGRHGAPTKFGLELTLKGNTAKNASYSWSYTATEKPVDISLFNIREQIVDLLSLQSGIDQAVELRVFGNGQDANFRVRKYATEMVLDRDRQVLLASNLQDCNTALPEPILMLLHEPMRGAVHLGSRLSEGVPTGEFELPGLVERNGPWLLLPKQGSPVSFRPLFIAGGWEPVPQSDDVHSLQKAVLTFDHASPFSSFAPVLDSMSVSPMHSGWQFFRALYDGYGYLPLATFEAWRALVGHPRALSMALFKFEMETKFLSRIESEFPIFWEFLPVTEIHLAARRFGAFLKVKGVADEAVSALVGRMFARLGEAFPTYGESVQRYLSGKPVGPEIHMDLKTFRAVIHGWYIQLMRDRSDATWPKYGGKRLERWHNKQSDSVISFRLEMDYRNAVVYLPVFAAAIASGEAQFSDVFKDSVEAIFFLRQVRDFDSSWFNSIYQYCLLNNVMGMHKAVPVNG

SEQ ID NO: 26705 - protein, 2087 aa, Pseudomonas extremaustralis 14-3 substr. 14-3b
MHFFRDLIQQSLERTREATLGVLGINHPGLRQHLSQSMVNELGADGCFLAPPVFEHTFGWKESKLRLQDLQDEQLLSSCLLDTLENAPAYQFPRTAHPYVHQVQAWRTLRDEKPRSAVITTGTGSGKTECFMVPILEDLVREHECSAAALVGVRALFLYPLNALINSQQERLDAWTRKYSDNIRFCLYNGKTEERADKVRKEQQQKPNQILSRELLRREPAPILMTNATMLEYMLVRQVDSPILEISKQQQSLRWIVLDEAHTYVGSQAAELSLLLRRVVQAFGMQSEQIRFIATSATIAGADAEERLKHYLANLAGVALDQVEVIGGSRFWPDLAFDSPGEDIALTTICDIDPDAEVSPTRFEALCQSNIARRLRHVVITALTPLDLNDLIAEVAGHLQGGTRLEQQREVLDWLDTMTGTHPDKSQPPFLKLRVHLFQRMLHGLWACVDPQCRAKSSHLQDWLFGNVYVNQRARCECHAPVYELGFCDDCKTPHLLAEDRNGELHQPSPYAGDEFALNHEQGGEDSPAEVARIDAGSKGLIIAGMQAAHDPYFSYNLDLESQKLGGVNATRNIGIVLVEEANSCCSNCDHSSFGTNDFIRKAYLGAPFYVANAVPTVLEFCPDPDKEDCNGRSPEELPGRGRKLITFTDSRQGTARMAVRMQQEAERSRLRGLVFESLRNEQAKVDAAPKDTPSGSPAEMLVLADSLEKQGLAGTAADLRKKAELLQSGASLVSPARVIPWQQMAQTIAAAKDIDQFILRYNRYANPALFDGYEGGLTMARLLLAREYARRPKNQNSTETLGLVKVGYQGLNKVSAPPPLWVDTRATLAEGDANDPRSSLTPEDWRDFLKVALDFYVRENTFIPMETKMRRWMGSRFSPKALYSPKREDVQESNTIRKWPQIKPGTPNRLIKLLELATGLDRNLSADADKINSWLEAAWTALVSAGILEASDTGHRLRLETLTFSLPTEGWVCPLTRRIFDTTFRGLTPYLPQKIQSQDYRCQKIQLPAFSSLKDDGSPLRKQMQIRQLVAKDPIIAQLRQESLWTDISDRTVEGGFYYRTAEHSAQQSAKRLDNYVEEFKRGDINALNCSTTMEMGVDIGGISAVVMNNLPPHPANYLQRAGRAGRRKEARAIAYTLCKADPHNQRAFANPKWPFVTAIPAPIITLSSARIVQRHVNSMLLALFLRMHSSNDGDRTKLTLHWFFAPDDSPCQHFKAWLTASAEEYGSPVKQLVRGTCLEGRSLSSITGGARLALHDLEERWLGEYRNINQKLQAASDGPYKKALALEKQRHENEYLLRYLASSAFLPGYGFPTDVVSLKTYNVEDFLHQHRKEDASREDSIFDNKEMPSRSLNIAIREYAPGAQVVIDGRVYRSAGVSLQWHADGQVNEAQKFDIAWRCSECGSTGVIENAYANDAGLCCSHCTTPIPSSERRMVLRPGGFVTDFYEETTNDVTSQKFIRVERPRIQLIGESIALPDERCGFVRFGHEGSVFHHSSGEHEKGYAVCMTCGRAESILASGEVPKDLQPDKAHRPVGGVAGSRKERDCSGEAVKAGLHLGYQIRTDVLEIFLRNPLTGEWLLDSIKGRLIAATIGVAMRDVIADRLGIASGEMGFSYRLDRDRDSRQGRSVIQLFDEVSGGAGFVLAGLSDLALLLNKALERLRCPVDCENVCSHCLASQDSRVEREELDRKLALQWLSESQLVEHLGLPDVFVNIHGARHCSVGPLRELSFAVSSLDRRDQTGSILVCLHGDHVNWDLDHPRFREQVLTWAIAERLKVRIGITDSALLSAEQKETLALLARLGVELLELDATNLQAPHLIAQLSSQAGVGSLYSSMNSVGVPGGDWLQGHSDVVWVTSRLMAAVPGNTIDSSGWNQRKQGARIVEITSQLDGPVNTLRRRLTTLIDAQMPELATLITNDQAVSISYSDRYLKSPWSLMLLSGFLELFRSDYLQSLSVQTLAPSGNQPSYLLSHDWMRADNQQAILELWLKSQFDIVPNININIMSSPRDLLHCRVITVSWASGRVSKILLDQGMGYWRGRMPYRDQMNFDFGTSHHEQARQMIEKYSNAHMHQGGEWPTYISCVID

SEQ ID NO: 26706 - protein, 1099 aa, Pseudomonas extremaustralis 14-3 substr. 14-3b
MELNAPATTAAKAWLSELLFIRTMFKGPDGKPLYSYHVTESEYRSLIEMLSSYFRRGSVQNYSTHLAACFCLFVSEQYRRDYNSSWSWSGPETILGISLSPQQHASLTSSGLAYWSRPIRFRENSRDWLGSLFAEGGLPWPLVQSESHGFGRAVRRGIKHFYRTEGNRRTTADLMADFENELPLIFRNLETRRLLAGIVDQLMYLVEHYPLKDQQDPANYLDKVAPGWTDAFPIPLDESNSRTLLNDWLRDAGQKRQERKEALEKARVFTCEHFLYGTLPQWLIRTELILPQEATFVVDPTSLGSTRLELAYYEGERLLARGPAVYGQLTEQGFKVRFSNPQVTLERRRLDEPLSLRLLDNGRMVHCQFFDGSALDYHDIPLIFENRSERWQLVASSSCSLSSGLVRLRVPPGFATNCEGGAANFLLEDQENGLWLEANVNLSLVRGDDHYQVELNQADNDDAKPTLTGIFALYESSPAMVYLGWPNLELPEGYPHAREDLLEFVNGELLDRQRSSRCGSARYTLRTRSGKTLLQRRFGVLPRDFNLSLFPGVREQPARLQIKGVAQLDLHVVSNALVVERDENSLYMRHQGEAPPSTFVLELGQGLPSLQLHLPYPYQGARLLDQYGNPSRARELILADLMGHRISLTSGLTQGQNFHMQLELICAEQPHPQRTYSIRVGSAPVMLNLFSYLGDMQNMLGAVDEQDAYIRFSLETEQPLLKLDIRRYGGQLQWEGRHAFYVSGVSNTSVLDGVQAEAMLLSDPKRTPLQLTERTSEAVGIGSFEIPQAMQPRGPWLIYPAESSSIRFRPALYVVPVNGLDTAAEICSLHRAAEVFHPEHNPHAIDQQIAAMAYDFNHSGWQYLADLKQNYRHLPLSSFETWKALSRNQEALSFSVFRLEMDESFCARIRDELSVIWETIPLPLWAQAYRLFHDYMRLTGLPDALVNTLVSKRAEALRCIVSGFDYLGDYLSTGNCSSLKKLPLEQVLPAWYQGLRHLHEANRNWPTLLGSELSSWIDRQLLPPLVKALSLAEFTDAVAYLPIFMAFVTAGRAKITDLPATPAYLKFAIRLVADFDRQGWFIPVHALVVSYLLASQNEA

SEQ ID NO: 26707 - protein, 2085 aa, Pseudomonas fluorescens
MHFFRDLIQQSLERTREATLGVLGINHPGLRQHLSQSMVNELGADGCFLAPPVFEHTFGWKESKLRLQDLQDEQLLSSSLLDTLENAPAYQFPRTAHPYVHQVQAWRTLRDEKPRSAVITTGTGSGKTECFMVPILEDLVREHERSAAALVGVRALFLYPLNALINSQQERLDAWTRKYSNNIRFCLYNGKTEERADKVRKEQQQKPNQILSRELLRGEPAPILMTNATMLEYMLVRQVDSPILEISKQQQSLRWIVLDEAHTYVGSQAAELSLLLRRVVQAFGMQSEQIRFIATSATIAGADAEERLKHYLADLAGVALDQVEVIGGSRVWPDLAFDSPGEDIDLTTICDIEPDAEVSPTRFEALCQSNIARRLRHVVITALTPLDLNDLIAEVAGHLQGGTRLEQQREVLDWLDTMTGTHPDKSQPPFLKLRVHLYQRMLHGLWACVDPQCRAKSSHLQDWLFGNVYVNQRARCECHAPVYELGFCDDCKTPHLLAEDRNGELHQPSPYAGDEFALNHEQGGEDSPAEVARIDAGSKGLIIAGMQAAHEPYFSYNLDLESQKLGGVNATRNIGIVLVEEANSCCSNCDHSSFGTNDFIRKAYLGAPFYVANAVPTVLEFCPDPDKEDCNGRSPEELPGRGRKLITFTDSRQGTARMAVRMQQEAERSRLRGLVFESLRNEQAKVDAAPKDTPSGSPAEMLVLADSLDKQGLAGTAADLRKKAELLQSGASLVSPARVIPWQQMAQTIAAAKDIDQFILRYNRYANPALFDGYEGGLTMARLLLAREYARRPKNQNNTETLGLVKVGYQGLDKVSAPPPLWVDTRATLAEGDANDPRSSLTPEDWRDFLKVALDFYVRENTFIPMETKMRRWMGSRFSPKALYSPKREDVQESSTIKKWPQIKPGTPHRLIKLLELATGLDRNLSADADKINSWLEAAWTALVSAGILEASDTGHRLRLETLTFSLPTEGWVCPLTRRIFDTTFRGLTPYLPQKIQSQDYRCQKIQLPAFSSLKDDGSPLRKQMQIRQLVAKDPIIAQLRQESLWTDISDRTVEGGFYYRTAEHSAQQSAKRLDDYVEEFKRGDINALNCSTTMEMGVDIGGISAVVMNNLPPHPANYLQRAGRAGRRKEARAIAYTLCKADPHNQRAFANPKWPFVTAIPAPIITLSSARIVQRHVNSMLLALFLRMHSSNDGDRTKLTLHWFFAPDDSPCQHFTAWLTASAEEYGSPVKQLVRGTCLEGRSLSSITGGARLALHDLEERWLGEYRNINQKLQAASDGPYKKALALEKQRHENEYLLRYLASSAFLPGYGFPTDVVSLKTYNVEDFLHQHRKEDASREDSIFDNKEMPSRSLNIAIREYAPGAQVVIDGRVYRSAGVSLQWHADGQVTEAQKFDIAWRCSECGSTGVIENAYANDAGLCCSHCTTPIPSSERRMVLRPGGFVTDFYEETTNDVTSQKFIRVERPRIQLIGESIALPDERCGFVRFGHEGSVFHHSSGEHEKGYAVCMTCGRAESILASGEVPKDLQPDKAHRPVGGVAGSRKERDCSGEAVKAGLHLGYQIRTDVLEIFLRNPLTGEWLPDSIKGRLIAATIGVAMRDVIADRLGIASGEMGFSYRLDRDRDSRQGRSVIQLFDEVSGGAGFVLAGLSDLALLLNKALERLRCPVDCENVCSHCLASQDSRVEREELDRKLALQWLSESQLVEHLGLPDVFVSIHGARHCSVGPLRELSFAVSSLDRRDQTGSILVCLHGDHVNWDLDHPRFREQVLTWAIAERLKVRIGITDSALLSAEQKETLALLARLGVELLDLDATNLQAPHLIAQLSSQAGVRSLYSSMNGVGVPGADWLQGHSDVVWVTSRLMAAVPGNTIDSSGWNQHAQGARIVEITSQLDGPVNTLRRRLITLIDAQMPELATLITNDQAVSISYSDRYLKSPWSLMLLSGFLELFRSDYLQSLSVQTLAPSGNQPSYLLSHDWMRADNQQAILELWLKSQFDIVPNINIMSSPRDLLHCRVITVSWASGRISKILLDQGMGYWRGRMPYRDQMNFDFGTSHHEQARQMIEKYSNAHMHQGGEWPTYISCVID

SEQ ID NO: 26708 - protein, 1099 aa, Pseudomonas fluorescens
MELNAPATTAAKAWLSELLFIRTMFKGPDGKPLYSYHVTEAEYRSLIEMLSSYFRRGSVQNYSTHLAACFCLFVSEQYRRDYNSSWSWSGPETLLGISLSPQQHASLTSSGLAYWSRPIRFRENSRDWLGSLFAEGGLPWPLVQSESHGFGRAVRRGIKHFYRTEGNRRTTADLMADFENELPLIFRNLETRRLLAGIVDQLMYLVEHYPLKDQQDPANYLDKVAPGWTDAFPIPLDESNARTLLNDWLRDAGQKRQERKEALEKARVFTCEHFLHGTLPQWLIRTELILPQEATFVVDPTSLGSTRLELAYYEGERLLARGPAVYGQLTEQGFKVRFSNPQVTLERRRLDEPLSLRLLDNGRMVHCQFFDGSALDYHDIPLIFENRSERWQLVASSSCSLSSGLVRLRVPPGFATNCEGSAANFLLEDQENGLWLEANVNLSLARGDDHYQVELNQADNDDAKPTLTGIFALYESSPAMVYLGWPNLELPEGYPHAREDLLEFVNGEPLDRQRSSRCGSARYTLRTRSGKTLLQRRFGVLPRDFNLSLFPGVREQPARLQIKRVAQLDLHVVSNALVVERDENSLYMRHQGEAPPSTFVLELGQGLPSLQLHLPYPYQGARLLDQYGNPSRARELILADLMGHRISLTSGLTQGQSFHMQLELICAEQPHPQRTYSIRVGSAPVMLNLFSYLGDMQNMLGAVDEQDAYIRFSLETEQPLLKLDIRRYGGQLQWEGRHAFYVSGVSNTSVLDGVQAEAMLLSDPKRTPLQLTERTSEAVGIGSFEIPQAMQSRGPWLIYPAESSGIRFRPALYVVPVNGLDTAAEICSLHRAAEVFHPEHNPHAIDQQIAAMAYDFNHSGWQYLADLKQNYRHLPLSSFETWKALSRNQEALSFSVFRLEMDESFCARIRDELSVIWETIPLPLWAQAYRLFHDYMRLTGLPDALVNTLVSKRAEALRCIVSGFDYLGDYLSTGNCSSLKKLPLEQVLPAWYQGLRHLHEANRNWPTLLGSELSSWIDRQLLPPLVKALSLAEFTDAVAYLPIFMAFVTAGRAKITDLPATPAYLKFAIRLVADFDRQGWFIPVHALVVSYLLASQNEA

SEQ ID NO: 26709 - protein, 2065 aa, Pseudomonas fluorescens
MLYKKNYFSSLVHNLTQRSERAALGLLGIGNAPLRQFLHDRLTATPGTEGALLADPVFEPTFGWQESQETMSSLAGGPFLNRKLAQVMAAPPKELAEEYTFPSDRHPFEHQLSAWEVLNHPKPQSLVVTSGTGSGKTECFLVPVLNQLANEVDTDVDPEGIRALFIYPLNALINSQQSRLDAWTDGFGGKIRHCLYTGALENERKAIDQKYKGQVIDRTKLRDSPPQILVTNATMLEYMLIRKEDAPLLQKSEGKLRWIILDEAHSYIGSQAAEMALLLRRVMLAFKVKPEDVRFVATSATFGSDEQTIENLRSFLADIGGISVDQVHVVQGRREIPELPALPVNKVDDTPQGIADIDPDHEVSAQRYVRLAASPTAVSLRDAFVPGGETRPQTLKALQEISGLPLGVLLAWLDLMTGTKNAEGLAFLPLRGHLFHGVIPIIRACIDKNCKHKSGSALGNQDWPFGMVYTDERTHCDCKAPLMPLVKCEECTELFLQGYQSERDRLVDQSFNQDDEFSMNSEPMDAESGDDADTDDGGEAMRTPVLITNRPGEDCYTEHLDRSNQKFINAPIDDSIEVTVFRSLVNECPCCNNKSKTRSIMRAHRIGAPFTLGTVIGVLLEYCPEDKTPQGKPFQGRKMISFTDSRQGTARIAVKLQQDSERNRIRGLVYQHLIGSQSVNTLTDDEQGDLAELEVNTNRTKFEQKLFDMLIAQRDNSGPAEISWKAMVSQLSSIPEVEIGILDYYRNLAPHVFGERDSVALAGMLIAREFYRRPKRANSLETMGLVQVTYPKLDHVTSTPLAWPKGKGEDSWRSYLKVLMDFYVRENTILNIDKRWQSLIGAKIQPKWLVPSATENKPGRRFVRWPSVNKGSSVQSRPILMLCKAFGWSVQTHEQEIDFILQDAWRVLTQEVRLLTNKADGYQLDLEDLSFRLPETVYFCAVTRRFIDTPFEGLSPYTPRNDRYHVALVKPYTLPRPPQSLIDMRGDEGLRALRDWSESEPEIVRLRQEGLWSDVADLVVEGGHYFRSAEHSAQQPKKKLDRYEADFKQGKLNLLSCSTTMEMGVDIGGITVVAMSNVPPHPANYLQRAGRAGRRREGRSMAVTVCKNTPHDQAVFRNPLWPFTTGMRMPKVSLQSPALIQRHVNSWLLSYWLKNIAGALEIKSMTVGAFFLNGDLPVSLVERFCAWVDGESHGACAAVNEAVASITRRSVLSSMPVSGLLNDALKTLREIQQKWVGEHAISKAQLDGIGNKTAAAYRAMSAQLARVEKEYLLSELAGRRFLPGYGFPTDIVSFDNQCMQNFRSNEGGAGREDNRGRYRDLASRDRITGLREYGPGAELVMDGLVYKSGGITLNWHAPASEENVKELQLIKKAWKCGACGASGTGLNPGLSLNCPECGAEVDKGNIREYLVPSGFAVDFFAEPHTAIESLAYVPVKKPLLNVPASWIALSNPALGQFRSSHQAHLFHYTSGAGGNGFAICLECGRAEPMLEVDDSSDSTAANEQRLAHTFRSGQTHRRLRGGKNDSGENVCPGSYNSWKIKQAIHLGNDSITDALELILLNPDSGEPLKDVDTGYSIAIALRDAIAEELCVQADELGCDCENIQIDGRWASAIRVFDQRSGGYATQAVGLLNKRSLWERVIDRLDCDCSHACQCCLLSFDTRFEADRLDRHEALKWINKNWLMKLDLPVELKVFGANTCPEIVTLYEAIERELAADNLPKTLSIYLPAPAAEWDLAIARKLRHRLLAWEGAGHHIALRLTENTFNDLPSDQKEWLHRLAVNNIKIEVEQSLLDVSVLTLNAVLSSQKQHIAWASNDERLLAPNKDWNPVAAGSCIVYGVLPALAQARLITAQDLNQTSVPGIVKLELGSELDGSLTGFAKRFWDAVEPKAGLLDFALSGQDPIEAVSYSDRYVCNPLTACILINILYELKQRSGEEFSVKICGRKYLRESSRTSWKCWHDWLSSDDRDRAIRKAIEYCGLSGEVLSQPALAHYRQLRITLVSGRCLTVQFDQGLSFWEAARSENAYSTRFDFEAGDMGSELMEKIKTPISAAADVRTQLFLSLDK

SEQ ID NO: 26710 - protein, 1029 aa, Pseudomonas fluorescens
MSHEQTSRHVLAGHRQWQLTTEIRGEGKRYIGQVAINGGLPMRLLETAQGSLSRLLRMVLEQTLRCNLHQDDLLDAIKTQAALLPVSYRQDLIYQLLRDLVWGVLQLRAQYGLHHEPDPLLKLQQQCPDWEMRFPLALDSAVATTLIKGLVASVASISAQKSRVPFQIVRGLRFPSDDGMPVFEMAFEMQAQTTTQELADAVGITADKLPHQFRLLLLVAGKEHLVGEALRRGGGYQLVARKGLSLQNLHAGAQLILSRNGQAIHTAHLPGGEPISFDEPLLFEDARPFASLVGQGSATLKGDRALALIPENAFFYAQGDDAVVMHEGMPGDQVLLIISQGKTQFTYRKQSYYVTVNPNAAPRADAYWQGQTLDAGSVPGLMFRGNPSLRVLQAGGSFSYAPVNELYIRSNGIDTPFTQAKAPGLCWLSWSRGGQRLLRSRAVVLPVSASISYTPSADPAKGCILLENWPDLHVTCDSPDITLSRTYEDKTNVLTVQSKAAAPATSVQLLIQWPEGEQKLTLPFPGHGAVLLDARQVPIREGASLSVEELMGCRAILMSPTGADAWQVRLTAHSPDQPNALVREIRYTGTREIRLFELINPIQQMLSCHSGLDMSVTMQFVHSHRVRGTYHVGRYSTVARLHGNAQFVSLNDGRHDLLLDREDAEGLLMALPLALPNRDPEPLSLHLSEQVFTGSWRLNLPDNVASPWLIYASAESNYRCQPCIAPAQGIALAKVFTPLQNALCEADHETRMVLLTKRLEQMATTPMHEDWVLLEALLDKLQHLPLPSLDLYQVLIRTPAALVMVTLLLDGFAANMVERMPLELPFEWLLISPMQWLQAFEVLKNTLVTDPRLLPIIRKDIQRKSQYLPRWQPALKFIFDQGIHHHLDGNIPDARLFLNDPKMLTELWLDRLFDGPDCEMQDFFHRNYADDQPWPKLPPNVMSDFLRTDNGKLLMKRTRLSADDVKIPATILPFMVGFDACAGKSDFWQGDSSRLFALRTARQFDTAWFDSAYELSLAMAHTASLNLKN

SEQ ID NO: 26711 - protein, 2065 aa, Pseudomonas fluorescens
MLYKKNYFSSLVHSLTQRSERAALGLLGIGNAPLRQFLHDRLTAPPGTEGALLADPVFEPTFGWQESQETMSSLAGGPFLNRKLAQVMAAPPKELAEEYAFPSDRHPFEHQLSAWEVLNHPKPQSLVVTSGTGSGKTECFLVPVLNQLANEVDATVDPEGIRALFIYPLNALINSQQSRLDAWTDGFDGKIRHCLYTGALENERKATDQKYKGQVIDRTRLRDSPPQILVTNATMLEYMLIRKEDAPLLQKSEGKLRWIILDEAHSYIGSQAAEMALLLRRVMLAFKVKPEDVRFVATSATFGSDEQTIENLRSFLADIGGISVDQVHVVQGRREIPVLPVLAANKVDDFPQGIADIDPDHEVSAQRYLRLAASPIAVSLRDAFVPGGETRPKTLTALQEISGLPLSVLLAWLDLMTGTKNAEGLAFLPLRGHLFHGVIPIIRACIDKNCKLKPGTALGSQGWPFGMVYTDDRTHCDCKAPLMPLVKCEECTELFLQGYQNERDRLVDHSFNQDDEFSMNSEPMDAEGGDDLEADDGGEAMRTPVLITNRPGEDCYTEHLDRSNQKFINAPIDDSIEVTLFRSLVNECPCCNNKSKSRSIMRAHRIGAPFTLGTVIGVLLEYCPEDKTPQGKPFQGRKMISFTDSRQGTARIAVKLQQDSERNRIRGLVYQHLIGSQSVNTLTDDEQSDLAELEVNTNRTKFEQKLFDMLIAQRDNSGPAEISWKTMVSQLSSIPEVEIGILDYYRNLAPHVFGERDSVALAGMLMAREFYRRPKRANSLETMGLVQVTYPKLDHVTSTPLAWPKGKGVDSWRSYLKVLMDFYVRENTILNIDKRWQSLIGAKIQPKWLVPSAAENKLGRRFVRWPSVNKGTSVQSRPILMLCKAFGWSVQTHEQEIDFILQDAWRVLTQEVRLLTNKADGYQLDLEDLSFRLPETVYFCAVTRRFIDTPFEGLSPYTPRNDRYHVALVKPYTLPRPPQSLIDMRGDEGLRALRDWSESEPEIVQLRQEGLWSDVADLVVEGGHYFRSAEHSAQQPKKKLDRYEADFKLGKLNLLSCSTTMEMGVDIGGITVVAMNNVPPHPANYLQRAGRAGRRREGRSMAVTVCKNTPHDQAVFRNPLWPFTAGMRMPKVSLQSPALIQRHVNSWLLSYWLKNIAGALEIKSMTVGAFFLNGDLPVSLAERFRAWVDGESHGACAAVTEAVASITRRSVLSSMPVSGLLNDALKTLCEIQQKWVGEHAISKAQLDGIGNKTAAAYRAMSAQLARIEKEYLLSELAGRRFLPGYGFPTDIVSFDNQCMQNFRSNEGGAGREDNRGRYRDLASRDRITGLREYGPGAELVMDGLVYKSGGITLNWHAPASEENVKELQLIKKAWKCGACGASGTGLNPGLNLNCLECGAEVDKGNIREYLVPSGFAVDFFAEPHTAIESLAYVPVKKPLLNVPASWIALSNPALGQFRSSHQAHLFHYTSGAGGNGFAICLECGRAEPMLEVDDSSDSTATNEQRLAHTFRSGQTHRRLRGGKNDSGENVCPGSYNSWKIKQAIHLGNDSITDALELILLNPDSGEPLKDEDTGYSIAIALRDAIAEQLCVQPDELGCDCENIQIDGRWASVIRVFDQRSGGYATQAVGLLNERDMWERVIDRLDCNCSHACQCCLLSFDTRFEADRLDRHEALKWINKDWLMKLDLPVELKVFGVDTRPEIVTLYEAIERELAADNLTKTLSIYLPAPAAEWDLAIARKLRHQLLAWEGAGHHIALRLTESTFSALPFDQKEWLHRLTVNNIKVEVEQVLLDVGVLTLNAVLSSQKQHIAWASNDERLLAPNKDWNPVAAGSCIVYGLLPALAQARLITAQDLNQTSAPGIVKVELGSELDGSLSDFAKRFWDAVEPKAGLLDFALSGQDPIETVSYSDRYVCNPFTACVLVNILYELKQRSGEEFSVKILGRKYLRESSRTSWKCWHDWLSSDDRDRAVRKAIEYCGLSGEVLSQPVLAHYRQLRVGLASGRSLTIQFDQGLSFWEAARSENAYSTRFDFEAGDLGCELMEKIKTPIGAAADDRTQLFLSLDK

SEQ ID NO: 26712 - protein, 1029 aa, Pseudomonas fluorescens
MSHEQTSRHVLAGHRQWQLTTEIRGEGKRYIGQVAINGGLPMRLLESAQGSLSRLLRMVLEQTLRCNLHQDDLLDAIKTQAALLPVSYRQDLIYQLLRDLVWGVLQLRAQYGLQHEPDPLLKLHQQCPDWEMRFPLALDSAVATTLIKGLVASVASISAQNSRVPFQIVRGLRFPSDDGMPVFEMAFEMQAQASTQELADAVGIAADKLPHQFRLLLLVAGKEHLIGEALLRGGGYQLVARKGLSLQNLHAGAQLILSRNGQAIHTAHLPGGEPISFDEPLLFEDAQPFASLIGQGSATLKGDRAIAVIPENAFYYSEGDDAIVLHEGMPGDQVMLIISQGKTQFTYRKQSYHVTVSPNAAPRGDAYWQGQTLDASSVPGLLFRGNPRLRVQQAGGSFTYAPVNELYIRTNGIDTPFTQAKAPGLCWLSWSRGGQRLLRSRAVVLPANASISYTPSADPAKGCILLENWPDIHVTCASPDITLSRAYEDKTNVLTVQSKAAAPATSVQLLIQWPEGEQKLSLPFPGQGAVLLDARQESIREGANLSVEELMGCRAILMSPTGADAWQVRLTAHSTDQPSALTREIRYSGTREIRLFELINPIQQMLSCHPGLDMSVTMQFVHAHRVRGTFHVGRYSTVARLHSNSQFVSLNDGRRDLLLEREDAEGLLMALPLALPNRDPEPLSLHLSEQVFTGSWGLNLPDNVASPWLIYASAESNYRCRPCVAPPQGDALAKGFTPLQEALCEADYNNRMVLLISRLEQMALTPMDKDWVLLEALLDKLQHLPLPSLDLYQALIRTPSALVMVTLLLDGFAANMVERMPLELPFEWLLISPSQWLHAFEVLKEGLVTDTALLPIIRKDIQRKSQYLPRWQPALKFIFDQGIHRHFDGNIQDARLFLNNPQMLTELWLGRLLDGPDCEMQQFFHRNYADDQPWPTLPGNLMKEFMRTDNGKLLLKRVRLSADDVKMPATMLPFMVGFDACAGKSEFWQGDSSRLFALRAARQFDAAWFDSAYELSLAMAHTASLNLKN

SEQ ID NO: 26713 - protein, 2099 aa, Pseudomonas fluorescens WH6
MRNFTDLVEQTLNRTREATLGVLGINDGGLRRHLHQSLSSELGAEGCLLAPPVFEHTFGWHESNLQLQDLQAEKLLSPELLETLAGASAYAFPKTARPYIHQVQSWRSLLNEKPRSAIVTTGTGSGKTECFMVPILEDLIREHQHTKQALVGVRALFLYPLNALINSQQERLNAWTRRFGSNIRFCLYNGKTPDKASYVRNEQKLKHNQILSRELLRREPAPILMTNATMLEYMLVRQVDSPILEISRLSQSLRWIVLDEAHTYVGSQAAELSMLLRRVVHAFGRSPEQLRFVATSATIAGAEATDRLRRYLARLAGVAEEQVDVIDGSRKWPDLPDVGRQQALSLATLQSMHPTEEVSSERYQALCAHPIARQLRHAVVSAGKPLGLNDLVGEVSAHFESSTPAAQQREALQWLDVLTGTRPAVNQPPFLKLRIHMFQRMLHGLWSCVDPNCTSKSDHLQHWPFGNVYVSQKARCECEAPVYEIGFCEECKAPHLLAEDRNGELLQPRAFAGDEFALNHDDADEGEAGSNGPSKRSRTPTQRLVIAGGTSVNGPFQRLSLDLVTQKLGSVNAQRSLDIAIAAEGREDSVNGPEHFACCSACEHAVFGSSRFLRRAYLGAPFYVANAVPTLLEFCPDPEKGDTEGRSPEELPGRGRKLITFTDSRQGTARMAVRMQQEAERSRLRGLVFETLRNAQAKADSQPQNAPIGSPEQFLASAAALDVIGMVVEAAKLRQTAADMQAGVFAAPAAVSLTWSEILQVLAAAKDIDPFIIRYNRQSNPALFDGHEGGLTMARLLMSREFSRRPKFQNSSETLGLIQVGYTGLDKVTLTPPLWTATPAYVVSGPAQEPRTALTLQDWRDFLHVALDFFVRENTFISMENKMRRWMGSRFSPKALYAPTSDVQESSTIKKWPQVKLHSAHRLVKLLEVATGLDRRNPGDAATITGWLEGAWGALIGAHILESSDTGYRLKLETLNFSLPTKAWVCPVTHRLMETTFRGLTPYLPRTIGAQDYHCTRVNLPSFAALSPDAGSEPKQQQVRKLVNADATVADLRQQGLWNDICDRTLEGGFYYRVAEHSAQQSAELLDKYVEQFKRGDINVLNCSTTMEMGVDIGGISAVVMNNLPPHPANYLQRAGRAGRRNEARAIAYTLCKADPHNQRAFANPKWPFVTAIPAPTITLSSTRIVQRHVNSLLLGIFLRAHTSSDGDRTKLTLHWFFGSDSSPCQNMAGWLQACPDEFAPAVRQLVAGTSLAGRAMNYVVESTLSALKALEQRWVDEYRNLDEKVQGAKDEAYKRALALEKRRHEGEYLLRDLASRAFLPGYGFPTDVVTLKTYNIEDFVQKRNEQQGSREDSLASSREMPSRGLNIAIREYAPGAQIVIDGRVFRSAGVSLQWHANGEINEAQKFDLAWRCPECGNSGMIENAYANSDNVRCIHCSTSIPAELRRRVLRPAGFVTDFYEETTNDVTSQKFIRVEEPRIQLNGESSALPDPRCGFFRFGHDGTVFHHSSGEHEQGYAVCLSCGRAESMLPGAEVPPGLRADQQHRPVGGVAGSRKDKDCSGEGVTHQVHLGYQIHTDVLELYLRNPLTGQWLSDSSDGRVIAATLGAALRDVIADQLGIVSTEMGFSHRVDRDRETRQGRAVIQLYDEVSGGAGFVLEGLGDITSLLAKAMQRLHCPADCETVCSHCLAGQDSRVEREELDRRLALQWLIDAAFVDHLGLPAVFDEIPGARYCPVGPLRYLASAQNSHEQAAAPTRLLLCLQGDPQDWDLDHPRFRQQVLTWAIADGLKVTLGIAPDCALSSDQKNVLLQLVRMGIELGELPKRGASTTALLLAQLDTGNLCRSVYASEESAALPGAGWLNGKGDITWVATCAVPGLQGQSLDTSSWQSDTQAARIVEVTGELDGPVNTLSKRLATLIDTKMPELAQLLETDQAVTISYSDRYLKSPWSLMLFTGFVKLFEGAELKTISVETLSVGGGQPSSHMSHDWQRAEDQKAIMAEWLAEQLGIEPQISLERNSRDILHGRSLSVTWRSGRVSQILLDQGMGYWRPRMPYRDELDFDFQASAPRQLEDIGEKYSRAQMQQGGQWPTYISCINEM

SEQ ID NO: 26714 - protein, 634 aa, Pseudomonas fluorescens WH6
MLTGVYALFECSPSTVYLGWPTLELPEGSPYRRDELMEYANGRLLDRRNAPAFDAINYTVRSRKGETLLRRRFGVLPRGFELGLIPAYGRRPARLLVKNAEDLALQVAGEGLVCTRSEGGYQMDLSAQHCPQAFTLLIGPATDPVQLRLPFPYQGARLLDVNGQPVSVKALNLAELVGHRLQLSSGLPQGQLFYLQFELMCRERSRPKRVFALRVGQMPTVLNLFSYVADLQTMLAAVDEQDAYVHLTIETEQPLMQLDIRRYGGRVVMEEATAFYICGVESTNILDGARAEAMLLSDPRQSPLQLIEKTSEGVGTGCFAIPQPMLTDGPWLIYPGKESPIQFRPQLYLPACMSVPIDVQVGSLHHAARMFHPVHHPEVIEEQITAMAADFGHSGWQYLADLKRQYAHLPLSSFEAWKALARNPQALGLAVFRLEMDEAFCARIADELALMWETVPLPMWAHAHQVFAQGIRLTGLPAELVDRLVKDRAIVLRYIVSGFDYVGNYLGTGDCTELKRLPAEEILPMWYQDLRRLHAANSDWPNVLGEALATWVGARQLPQRVKSMSLTEYTDAVTYLPIFMAYVTAGKASVKDLGIPTAYFKFAARWLADFDRHGWFNPVHAFTVSYLLATHIDS

SEQ ID NO: 26715 - protein, 2111 aa, Pseudomonas psychrophila
MDKYFSSLVEQALSRTTESTLSVLSITDPGLREHLGGLMRAECGKEGSFLAPPLFEQTFGWEESPFTMAQLAAQKQLLSKEIVASLDGKANGRYRFGSTWRPFTHQLASWHSLLEKKHSVVVTSGTGSGKTECFMVPVLDDLYREYRDIGSKPLVGVRALFLYPLNALINSQRERLNAWTQSFGSGIRYCLYNGNTEELQAKKRTEQIERPNEILSRELMREQPAPILVTNGTMLEYMMVRQVDAPIVRKSREQKSLRWIVLDEAHTYVGSQAAELALQLRRVMTAFGVMPKDVRFVATSATIAGDDAAEQLKQFLSDLSGVPVTQIDVWGGKRVIPELASCRQKPVTLQQLESMPAANQEDPEIHPDRYEALVHSPIAHELRNVLVSAPKPLKLTEMASHMSRHQGQSLTQDEILRWLDLCSGTRPNESEPAFLKLRAHFFQRTTHGLWACFDKYCSAKHGTPLQEKWPFGYVYVNQRQACSCGSPVFELVFCNDCNEPHLLARDHGGKLIQWESSAGDEFSLQAEASVEEDADSPGGNLLTNTPLVLGTVNSDGPSYIPVEFDKHAGSFMGVSGERVPLRMNDLDVVCSRKDCSYSGYQGAFPFRRAMLGGPFYVANAVPTVLEYCQDYQDDEQKPEFGPQSLPGRGRRLITFTDSRQGTARMAVRMQQEAERSRLRGLVVEILNWHQKSHSNAQTLSSSVGPEVLQQLIAKAKEDVTLYRSLGIKEEVRVAEDKVARFTALLAAATGLKVRPELVSLAWSELVNELKQRADLQEKGPMLLANKYQKPEIFKETDGPQKLAEMLLFREFMRRPKRQNSLETQGLVKVSYLGLEKIQEAPAYWEQKGLRPDDWRDFLKVALDFYVRENSFIQMTEEWKDWIGSRFSSKTLRNPESKEADDNRVKRWPQIRNGNHSHRLAKLLLLGAGLNPSSSSDVDLVNAWLRDAWLQLTRPGAALKSDENRYYLPREHMLFLLVDRAFVCPITNKLLDTTFKGFTPYLPAHMDFSKLTDEKRKSFVCEQVELPSIWEFDRSQEDYAPGLAKIRTQVAADAPINELRTRNLWTDINDRAVEGGFYYRTAEHSAQQSSERLGSYEDMFKKGQINVLNCSTTMEMGVDIGGISAVVMNNVPPHPANYLQRAGRAGRSKESRALAYTLCKNNPHDQQVFANPSWPFETKIPAPAVALNSARLVQRHVNSMVLSDFLCNVVGPTQTEKTSLNAQWFYDDTKGGSQCDRFLERLGLAVCDMDEALSLLVKGTALAGITPDQLRRRSMDQLKALQGRWLGSYRYLLSEEQQAKPNSPYLKRLQVEKARHCNEYLLRDLSARTFLPGYGFPTDVVNFDNFTIEDYIREGGAERKVKRDREDNVSRYKGLPSRNLAIAIREYAPGAEIVLDGRVFKSAGVSLHWHNLNADTNEAQRMDIAWRCDVCGELGYEEGLVKSDELTCTNDECLAIIKSANIRKVLQPSGFITDAYQSASNDIQHQKFVPVETAWVFVRAAKTPLPNPAVGAMAYGTEGQVFHHSSGENGAGFALCMSCGRAASMLSADEFPQSLSPSGEHFPPRPSKADKDQNNKRLPCQGSGSIVPNVSLGVTSFTDVFELMLHHPVSGEYIADNDQGRCIAMTLAVAMRSALAEILGVSASELGYATRPSKLENGQPIRILQLYDVISGGAGFASSAPLHVENLLSRMVKTLHCDHCESGCSECLLDSQTRHDHDKLDRKLAKDWLGDDFAHYVGLSIEDKLSLPDGKYAPGSIESVLRRLINEGVEKVTLVAAGDPNEWDLLAPQFRKAIQRYLNIDEVAVELLVPNGITDEDLLQDLQRLSLLGVSVGCYSSDYKNHFLVQASRAGEIITLASRSELAAVPGRWWHQSDALVVVSRSQPAISWNAFDLTRAGSKPAGSSLIIDLPIHQELNGPLLTFGDRFWSLLAENAQIADVLETATICRIRYSDRYIQNPSVIAILGTLFKFLKGRIADDAELQVSTLFKLGKLQGRKAFDDWSRKDDFEFFVSKWLSAMAGQTVNLVLETSNRDIPHRRRLDLEFEDGRSLTVRFDQGIAYWQVRFRSHADMWFDFDLEARDQVMHMAKVVETAQVQNSEQKWSTDVLVELNG

SEQ ID NO: 26716 - protein, 1111 aa, Pseudomonas psychrophila
MPQSVFKFSSWLGTFLLRRGVQAPDYRGLYAYHCSHEEYLDLLQQLRDLETFDKAVNDTAASACLVLFCSEWYRREYQRDHGWSWEPIWKTLGFSLSPGDLGKTIPKGLEHYWKRPMHFYESERRDFLGSLFSEGGLPFQVLREGGSRFHALFDRILKQYDQWHILGYSTAQQVEQQLEKANLPKVFASQTSVELIAHMADQLVSLVRDYGLVQAAEPVARLDTMNPKWRELFPLPLDNQTGSELLNGLLNTATVEDGKRRKESGGWACRHFLHEAEPNVLKVQVSLPAEVVFQLAIQPSTTRFELTILEGGEAVARLGPGYAVVDKGAARIRLRQREVMGRRGDCSLSLSLVAMAGGMVIASLPIENSTVALGEVPVGFEPVNDRWQLCGQASFDSLSEELLLVLPPDSALGQVDAPGDVSITEISSVLALRAFKVQGKAEFKVDCEGLYRIRTGHSAGSGLGLELAGSQLGWATKPALTFLGLPKVQWPGATGELQTQGGDLFVGGKQPGSSLLQEMLGAQYVAVRNRSGDTLLRRKIGILPADFRLELRSGERPGQGSILVHTQQRCLLRIVGDGLHTQQIKREDHVELKLSTEGLPPVRIRLSVTPSLLSDPVEIELPFPNSGCLAIDGRGKQLKRDISVDDLLGARIYLFGRHGAPTKFGLELTLKGNTAKNASYSWSYTATEKPVDISLFNIREQIVDLLSLQSGIDQVVELRVFGNGQDANFRVRKYATEMVLDRDRQVLRASNLQDGNTALPEPILMLLHEPMRGAVHLGSRFSEGVPTGEFELPGLVERNGPWLLLPRQGSPVSFRPLFIAGGWEPVPQSDDAHSLQKAVLTFDHASPVSSFAPVLDSMSVNPMHSGWQFFRALYDGYGYLPLATFEAWRALVGHPRALSMALFKFEMEPKFLSRIESEFPIFWEFLPVTEIHLAAKRFGAFLKVKGVADEAVSALVGRMFARLGEAFPTYGESVQRYLSGKPVGPEIHMDLKTFRAVIHGWYIQLMRDRSDATWPKYGGKRLERWHNKQSDSVISFRLEMDYRNAVVYLPVFAAAIASGEAQFSDVFEDSVEAIFFLRQVRDFDSSWFNSIYQYCLLNNVMGMHKAAPVNG

SEQ ID NO: 26717 - protein, 2084 aa, Pseudomonas putida TRO1
MRFFRNLIEQSLERTREATLGVLGINHPGLRRHLNESMVNTLGAEGCFLAPPVFEHTFGWQEAELRLQDLPSEGLLSPSLLDTLACAPAYRFPKTAHPYVHQLQAWRTLLDETPHSAVITTGTGSGKTECFMVPILEDLIREQERNEAALVGVRALFLYPLNALINSQQERLDAWTRKYGSNIRFCLYNGKTEERADKVRKEQQKKLNQILSRELLRKEPAPILMTNATMLEYMLVRQVDNSILEISRQQKSLRWIVLDEAHTYVGSQAAEMSLLLRRVVQAFGRQSEQIRFIATSATIAGADAEDRLKRYLANLAGVPLDQVEVIGGSRVWPDLEFDSPGNNIALQAIRDIEPETAVSAARFKALCDSTTARSLRHAVVSSGKPLDLDDLISAVSNQLQGGSPLEQQQEVLDWLDTMTGTHPAEQQLPFLKLRAHLFQRMLHGLWSCVDPQCSAKSAHLQDWPFGNVYVTQRARCECNAPVYELGFCDDCKTPHLLAEDRNGELHQPSPYAGDEFALNHEIGGEDAPVELLTANAMSTRLIIAALPAAHGPYFSISLDLESQKLGAVNATRNIGIMLTEEKDCCCSLCDNSSFGTNDFLRKAYLGAPFYIANAVPTVLEFCPDPDKEDCEGRSPEELPGRGRKLITFTDSRQGTARIAVRMQQEAERSRLRGLVFETLRNAQAKADAAPRDIPNGSPAELLTLAENLEKQGLAGMAAVLRNQAELLQSGAAPTNQAETIPWPQMADTIAAARDIDKFILRYNRYANPALFDGSEGGLTMARLLLAREFSRRPKNQNSTETLGLIKVGYQGLEKVSTAPPLWVDTRAIPALGAANDSRSALTLDDWRDFLKVALDFYVRENTFIPMENKMRRWMGSRFSPKALYSPKSDVQESSTIRKWPQIKTGTPHRLIKLLELATGLNRAMNADADKINSWLEAAWLALVNAGILESSDTGHRLRLETLTFSLPNEGWVCPLTRRIFDTTFRGLTPYLPQKLLSQDYRCQKIQLPALSTLMPDGSPVPKQVQIRQLVARDPVIAQLRQGSLWTDISDRTVEGGFYYRTAEHSAQQSAKRLDDYVEDFKRGDINVLNCSTTMEMGVDIGGISAVVMNNLPPHPANYLQRAGRAGRRSEARAIAYTLCKADPHNQRAFANPKWPFVTAIPAPSITLNSARIVQRHVNSLLLALFLRMHSSNDGDRTKLTLHWFFAPDDSPVQQFMAWLAASPNEFDRAVKQLVRGTCLEGRSLSSITGETRLALRDLEERWLGEYRNINHKLQAASDGPYKKALALEKQRHENEYLLRYLASSAFLPGYGFPTDVVSLKTYNVEDFLHQQQKSDASREDSIFDNKEMPSRSLNIAIREYAPGAQVVIDGRVYRSAGVSLQWHADGQVNEAQKFDIAWRCPECGNTGVIENAYANNEGLSCSHCTTPIPPSERRMVLRPGGFVTDFYEETTNDVTSQKFIRVERPRIQLNGESIALPDQRCGFMRFGHDGSVFHHSSGEHEMGYAVCMTCGRAESMLASGEVPRDLQPDKAHRPVGGLAGSRKERDCSGEAVKASLHLGYQIRTDVLEVFLRNPLTGEWLPDTPEGRLIATTLGVAMRDVIADRLGIASSEMGFSHRLDRDRDTRQGRSVIQLFDEVSGGAGFVLAGLSDIALLLGKALDRLQCPANCENVCSHCLASQDSRVEREELDRKLALRWLYESRLVEHLGLPDTFAGLHGARYCSVGPLRELSAAINLLDRRDPTAAILLCLHGDCADWDLDHPRFREQVLTWAIAERLKVRLGIAGSARLNAEQKETLALLARLGVELVELQTGTLQAPYLVAQVSSQAGARSLYSNMNNVGVPGADWLKGHADVVWATSKLMPAIAGNSINCSDWSQPPQGARIVEVTSQLDGPVNTLKKRIATLIDDQMPELASLLANDQAVSVSYSDRYLKSPWSLMLLSSFLELFRNDQLQSLAVQTLAPSGSQPSYLLSHDWMRVDDQEAILELWLKSQFDIAPRIHVMNSPRDLLHCRVITVNWMSGKISKILLDQGMGYWRGRMPYRDQMGFDFNASPHEQALQMVEKLSSAHMQQSGEWPTYISCSMN

SEQ ID NO: 26718 - protein, 1043 aa, Pseudomonas putida TRO1
MGNPLHAIHLGACFCLFVSEQYRRNYNSLWSWSGAETELGISLTPQQHAALTNDGLAYWKRPIRFRDSGRDWLGSLFTEGGLPWPLVQSESHGFGRAVRRGIKHFYRTEGNRRTTADLMADFEEGLPTAFRNLETRRLLAGIVDQLMYLVEHYPLKDHHDPVSHLDQQAPGWTDAFPIPLDESNARTLLNDWLRDAGQKRQERKEALEKRQAFICEHFLHGSLPQWSIRTDLTLPPEETFAVDPTTLGSTRLELAYYEGDRLLARGGSVYGQLTVEGIKVRFANPQVTVERRALEEPLSLRLLENGRTVHCLFFDGSALDYREAPLVFENRSERWQLVATSSCSVVSGLARLRIPEDFFITSEGAAPDTLAQDAENGRWLEILSDLSLAKGADHYQIELNRAGGDDLKPTLTGVFALYESSPSIVFLGWPRLELPEGYPHPRDELVEFVNGELLDRQRNSSYGLARYTLRNRSGKTLLQRRFGVLPKEFSLSLFLGLGQQSARLLPKGAQLLDLQVVSKSLAVEQSEHALHLRHHEENPPTTFILEAGQDLPPIQLRLPYPYQGAHLLDQYGNPSRTRELTLVELIGYRIALTSGLPQGQTFHMELELICTEQPHPKRAFSIRVGTAPVMLNLFSYLSDMQNMLSAVDEQDAYIRLSLETEQPLLKLDIRRYGGQLQWEGRYAFYICNTSNAAMLDGVQAEAMLLSDPKRTPLHLTEKTSETVGTGCFDIPQKMQFQGPWLIYPGEQSSVRFRPGLYITPDNIFDSESEVCSLHRAAELFHPQHNPHVIEQQIAAMAANFNHSGWQYLADLKQHYRHLPLSSFETWKVLSRNREALSFAVFRLEMDEWFCARIRDELAVIWEAVPLPLWVQAYRLFHDSMRLTGLPETLVNNLVSNRTNVLRCIVSGFDYLGDYLSTGNRRSLTKLPPESVLPIWYQDLRRLHESNRNWPTLLGSELSRWVDRQRLPPLVKALSLVEFTDAVAYLPIFMAFVTAGKARITDLPATPAYLKFAIRLVSDFDRQGWFIPVHALMVSYLLASQDEA

SEQ ID NO: 26719 - protein, 1970 aa, Pseudomonas sp. HPB0071
MSKYFSTLVDQALSRTTESTLSILSITHPGLRQHLTGLMRAECGTEGSFLAPPLFEQTFGWEESALSMTELATHEKLLSPEIVASLDGKANGRYRFGADWKPFTHQLASWRALLDKKRSVVVTSGTGSGKTECFMVPVLDDLYREYHKGGKKPLVGVRALFLYPLNALINSQRERLYAWTQGFGSGIRYCLYNGNTEELRAKVRSEQALKPNEILSRELMREEPAPILVTNGTMLEYMMVRQVDAPIVRISKAQKSLRWIVLDEAHTYVGSQAAELALQLRRVMTAFGVTPQEVRFVATSATIAGAEAAEQLKQFLSDLSGVPVTQIDVLGGQRIVPTLAPCQQTPVSLEVLEAMSEADGADSDIHAKRYEALVHSPQARTLRDLLVNTGKPLKLTEITHQMNQRTDGSLTQGDVLRWLDLCSGTRPSAKDAAFLKLRAHFFQRTTHGLWACFDKYCSAKRETTLTENWPFGYVYVSQRQTCTCGSPVFELAFCNDCNEPHLLARDKSGKLIQWESSGGDEFSLQAEIPGEEDTSSNDSASLPIKTPLVIASADNAGDAYVSADFDKMTGVASGVSPTLVRLAVNNTEAQCSNHHCRFSGYAESFPFRRAMLGGPFYVANAVPTVLEYCQDYQDDESASDYGPQSLPGRGRRLITFTDSRQGTARMAVRMQQEAERSRLRGLVVEILSWNQRSQGNNQLIGASMSAEQREKLEKIIAIEKNTLAGYRDIGMSAQFITDAEAKIAALEGQLSVSSGKKANPTLVSLPWPDLANELKQKADLKGSMLLYNQYQKPEIFKETDGPYKLAEMLLFREFMRRPKRQNSLETQGLVKVGYVGLDKIHETPTYWEEKGLTLKDWLDFLKVALDFYVRENSFIQIDEGWLQWIGSRFSAKTLRNPESKESDEIRVKRWPQIRGGNYSQRLIKLLLMAADLNPRNPSDVDRVNSWLKAAWKQLTKPGATLKSDENRYYLPREHIEFSLVHKAFICPITNKLLDTTFKGFTPYLPTHLNFDRISNEQRESFVAQPVELPSVWEFDRSQEDYLPGLALIREEVRQNAQVKELRSRNLWTDINDRAVEGGFYYRTAEHSAQQSSERLGSYEGMFKKGQINVLNCSTTMEMGVDIGGISAVVMNNVPPHPANYLQRAGRAGRSKESRALAYTLCKHNPHDQQVFANPSWPFETKIPAPAVALNSERLVQRHVNSLLLADFLCNVVGSTQTEKTNLNTQWFYSDESGQSLCARFLERLARVKLDIDDALERLVIRTALAGLPAEKLRRQSIAQLKPLQDRWLDSYRYLLAEEKQAKAQSPYLKRIQIEKSRHCNEYLLRDLSARTFLPGYGFPTDVVNFDNFTIEDYLRDRNAESQLKRDREDNVSRYKGLPSRNLSIAIREYAPGAEIVLDGRVFKSAGVSLHWHNVNANTNEAQKMDIAWRCDVCGELGYEEGLVKTGALTCTNNDCQAIIKPENRLSVLQPSGFVTDAYQTASNNIQHQKFIPVETAWVFVNAEKKPLPNPKVGLMAYGTSGQVFHHSAGEHGAGFALCMSCGRAESMLPEGIFPQGLSPEGTHYPPRPTKEDKDQNNKRLACQGSGSLMSNVTLGATAFTDVFELTLHHPLRGEYLVDTEQGRTIAMTLAVALRLSLASILGVSASELGYATRPTKLANGQSVRVVQLYDIISGGAGFATSAARHVEEVLRGMVEKLACAHCESGCSECLLDSQTRHDHDKLDRQLALEWLGRDFVHHVGLADEDKLSFTDGRYEPGSLEEALRRLINEGAKKLVLFTSSETAEWDLAAPQFRKALVNYVSLDDVEVVLVIPEGDLEPEIRQDLQRLAALGIKLCSANAKPNSVIAAQVVLPNGITTLGTASTTATVPGSRWHQNDQLVVRSHLQPAINLTAVTVPATIDVVSQANNIADIQIHDELNGPFVEFGKRFWSHLCKGNEQLSSSVDTGIISRLTYTDRYIQNPAAVVILGKV

SEQ ID NO: 26720 - protein, 1116 aa, Pseudomonas sp. HPB0071
MLKSSGSSVFKCAAWLNSFLQRRGLQTADGRGLYEYHCSYAEYLDLKQVLKAAAGSNGSVRDLAACACLVLFGSEWYRREYQSSCGWSWEPIWTALEFRLSAAELSTAIPKGLEGYWKRPIHSFIESERRDFLGSLFSEGGLPFQVLREEGSRFQVLFDRILKHYDQCHLMGFTTLQQARQHLEKTTLPQAFSSPTSVELIAHMTDQLVALVRDYTLTETNEPVARLDAMNPKWRELFPLPLDNQTGNELLNGLLKTATEEGKKQRKPANGWACRHFWDEGLPDVLKVQLSMPAEVAFRLEVPASTTRFELEIFEGEKAIASIGSGYATVDNGLARIRLRQREVIARRQDCTAQLHLVALAGGLVMASLPIEASSVALGDAPLGFEQGDGRWQLCGQASFTTAKADLMLVMPQGASISVVEGTGEASIAEASAICGLPTVRAQGRAQLQVQCEESYRIRLGHTAGSGLDLELTGSLLYWPTRPALSFIGLPRVRWPAGSGEQQQQGSELYIAGKKPGSGILQDMLGAHYVSVRNHAGDTLLRRKAGILPADFRLELRSGEAPGQGSVLIYTQQNCLFQIDDASVQVKKFKHSDHTELKLSAGAFPPVKVRLLVTPSLLADPVEIELPFPNAGFLAIGASGKPLKRNFCIEELLGARLYLFGRGGVPTRYGLELALKGNTARNARYTWSYTASDKPLEISLFNLKEQIIDLLSLHSGIDQAVELRIFGSGYDECFRIRNYSTDMRLDRERQVVYSSTLNDSGVALPEPELMLLHDPFRSSVSLRSRTSEGVPTGEFELPALIERDGPWLMVPKAGSSVAFRPLFIAGGWEPVSAFDDVQSLQKAVLTFDHTAVVSSFTPVLNAMAINPMHSGWQFLRALYEGYGYLPLATFEVWKALVSNTRALAMALFKFEMNTVFLGRLEAEFPLLWECLPVKDIKQAASRFADVLAEKGVDPNAVNNLMDNLLSRLEQIYPTYGKNVQGYLLNRPVGQDIQIPPALFRNIVVGWYQELIRERSEAEWPSFGGQPLERWHNTQADSVLAFTPEMDFRKAVVYLPIFAAAVASGRARFDEVFADHAEAIFFLRQIRDFDSNWFNSLYQYCLLNNVMNPDKAVLVNE

SEQ ID NO: 26721 - protein, 1771 aa, Pseudomonas stutzeri KOS6
MLYQKNYFSALTDNLSTRSERAAQGLLSLGNPQLRQFLHDQLTAAPGTPGAWLADPVFEPTFGWQESAETMGSLAGGNLLHWRLADTMAHPPKKEDGEDLIDPFPEDRRLFTHQLAAWEILNRAEPQSLVVTSGTGSGKTECFLVPVLNQLAKAIDAGEDPEGVRALFIYPLNALINSQQNRLDAWTHGFGGQIRHCLYTGALENERRNRDQQYDGQVIDRKSLRASPPQLLVTNATMLEYMLIRKDDEPILQKSAGRLRWIILDEAHTHIGSQAAEMALLLRRVMLAFQVKPQDVRFVATSATFGSDTQTIESLRTFLADIGGVDPQQVHVVQGHRDIPALLNATPDAEQDTPEAIGAIEADREQSALRYQRLEASPTARRLRALFMPDGQVKPQSLQGLIRESGLPSAQVLAWLDLLSGTKSAEGLSFLPLRAHLFHNVIPAIRACVDRHCSHKVGSALEHADWPFGMVYLEERTHCRCGAPLMPLVSCEECNESFLQAATTNHGRLIDQSQQQVDEFSLDEEPTDTDDQADDIALLSRVLITNRPTNYSYPEFLDRDSQRLKHDGPKDGYLELQVFRSQKNECPCCGANIQGRSLLRPARIGTPFTLSTVIGTLLEFCPPDPMPTGKPFQGRKLISFTDSRQGTARIAVKLQQDSERNRIRGLVYQHLLHSQPANPLSPTQQDKLRALEAKKACDSLDDSEEMLLDVLKDKQAIALSGMEISWTDMANYLAGTPELQMGMLDYYNNLAPNTFGKQDSVALANMLLAREFYRRPKRANSLETLGLVQVCYPKLASITSKPMAWPAHLDVESWRIYLKVLMDFFVRENTILNIDKRWQSLIGARISPKWAVPPVLGKKPEKLQSRFARWPTVNTVNGIQSRAILLLCKAFNWSTAAHQDHIDSILSEAWRVLQGKLLTSFGDSYQLDLKDLSFRLPETVYLCPVSRRFIDTPFEQLSPYTPRTDRDMVVKVRPYTLPRPPEALLHVPGDEGLLAVRDWLNSEPQIQQLRKDALWSDIMDRVIEGGHYFRAAEHSAQQSQQKLKGYEKLFEKGKLNLLSCSTTMEMGVDIGGISVVAMNNVPPHPANYLQRAGRAGRRREGRSLALAVCKNTPHDQSVFNNPLWPFNTPMRMPKVSLQSPDLVQRHVNAWLLSHWLKHVVAAQEIKSMTAGAFFLDGKLPMSLAARFCLWCDNQAVDTETLVGQALKDITRRSILDTAPQPKLFEHASRRMKEIMQAWQQEYSASEAQLQQIADKKAAAYRAMDAQLSRIAKEYLLSELADRRFLPGYGFPTDIVSFDNRCMQTLKREDGDQREDNRARYRSLASRDRITGLREYAPGAELVMDGLVYKSSGITLNWHAPASAENVKELQLFKKAWRCGQCGASDSAINPGLEINCQECGAPIERDNIREYLVPAGFAVDFFDEPHNDISRLQYVPVKAPWLNVPASWVCLANPALGQFRASQQAHLFNYTSGANQQGFAICLECGKAEPMLSYPDASAPANEQYLPAIFRQKAQHRRLRGGKSNEQGDGTNICPGSHNSWKIKQNVHLGHDSLTDALELVLRNPTSGELLNDDITAYSIAVALREAIAADLGIQTEELGCASHPIKVDGQPTRAIQVFDLRSGGYTTQAAERLNEASLWRKVIARLDSCNCSHACQNCLLSFDTRFEAERLNRHVALEWINQTWLAGLALPAELAVFGPKSQAEIATLQEAVERAITRDDNAKTVAIYFTAPAEEWDLAVARRLRHQLHSWESVGHLVQLHLLESTVSSL

SEQ ID NO: 26722 - protein, 1140 aa, Pseudomonas stutzeri KOS6
MRLKKGHDPRTAFEAAHSFTKKELCVPLVQWISDFLSRRGLQEPDGRPLFAYKTSSEEFETLRQLLHGLNLGQHAHPEYAQAWLLFAAEWWKREYPGGAWRWGPLCEAAGQRKVAHEKTRSLVIDGRRQWRLQTTIKSEGKRFIGLVAVNGGLPMRLVESAQGGLSRLLRMVTEQALEYRLQDEHLRQAIEAQAELLPACYQQAPVYELLDSLVKAVLHIRKAYALQGAQDPIARLQEECPHWEELFPIALDSQAAASLIKGLVRDTVSITPQSRRPPFQIQRGLRFSSDGSIPVYELSFVMQAQARRDQVAEALGMAVDALPPHFQLLLRIGEREYLVGEALLRDEEYQLIARPLPAIHSLHNAAQLIVSRWGATLHIANLPGGEALSHDEPLIFENTYPFARLLAQGDALVKGESALAAMPARTIVYAEEGEARELHDCLADGQMLMELPAGTTRLTYKQQPFVVTISASATRHPEAYWHGNSLEALSVPGLLFRGTPRLRIEQGTGFSSYAPAHELFVRTQGKELPLAQARAPGLCRLIWRKDGQRLLNTRAVLLPDEASITYAPGATTLEGSIRLHHWPDVPVRCESEQIALERRHDGTGLTLRLKSTGSRPATTVPLCLQWPDGEQKLTLPFPGYGVTLLRNDTPLKLNQALTIEELIGCRAVLMSTQGAENWQIRLTSGGTDSRSTLSQEIRYTGIREIRLFELIPAIQQMMSCHPGLDHTVQLELIHAHQTHARLQVGRYSTRIRLHSQKEMASLSDGARDLLPEQPQAEGLILALPLAEPEHDPVSLPLHFSEQVFTGNWLVSLPTDAVGPWLLYTPDDSKLHSRPTVVPPTVRQLSKPLTPLRDALCEADGEERMRLLRAALRAMAADPEAEDWQTLELLLDRLHHLPLASLDICQALIREPQALAMATLRLDDFSSRLAERLPCELPFEWLLIAPEHWFDTFATLRQQLAADNPRLLSLIRTDIQSKSQFLSRWQPALRFIFDQGLHHSFDLQSPDVGFFLKNPAMLTASWQSHLFDGEHSAMQQMFRRNPAETHQYPGSGNTDIGAFLKTPHGQMLLRCSKLPANDFKLATVMLPFMAAFDTYAGRGQQWQADPARLFSLRDARQFDTVWFDSAYQLGLAMAQAASMQK

SEQ ID NO: 26723 - protein, 2068 aa, Pseudomonas stutzeri NF13
MLYQKNYFSALTSNLSTRSERAAQGLLSLGNPQLRQFLHDQLTAAPGTPGAWLADPVFEPTFGWQESSETMSSLAGGNLLHRRLAEAMAAPPKKPHDLAEEYAFPSNRHPFTHQLAAWEILNRPEPQSLVVTSGTGSGKTECFLVPVLSQLAKEIDAGEDPEGVRALFIYPLNALINSQQNRLDAWTHGFGGQIRHCLYTGALENERRNRDQQYDGQVIDRKSLRASPPQLLVTNATMLEYMLIRKDDEPILQKSAGKLRWIILDEAHTHIGSQAAEMALLLRRVMLAFQVKPQDVRFVATSATFGSDTQTIESLRTFLADIGGVDPQQVHVVQGHRDIPALLNATPVAEQDTPEAICAIEADQEQSTLRYQRLEASPTARRLRALFMPDGQVKPQSLQGLIRESGLPSAQVLAWLDLLSGTKSAEGLSFLPLRAHLFHNVIPAIRACVDRHCSHKAGTALEHADWPFGMVYLEERTHCRCGAPLMPLVSCEECNESFLQAGTKGSSELVDPTQQQVDEFALDEDSAGAEDQAEDTVSSIQILITNRAVKNYSGDFLDRTTQRLTPNRPADGGIELQLFRTIKNECPCCGANIQGRSLLRPARIGTPFTLSTVIGTLLEFCPPDPMPTGKPFQGRKLISFTDSRQGTARIAIKLQQDSERNRIRGLIYQRLLQAQPIDGLSAEDLQDLQDLQTATQLSRIEQKHLQSLLDRQAEATKGAEISWTDMANHLAGTPELQMGMLDYYNNLAPNTFGKQDSVALASMLLAREFYRRPKRANSLETLGLVQVCYPKLANVTGKPMAWPAHLDAESWRTYLKVLLDFFVRENTILNINERWQSLIGARIRPKWVVAPVLGEKPEKLQSRFVRWPAVNTVNGIQSRAILLLCKAFNWSTAIHQDQIDSILSEAWRVLTQQAKLLITSGDGYQLDLKDLSFRLPETVYLCPVSRRFIDTPFEQLSPYTPRTDREMVVKVTPYTLPRPPEALLHVPGDEGLLAIRDWLNSEPQIQQLRNDALWSDVMDRVIEGGHYFRAAEHSAQQPKSKLDSYEGKFKTGKLNLLSCSTTMEMGVDIGGISVVAMNNVPPHPANYLQRAGRAGRRREGRSLALAVCKNTPHDQSVFNNPLWPFNTPMRMPKVSLQSPDLVQRHVNAWLLSHWLKHVVAAQEIKSMTAGAFFLDGELPMSLAARFCLWCDNQRVDTEALVEQSLKDITRRSILDTAPQPELFKHASSRIAEIMQAWRQEHSASHTQLQQITDKKAAAYRAMEAQLSRIEKEYLLSELADRRFLPGYGFPTDIVSFDNRCMQTLKREDGDQREDNRARYRSLASRDRITGLREYAPGAELVMDGLVYKSSGITLNWHAPASAENVKELQLFKKAWRCGQCGASDSAINPGLEINCQECGAPIERDNIREYLVPAGFAVDFFDEPHNDISRLQYVPVKAPWLNVPANWICLANPALGQFRASQQAHLFNYTSGANQQGFAICLECGKAEPMLSYPDASAPANEQYLPAIFRQKAQHRRLRGGKSNEQGDGTNICPGSHNSWKIKQNVHLGHDSLTDALELVLRNPTSGELLNDDITAYSIAVALREAIAADLGIQTEELGCASHPIKVDSQPTRAIQVFDLRSGGYTTQAAERLNEASLWRKVIARLDSCNCSHACQNCLLSFDTRFEAERLNRHVALEWINQTWLAGLALPAELAVFGPKSQAEIATLQEAVERAITRDDNAKTVAIYFTAPAEEWDLAVARRLRHQLHSWESVGHLVQLHLLESTVSSLPRDQKEWLAKLAFNGVQICLHNSIPDLGALALNVSLQGPQGCIAWASDNTNLAAPGHTWDLAEAGARIIRGTPSDLKAERILNAADLMPAPPPGLIKIEIGNQLDGSLDNFARRFWEHLGTEANGLINDALTGKDPITELVYSDRYVCSPLVVNLLVSVIHELGRLSDADFAIRILGRQYQREDNRSPWQCRHDWHSARERDEALRQALAYCGREGEVLSLPTLPHYRRLQLKLRSGNQLTVQFDQGLSYWEAERSEKSYQLRFDFTSRELGEEIMERISCKVSAAGEENTQIFLSSS

SEQ ID NO: 26724 - protein, 1027 aa, Pseudomonas stutzeri NF13
MPQDKTRRLVIDGRHLWRLQTAIKNEGKRFIGLVAVNGGLPMRLVESAQGGLSGLLRMVTEQALRYELQDEQLRQAIEAQAELLPACYQQAPVYELLDNLVKAVLHIRKTYALQGAQDPIARLQEECPHWEDLFPIALDSQAAASLIKGLVRDTVSITPQSRRPPFQIQRGLRFSSDGSMPVYELTFAMQAQARRDQVAEALGMAMEALPPHFQLLLRIGEREYLVGEALLKDEEYQLIARPLPAIHSLHNAAQLIVSRWGATLHIANLPGGEALSHDEPLIFENTYPFARLLAQGDALVKGESALAAMPARTIVYAEEGEARELHDCLADGQMLMELPAGTTRLTYKQQPFVVTISASATRHPEAYWHGNSLEALSVPGLLFRGTPRLRIEQGTGFSSYAPAHELFVRTQGRELPLAQARAPGLCRLIWRKDGQRLLNTRAVLLPDEASITYAPGASTLEGSIRLHHWPDVPVRCESEQVALERRHDRTGLLLRLKSNGSRPATTVPLCLQWPDGEQRLTLPFPGYGVTLLRNDTPLKLNQALTIEELIGCRAVLMSAQGAENWQIRLTSSGADARSTLSQEIRYTGIREIRLFELIPAIQQMLSCHPGLDHVVQLELIHAHQTHARLQVGRYSTRIRLHSQREMASLNDSGSDVLLEQPHAEGLILGLPLAEPEHDPVSLPLHFSEQVFTGSWLVSLPDDAVGPWLLYTSAESPLHSRATIVPPTASQLSKPLTPLRKALCEANGEERMCQLRAALHTMAADPEAEDWQTLELLLDRLHHLPLASLDICQALIREPQALATATLLLDDFSSRLAERLPCELPFEWLLIAPKHWFDTFATLRQQLAADNPRLLSVIRNDIQSKSQFLSRWQPALRFIFDQGLHHSFDLQSPDVAFFLRNPAMLTDSWLSQLLDGEHSAMQQMFRRNPAETHQYPGSGNTDIGEFLKTPHGQMLLRHCKLPANDFKLTTVMLPFMAAFDTYSGHGQQWQADPARLFSLRNARQFDTVWFDSAYQLGLAMAQAASMQK

SEQ ID NO: 26725 - protein, 1448 aa, Pseudomonas syringae pv. maculicola
MAYFESLITELKTRSTRAIQSLLSLESKPLRDFLSEKLAATPGAKDALLADPVFEPTFGWLKSGATLQSLSGGLLSSQLVKCMQRPPAVFADEYTFPGDRQIFTHQLEAWEILGQEKPASLVVTSGTGSGKSECFLVPILNSLARDIERRGRLQGVQALFIYPLNALINSQQNRLDAWTDGFNGDLRYCLYTGALENEVKSTAKQSAGHVADRTSLRASAPPVLVTNATMLEYMLVRKEDAPILEQSKGQLRWIVLDEAHTYVGSQAAEMALLLRRVMLAFDVDPRDVRFIATSATFGSDKKTVESLQSFLADMAGIEPDQIHVVHGSRHVPDIAPLQTQHSSNKSTDELMEIGNGQEISRERYHALTQHPMARQIRTAFLKPGGTRVNTLADLHRSLNGDVSPADILNMLDILSGTRSGTTDDDPFFLPLRVHLFHNVLSGIKVCIDPKCAHKLQTVLDTPEWPYGMVYTAERLSCDCGCPLIGLLSCNDCNQPFLLAHRRGNLSLTAADDHSEDEFSINLDAEVELDGDETSGATSDVHMLIVNRIAGVQTERLWFNLTKKQVEGHASTLDSIEMRVFNQIQRDQCPCCAQESASGRQFRRASIGTPFMLSTVISTVLEFCPEDKIDPLNKPFRGRRMISFTDSRQGTARIAVKLQQDSERNRIRSLVYHSLLGATPSASLSEEDEQDLHDYLDEERAGTIRPRDVRRLQELKDRKASLSKGVELPWTEMVSSLTTNKDLQKGLLRYYSTLSKIAFPETSGARTLAGVMLAREFVRRPKRQNNLETMGLVEITYPALAHVVKAPLEWPTGNIVSWRAYLKILLDFYVRENSFLHLDQEWQRFIGAKISPKWLLAPTSKEKNTSRIKTWPQVNPGSKRQSRPIQLLCNAFSWDAQDNQDKINHLLQEAWIALTTTSTILRSSETGYQLHLESLHFRLSSDVFLCPITRRLLDTSFSNLSPYSAPGGQNPLRPIRPVSMPRYPQAFGGDVDASEKILNARAWLNSEPKVIGLRDEGLWSDLHDRIIEGASYFRTAEHSAQQPKAKLKSYETQFRSGHINLLSCSTTMEMGIDISGITAVAMNNVPPQTANYLQRAGRAGRRGEGRAVALTICRKTPHDQHVFAKPRWPFDTNMIIPAVSLRSPDLVARHVNSYLLSYWLKTVLGREELKSMTIGPFCIEEGGDSLAGRFEAWCTNTAGILPAVIKGIEKLVHRSPLVDMNSETLTRHTAAAMRDVAQSWREDYNNASQELGYFKGCSEKKSAALRALNAQLERITGEYLLSELATRRFLPGYGFPTDIVSFNNIIRQPPDKAREYSREDNRGRYLDLATRDRVTGLREYAPGAEVVMDGWVYESRGISLNWRLPASEEILREAQLFKYAWRCSHCGASGSTFAQQPGDCGQCGSPLDEQEDVLRYLVPSGFAVDFYGKDPHTDISKPTYIPVQRPWLR

SEQ ID NO: 26726 - protein, 794 aa, Pseudomonas syringae pv. maculicola
MAVQNVQLPDDCHMSFAQLQLSRYGETLHTAMLPGGERLEENAPWVFENAFPVARLLKVGSLRIGAPSALVCIPDAAFFFSEEGECESRLSPLAGRSLKLLTSGTSRMSYKGDVYRIHCGVQGNESELLQWRGRILDVHAEPAFVYAGMPTLHRVHKDGTSSRVTDGEIVWSTVAGEERVVSDARPALGMGTLSWKLDGETQIRQTAVCLPNNAVIESEAGSSASTGLIHLRGWPAQAVISAGNECHVDAVPDGMSWRVAVTAQPNQIPSHFSLQLAWAGGRTQKITLPFPGKGAVFLDSAGTRLAPDAELEVNNLMGSRLTLMPGRHGVAWKVCLSLKSKRGGQELATRVFSYGRSCEVRLFEFMRPIQQMLACTEDLDAYVQVEALEGGSLRAKLLVRRYATRLEVDRSSGSVHYPAHALAPDEDALKLLDVFALCITHPEQGPETLTRARSKEDSLERWWFNPQTKQEGAWLIYPDTQSRNAFRPLAWSTHDQPTGQPVIAHEGLRAALAIESSGARFAALTSAVDTMTSSPGHADWRLLEELLIHTSHLPLAGLDIWRVFARSPAAMITALLHLEGFAEHVAQRITEELPFEWVLASPQDWVSSVAILRRYYYQDDGDRGVRALKRSLEAIKQSMSMSQPGTVLGIDLACHEAMSLPTQETRLLLNHNAVLDDHLFRALVAIEHGPLQSLVRQSDRGDMWPNELHQDISKFIGSASGKSILSRFPPVLGDFKRLTIAFPMWVGYEVTRGAARDWLAQPDRLHALRTYQSFDPAWFDAAYHFSLVHFFKPA

SEQ ID NO: 26727 - protein, 2106 aa, Raoultella planticola ATCC 33531
MTTRYFSSLIEQSLSRSTEATLSIMGVTNPYLREHLTQQMAAECGKDGTFLASPVFEQTFGWKESNFTMRDLATKQTLLSKEVVDSLDNEENGRYRFGSTWKPFTHQLASWQALLDKKHSVVVTSGTGSGKTECFMVPVLEDLYRELRDNGKNPLIGVRALFLYPLNALINSQRERLDAWTQGFGTGIRYCLYNGNTEELHASVKSEQTNRPNEVLSREKMREEPAPILVTNGTMLEYMMVRQVDAPIIQKSKAEKSLRWIVLDEAHTYVGSQAAELALQLRRVMTAFGVTPDDVRFVATSATIAGSDAEKQLKKFLSELSGVPQERIDVLGGSRVIPDLAPCQHLSLSLDELEHIPDSDGEGISLERYTALTHSPQARHLREMLVSQPRPMTLDTLTRRLNELTKHQYTQQDILRWLDLCTGTLPNAQEPAFLKVRAHIFQRNTQGIWACVDKHCSAKHNTALEKGWPFGNVYVNQRQNCECGSPVYELAFCNECNEPHLLARDKKGKLVQWDNKGGDEFSLQDEAPDDFDSSSEKVQKEQVFQPPHIIAAECNTEMGYIVQRLDRQTRSIGVVNPDSIPLAMNDIEQVCSASNCGYRGGKGKQPFRRALLGGPFYVTNIVPTVLEYCQDFISDEGKEGVGPLSLPGRGRRLITFTDSRQGTARMAVRMQQEAERSRLRGSVVDILGWHQRKQSTHAPNAQADVTKLTEMAAQAREEAKNLHDWGMPEEAIRREEQAERLEHAIQVATGGKVDTVLISLSWSEMVKELKDKADIKGPILQYNHYLKPEIFTENGGPLKLAEMLLFREFMRRPKRTNSLETQGLVQVGYQGLEKAHSIPANWQDKGLTLDDWRDFLKVTLDFYVRESNYTQLDEDLKNWIGSRFSSKFVRNPDSKEPDDNQVKRWPQIRHGNVTQRLVKLLILGAKFSSVNTVTIDIVNAWLKEAWLQLTGSLAVLKSDGNRFYLPKEHLTFSLVQKAYICPVTNKLLATAFRGLTPYLPMHIQFERLTSTQYDAFIAQAVTLPEIWQHDRSQDDYVDGLIKVRDWLGQDPLVAQLRSQNLWTDINDRVVEGGFYYRTAEHSAQQSSERLQSYERMFKNGQLNVLNCSTTMEMGVDIGGISAVVMNNVPPHPANYLQRAGRAGRSKESRAISYTLCKGNPHDRQVFANPLWPFETVIPAPMVAMNSERLVQRHVNSLLLSDYLCHVIGETEKERTSLNSQWFFGEELEQSVCNRFKAWLERPTLSIDAALVRLVKGTVLHGVAAEKLRDKTCDAITALQKRWLGIYRDLVKQESESQPNTPYRKRLELEKKRHCGEYLLRDLAARTFLPGYGFPTDVVTFDNFTMEDYIREKTYKVRDKSDREDNVSRYKGLPSRNLSVAIREYAPGAEIILDGRVFRSAGVSLHWHNLNADTNEAQRLDSAWRCHKCGTLGYEEGIGGSGDLFCTNDACGERITPENRRQVLQPAGFVTDAHDPVTNNIETMKFIPVVPAWVFVKAERVPLPNPLMGFMASGADGNVFQQSMGEGGHGYALCLSCGRAESMLNLTDAPKSMEAHYPPRPGKADRDSQNQRIICPGSTALNKNVTLGALARTDVLELIVRRPQDGEYIADNTEEGRIVAMTLAVALRRSLASVLGVSAAELGYAVRPVRLENEQSVLAVQLYDIISGGAGFASSAPLHIEAVLKGMVKQLGCHHCDTACSECLLDSQTRHDHDLLDRKAALAWLGADFSHYIGLPDEEKFSLADAQYCPGSIEDALRRAINDGGRKLTLWMSGPLNEWDLYARQFRTAIQNYRLKDDVEVVLVIPRNIDDPEILLELAQFTAIGVQLCQSELDKDTPLVAQVTFDDRLMTLISRSHEATIPGPNWHLNSQMVIRSHLQAPIALYKTELPSEDAGSKGLVNDIEIHKQLNGPVSQFGQRFWNLLTESQDDIQRLLTECRVTRVHYSDRYLQNPVALALLGGLLKTLKPMLTQEAEVTIDTLFRSKERPGNKPFHDWMSEADFQDFADQWFAASMGRAVEIQAFNSGRDIPHHRKLMVSFDNGQALKIRFDQGMGYWRINFARAWRDFNFNDDVSFQLGNMAQACAEGLVVNSEESWATDVLVQVIAP

SEQ ID NO: 26728 - protein, 1099 aa, Raoultella planticola ATCC 33531
MSHTEHISILKCTPWLVKFLNRRSLRRPDNRPLYEYHATSDEYGELKRLLRAIGLPDGYKSDKGYAACFTLFCSEWYRRDYERECGWAWEPIYKTIGVSASSSEMGKIIPKGLDGYWGRPVRFYDTERRNFLGSLFSEGGLPFRLLKESNSRFQSMFSLILNQYAQAQSANISTFALVHAAVEKSFLPVVFKEDTSVELISRMAEQLVSLVQIYDLSNHTEPVKELDRVHPKWRDSFPVPLDDDTGTSFLNGLLRTASTESKPRLQKNRTTLCQFLWSENHPEALQSLISLPEELSFSIDSEPSTTRFELAIYEDGNEIASLGPAYATLSNSQAKMRVRKREIKFFRKNPAASLFIVARAGGMLVGTRLLEGSEVAVGDVPLVFVFDKSEWLLQGQASCSVRGSHVLIVLPKDGCLVSELEDCETDFSALGCRALIVKGRLDILIEGGETYRIKTGREQIIQTGFSFQGKRLNWTSYPDELFLGVPGITHNSENLLTHHYRLFFNGTFIDNCDVQEKMGAQFISVRNENNETLLRKKIGVLPNDFCLEIKNGQQANEGSVIITTKYPCLYSLKEKILEVGRERLSGSTEILMKAEGIPPASISLQITPNLTANPIVILLPFPARGCLAFDKDEKPLPKNLTINDLLGARAYLFGKNGEPTRYQLELRLRSRSGMQAWYEWRYSAGENPVELTLYSLREHIDNLLSLEEGIDQTVDMRIEGGGSSFTWQIRRYKYSLEYDREMQLLLANSVSNRTGQIPSPVIMLLSEPERKAVSLVSRTSEGVPVGEFELSSTIQNNGPWLVLPKQGEEASFRPCYIAGEPVIQSDTTAIQSLQKATQLFNPRSDVNTITLVLEQMASDPAHSGWQFLRNLYNQFGYLPLATFEVWRALVQHPRALAMSLFKFEMSIDYLSRIESEFPVFWEFLPITEVKHASMRFRAFLTHKGAPEEMQIKLLGRMFQQLGTVFPTYASEVQLWLDQGKLPPTFPAQMIKGIIHDWHQELLREHGESRWPEFGGSGLFRWYASQKDPIIEVSPDTSYRYSVTLLPIFAAAVACGKTTFDSVFENKPGAVFFLRQVRDFDSRWFNAIFQYCLLRNVAKK

SEQ ID NO: 26729 - protein, 2041 aa, Rhizobium etli CIAT 652
MKPFNTLSDIRRRSAEAIIAQSGIRNVALADHMRRMFGSEAPDAGALLQQPVIEGSHPYVAAKKTMSEVEASVLHPRFVSMLDEIAPSNDYRFPKGRRPFAHQLTAWEHLAGRSAPQSVLVTSGTGSGKTECFLFPILSDLVRQLDATSTPLEGVQAIMLYPLNALIESQQERLSTWTAPFGGKIRYCLYNGNLPQSEPNSVRRETPEKLRDREQLRASPPPVLVTNITMLEYMLARSEDQPIIEKSKGKLKWIVLDEAHSLVGAAAAEIALLLRRVLLAFECKPEEVHFVATSATIGSGDDIQAQLKRFLADVAGIEHANVHVVEGHRQLPGRPSKRGRITDVEALFDVRPEERYEALAADDRVWSLISDRLFKEPLTLAEFERSARSLGLDAERFLTLLSSAARPHPDAKEDEERLAPVRVHSFERAVPGMWTCVNDGCPASPAGWSFGAVYLDRCDLCPTCSAPVLEIVSCSECGEVLLEAVELPNDRIRGTRRDLGKDEFEAEATREDDGTGDDADDEADDTEQEMVGDLVGTEILIGAAAGPDFRPLHLSRTDWKIEAVASPGSASVYSALKQDSCPCCQTVATNGVDKLLRPVRFGAPFMIASAAPILLEGVDPEVDRGVSPAQGRRVLSFTDSRQGTARMSAKIQAEAERNFVRSFVYHTVQHSLQIGTAVDASEIEKTIASLEPVVAATRDPALQNLLDQQRKALADASKPSLEGVAWDDMVARLSQRKEVGQWVKEVWEPRDPELFNDSRKLADFLLLREFARRPRTALSLESLGLARLRFAAIDNQTVVPPAFARHGKGIEDWRAFLYAITAFFLRGNSAVAIDPAVMHWITPKAKTRALRAPGRTTDGERRFLGWPGVPRKGNPSTPQLLLMNGLGLDRSRPDHRADFEEIFDKAWHQLQAVFNSDPDRPALDLRKAHIAPLPDGYYCALTRRIVDIAPLGSSPLVRASRHSARRVAEPRKMPSLPAVLLGDVDFDEGRRKIREWLDGSDDVTALREDGAWNNISDRVALFADYSRSAEHSAQQDASVLQHYEAQFKAGKINILNCSTTMEMGVDIGSVSTVLMTNVPPSIANYKQRVGRAGRRRQPFSLAFTFCRDRPLDREAFNSPERYLGRTLAAPKVALSSRPIVQRHVNAFLLRRFMLARGGNPLKMEIGAFMGTPAVVGEARPVAELRPIAAFREWLGKPSTAAAVEMELTSLVRHSVLEGQSDLVESCLEIATLLETGFVNEWTGLQALAKDEGIKDAAKGRMALELKRLCQEFLLSALADRGFLPGHGFPTGVVTFVPHKPKSTDPQDGRRTTRLVGPQRSLDLAIRDYAPGSEIVLDGLVHKSAGVLLNWKRPASEENVREVQSLKFHWVCQSCGTSDTGRDLVTECPICAGAVRNEQYLRPAGFSVDAREKAHAETDIISYVPAEEPSVSVRASAWASLPVPDLGRFRSTREGSVYYSNRGQSKNGYALCLHCGRAAPDHQKLENGDPDPTHPSPLELHLPLRWKKGESRLFCEGNDSSWAIKRNLELGYEITTDVFELQPSASLTRAAATALVIALREGIARDLGIEADEMGFATQSWDGVLAQRVRSMLVFDRAAGGAGFSTAIPSRLPTVLREARSVLNCPNPGCTTGCASCVLVSDAPFEEGRLDRTAALDFLDAHLSFNDDVPEEDRFGVDPVLSTSTVDEVNRLLVVSAKPIVHVFLPEATDPGQLSEWASLTQFGKWYSQGYDVRFVLPDAALSSYDGAKKLAFYDLAQRFSRTGGNFPILSGNLTTQANGAFAGISVTTAGRTTAWASRDASPWLPGTRWGQPATMPVVKAAVNWTPSFSPLESKALLPSATSRYEPIKGELDRSLTLFGNGMASKIRGLLEELGIPKTSTIESVIYSDPYVKSPLVAKMFVDTVAALTKGSTPRPVVSLLTGDRPGTKPGMQNAISNDWRDSAVAEMVLKEYAKRKDVDLDITFQRVAHGRYMHVRFPGGKEATIVFDQGFGAWNSVGNGGTSTRFDFRDPPVRQAESMGRCGAMVSKTGLGPTYLVASID

SEQ ID NO: 26730 - protein, 1074 aa, Rhizobium etli CIAT 652
MPADALVRWKLSYLGRRGLEVPDGRPLHRYRMSDNEYAEIREILRAATGRLLREDGVAASLFVAFCAEWFRRESTSLFLKWDSLNLDVLNDVPHDARRRLAEAGLGYWKRPLLRFDNGREFLLSLALEGGISAHVIADGGSTWLSEYLRAIMRFSLMDGHADHVKGYAHDMSEMIRKSYKQEGFVDLCAELVLTLLDWRRTVETAPAGVDPVQFLDAHSPDWKATLPIFIPSNDDQIARRLLNGLLVEKVETGPVGSGVGAERYLVFETDRWRPALQLNARGEIPAGKLPGISSKGRWKAGPSGKLADFLPSQLALFEPPTEHEKTWRVRPTAQLDRLLVGFGFNEAVTVNLTCGSDVQPFPWPGGSPVVGKIMAFVAEGADVQSQKKLRLAKVGSASLPAATVYVLAPADWIVTTEEGTALPANWPGDAGTIVHVVTGTAYFQKPAATFGERYRIEAGKDERQESLSLTSVEASPLQSMDELEIFEGPVTIEIASPAGARQIRPNEVLIRQPGGPWTPVNDRRVSRLGVFDISWRDPTANIQLERRRIAIMPIGARLKGRMVSGLEAQIVEENLEDWSVSLASAEVKADVVNAGEHRFMFARRPRYRVEAVLCAPGGHPFSVSIPIKSRLASVISSDGEIIQPGQEIDVTALRGAIAESSSKATLTLTPRNERSNSLQFSFTGEIPLSVLKPVVEELMARISEQDAVLDMDFIGDARTSIRVKRYRYSQPHYRDGQIVLDQTMPSDPVVRMILRPAEEHPLSSNADGTFALPDLCEGPCLVYVRDGPDVVSRPLLVRLPAGDVGESHFRSALFAPDTRTRMEKFEQAIFQFEAGTLPPDDVNYLLDLATNLNGLPAAAFDVLKVMARRPRSMLRLLFKARDDAQRQAIWALQDQLPFLWLSMPSRAWRDMLVAEREEFETALSLVQLPPEKVFEFLANRVRSLCDSLLSLEPALAAVLDVGGVKAQPTLDMVLMEYVRDQHLFDDETSHRNTVRNPVLELLSQSSIRLPPEFENHSVAEFEGIAVPAFLAAAATGRIASSGLSDVVVRKTLREHGRYVSFAYPHLLRFYEALS

SEQ ID NO: 26731 - protein, 2036 aa, Rhizobium phaseoli Ch24-10
MKPFSTLSDIRARSAEAIISQSGVRNIALVAQLRAMFNSPSTSEGGLLQQPIIEGAHPFVPADVDMGGVEASVLHPDFVSAIDALPDGSDYRFPRTRLPFKHQLQAWKHLSPGGAPQSVLVTSGTGSGKTECFLFPILSDLVSQAKGRSAPLEGVQAIMLYPLNALIESQRERLSAWTRPFGGQVRYCLYNGDLPNSQPASLRRATPEQQIDREQLRESPPPVLVTNITMLEYMLARSEDQPIIEKSKGKLKWIVLDEAHSLVGAAAAEIALLLRRVLLAFDCKPEDVHFVATSATIGSGDDVQKQLKRFLADVAGIADANVHVVEGKRQLPSRPTKRAKLPPASTLNTLSSSALFEAMSTDDAVWNFIEKQLFATPQQLTEFERVAGTLGLEAGDFLTFLSHAVRPHPKTGEDERLAPMRIHSFERAVPGVWSCVNPTCKGSPEGWSFGKLFLDRCDTCPTCSAPVLEVISCVDCGEVVLEAEEDAANDRILPTRRVADKDEFEFEAGRENDVPDADEYADDETKEHDVAIRRKILLGPATSGRFRPLHLSTSKWTVEPTSTTETITVGSDLKGDACPCCGSPSRGGIDRLLRPLRFGAPFMIANAAPILLEGVDPAKNSPALPSGGRRLLSFTDSRQGTARMSAKVQAEAERNFLRSFVYHSVQHSMQSGTAVDTEGLEAQIKALETALAATPIAALQTMLDAAKKKLADSSGPNMSGIAWSEMVERLSRTSEVSDWVKDVWKPRDDDALFHDSVKLADFLLMREFARRPRTALSVETLGMARLRFKEVDGVMTMPPCFTRYGKSIEDWRSFLYAIATFFLRANAAVDVQQGLMRWITPRAKLKALLGPGQKTEGDRRMRAWPGVPNNAANMSTPQILLINGLGLDVSNAEHRADILECFDRAWQQLQPVFNADPTHRSLDIRKAYIAPVSDAYLCPLTRRVLDTAPFGISPMVRAARHGDRRQVERIQLPLHPRPLIGSTDLEADRKLTKDWLEQSERITSLRTQGVWNNIADRVAMFADYARSAEHSAQQDSALLRRYEKMFKDGEINILNCSTTMEMGVDIGSVSTVMMTNVPPSVASYKQRVGRAGRRGQPFSLAFTFCRDRPLDREAFTSPVSYLNRSMAAPRVALSSRPIVQRHVNAYLLRRFMVERGGDPIRMTIGAFMGTPAKLGEPRLLVNERPVAMFKEWLAAPTTATVVAADLEKLVRHSVLEGETLLTEASRAIVDELQGNFENEWDGLLALARDEGMNDAGKSRMGMELKRLCDEFLLSALADRGFLPGHGFPTGVVTFLPHKHKSDQPADGGRMKRLSGPQRSLDLAIRDYAPGSEIVLDGLVHKSAGILLNWKRPASEEHIRDVQSLKFHWSCDRCGTTDTSRTRMSDCPICAATVWNRPYIRPAGFSVDVRDKVHAETDIISYVAPEEPSVSVRASPWISLPIPDLGRFRSSREGAVYYSNRGPAKNGYALCLHCGRAAPDHATMDNGEVDQTVTSPLSQHAPLRWKTGEDASRCQGNDNAWAVRRNLELGYEIATDVFELQPSVPLKKAAATALVIAMREGIARILGIEADEMGFATRTSEGLLAQHARSMLIFDRAAGGAGFSASIATRFPAVLAEARRVLECRNPGCVTGCAACVLVSDAPFEEGSLDRSSALRFLTNHLTFHNPLADEDRLSSDAAVSISVVDEVERKLRDAVRPTVYVFLPETTDAGLLGEWSATAYLDRWRFLGNDVIFVVPEGFVSKCDTAGRLALYDLGQRFAKGGSNPVHAGRSMEFNGLAAGIIVATQSGSTVWATRDPSTWEAGPTWSQPMSAPIVHGTVVVELRTSPLERSSLLPASSSHFERITGELDRGLALFGGGMSTKIKARLESVGIPKSLKIETVAYSDPYIKSPLVAKMFVDTVSGLLKGSTGATVELSTNAPGGKLGVPFRIYDDWRDSAEAEAVMDEYAKLKGVDLKVRFGQVPHGRYMTIKFKGGVSATIVFDQGFGAWRTTSSGNLISFDFRVSAKRQAEALARSTVSVAKAGFGPTYMVASKDN

SEQ ID NO: 26732 - protein, 1140 aa, Rhizobium phaseoli Ch24-10
MQRKGEKLRLSEFSDTELKYEFEQCPQDLPRLEALNKELNRRDSDEAFDLQLEVVTVLNALRKQTASPSRGDVAGAWLKAFLLSRGIAVTDGRPLHQYRMTDPEYQEARAILMDSTHRLARDDGQIASLFVSFCAEWFRREATSFFLKWDALAPEVFATIPHNRRRDLVELGLGFWKRPLIRSENGTGYLLTLAIEGGISAHVISEFGSSWLSDYLRTIMRFALADGNRAHVRGFAGDMSNDIRVSFRQDGFIDLCCELILKLIEWKRVADQGPAGIDPVTFLDAQNPDWKDSLPIYMPADHDKIARRLLSGLLVEKPGPVIRSGIAAERYLTFEAGTWKPAVSLAADGEVPAGKLPGVPSSGRWKASPSGELANYLPSHIALFEPPTEDQKTWRVRSVTPLGKLLVGVSLNHTLTVNLTCGAEVVPLVWPGGGAIGSSISSFLPTEVTDMSEPKTLRFVKTGSVSLPATTVYVLVPKDWMALPAEGSDAGRTWEVDGGKVLHGVTATTYFLRPGAASGERYRIEPGKDARQETLNISSRGAVSFHAEDEIETLEGPVTFGILSEGSVRHPQAGEILVRGLDDQWRPLIDRRITAAGVYEISWRDPLADIQLERRRIAIIPAGARVTGETISTHEGRIVYDRLPGWRVELLGEFGIVERLEGEIRFTIAGKPRYRVEALLRPPIGKPFKINISVKVREAAIILPDGSVVASGQTIDVTALRGSIAASPYATTLTLSSKADRSSSLHFRFTGEFPLAALKPAVEELMAPMNDQDGLLELEFLGETRIPIKLRKYRYARPELVHGAIVFGENFRAKAVAKMILQPTREHLLQKNTNGTYTLPDWCHGPCLVYLRDGPDVVARPLVVNLPLNEIPSSKLQAALARVDFMRLMADVRAALDDLAEGKLPTNDVRLLLDLVASLNGLSAVVFVVLKELAMRPKALLRLLLSAGDADRHAVWALQQELPFLWLALPARDWEAAMNAESDALHQALSAMPDEMRFATIMAHFKNLREKLLAIEPALDTVFVRTGFPAETMPSLDAVLQGFVQDQRMYDDDAPAKAPGRNAVLEDLRKSAINLPAEFQRFSFEEFECMAAPAALAAVAAGRLSLTSMTELILRKTLREHGHFVSCAYPHLLKFYEVQA

SEQ ID NO: 26733 - protein, 2042 aa, Rhizobium sp. Leaf453
MKPFNTLSDIRRRTAEAIIAQSGIRNIALADHMRRMFGSDSSTEGALLQQPVIEGAHPYVTAEGTMANVETSLLHTRFVSMLDEIPEPNDYRFPRSRRPFAHQLETWQHLASGVSPQSVLVTSGTGSGKTECFLFPILSDLVRQLEMVTTPLEGVQAIMLYPLNALIESQQERLSAWTAPFSGKIRYCLYNGNLPQSEKNSVRRETPEKLRDREQLRASPPPVLVTNITMLEYMLARADDQPIIEKSKGKLKWIVLDEAHSLVGAAAAEIALLLRRVLIAFDCKPEEIHFVATSATIGSGDDIQSQLKRFLADVAGIEHANVHVVEGHRQLPGRPAQRARIANVDSLFASPPEERYEALAGDDRVWSFISEKLFKEPLTLAEFERSAQTLGLDAERYLNLLSSAVRPHPESKGDEERLAPVRVHSFERAIPGLWTCVNGGCPASPAGWSFGAVYIDRCDFCPACTAPVLEIVSCSECGEVLLEAEELSNDSIRSTRRDLGKDEFELEATRDDDGTGDDVDAEAAEEDRTLAEIVGTEILIGSMAGPEFRPLHLSRTDWSIEAVGSVNSVSVYSALKLESCPCCQTNATKGIDRLLRPVRFGAPFMIANAAPILLEGVDPEMARETAPSQGKRVLSFTDSRQGTARMSAKIQAESERNFVRSFVFHTVQHSLGTGSTVDTTDIENTIAGLEAALALSPNAVLQGLLDKERQALADANKPSPGGIAWDDMVTRLSQRKEVAEWVKEVWQPRDPELFHDSRKLAEFLLLREFARRPRTALSLESLGLARLRFAGIDSKTVVPPAFVRYGKGVEDWQAFLYAITTFFLRANAAIAIDEGVMHWITPRARIRSLRAPGRTTDGDRRYLAWPGVPKNPSNPSTPQMLLMNGLGLDPSRPDHRADFEDIFNGAWNQLQAVLNNNPDHPALDLRKAHIAPLLDGFFCTLTRRIVDIAPFGASPLVRASRHSARRLAEPRKLPALPSILLGDVDFEEGRRAIRDWLESSDKVKELRADGAWNNISDRVALFAEYSRSAEHSAQQDASVLHHYERQFKAGAINILNCSTTMEMGVDIGSVSTVLMTNVPPSVANYKQRVGRAGRRRQPFSLAFTFCRDRPLDREAFNSPARYLARSLAAPKVALSSRPIVQRHVNAFLLRRFMLERGGNAIKMEIGAFMGTPAVVGENRPLVDQRPIAAFREWLALPSTEGAVEKDLSSLVRHSVLEGQFDLVESCLEIATLLETGFVNEWTGLQALAKDEGIKEAAKGRMALELKRLCQEFLLSALADRGFLPGHGFPTGVVTFVPHKAKTSEPQDGRRTTRLVGPQRSLDLAIRDYAPGSEIVLDGLVHKSAGVLLNWKRPASEENVREVQSLKFHWVCQTCGTSDTGREFVPECPVCAGAVKNDQYLRPAGFSVDARDKAHAETDIISYVPPEEPSVSVRASAWTSLPIPDLGRFRSTREGSVYYSNRGQSKNGYALCLHCGRAAPDHENLENGDPNPDLRSPLQLHLPLRWKKGESRMFCEGNDSSWAIRRNLELGYEITTDVFELQPSAPLSRAAATALVLALREGIARDLGIEADEMGFATQNWEGTLAQRVRSMLVFDRAAGGAGFSSAIPARLPTVLREARAVLDCSNPGCMTGCAACVLVSDAPFEEGKLDRIAALKFLDAHLSLNDALPDDERFAEDALLSTSPLDEVNRLLIDSAKPVVHVFLPETTDAGHLSEWAALAQFAKWHSQGYDIRFVVPDAALRAYDGARKLALYDLGLRFSRTGGAFPIHSGTATTAANGAVAGIAVTSGLRTTAWASRDLSSWLPGANWGEPARKPVVKATVDWMPSATSIDKKSLLPSAASKYDQIENELDRALTIFGGSMASRIRGLLEDLGIPKTTTIESIVYSDPYVKSPLVAKMFVDTVSALTKGATPRRVVELLTGDQPGNKPGMQNSLSNDWRDGVIAEAVLKEYAKKKDIDFRVTFKRVAHGRYMHLRFDGGKSATIVFDQGFGAWKTAGNGASSSARFDFRDSAVRQADAMGRSSAMVSKSGHGPTYLVANID

SEQ ID NO: 26734 - protein, 1079 aa, Rhizobium sp. Leaf453
MPAAKPNDPIVRWLSTYLFKRALRAPDGRQLHRYRMTDAEYLEAQTLLRISQAKILREDGSAGALFVVFCGEWFRRESTTLFLKWDALNLDVLINVPHDVRRRLSEVGLKYWKRPLLKFDGGREFLLSLALEGGISANVIADGGSSWLSDYLRNIMRFSLLDGTADHVKGFAHDMSWMIRKSYRQEGFVDLCAELVLTLLDWRRTVETAPAGVDPVAFLDAQSPEWKSTLPIFIPTNDEQIARRLLSGLLVEKAEAGTAGSGVCAERYLVLDGELWRPALLLKARGDIPAGKLPGVSLKGRWKAGPSGKLVDFLPSQLALFEPPTEFEKTWRIRPTATLDRMHVGFEFNQGVTVNLTCGSEVHPFVWPGGSPVVAKIMSFVAEGSVDQTAPKKLRLAKTGSASLPAPTVYVLAPADWIAITQEGTAAPETWPAAGKTVVHIVTGTTYFQKPDAAIGERYRIEAGKDERQESLALSATDTSPLQPADEIEIFEGLVTIEISSQTGVRQIRPNEVLIRQPGGSWTPVKERRLSRLGVFDISWRDPIADIQLERRRIAIVPVGARLHGRMTSATEAQIIQDNFDGWTIGLGSGDIAARNVRDGEHRLSFAGRPRYRVEAILRAPQGQPFKVSVPIKSRLASVISSDGEIVQPGQEIDVTVLRGAIAESSSKATLTLTPRNERSSSLQFSFSGEIPLSVLKPVVEELMARISDQDAVLDMDFIGDARTSIRLKRYRYPSPRYHDGLVVLDRVLPSDPVVRMILRPTEEHALKPHGEGTFALPDFCEGPCLVYVRDGPDVVSRPLLVVLPASGGDRSVLLSALFSPNTRSRTAAFTEALAEFESGSLRAEDVNYLIDLACNLNGLPAAAFDVLKVMALRPHSLLRLLFKAKDDAQRQAIWGLQDQLPFLWLALPSKAWRDTLVSEREEFERALSLVQLPPERLFELLAGHFQSLRAALLSIEPALTAVFDAGLAQLQPSLDIVLMEFVRDQHLFDDETAERKVGRNPVLELLLQSSIRLPAEFKNHSVADFEGIAVPAFLAAAATGKIASSSLSDIVVRRTLREHGRYVSFAYPHLLRFYEALS

SEQ ID NO: 26735 - protein, 1778 aa, Rhizobium sp. NT-26
MLEYMLVRPQDRPIIDQSKGKLKWIILDEAHTLVGSAAAEVALLLRRVIEAFEVDPKTVRFVATSATIGDGPKVKEDLRRFLADVAGTEVSTVEVISGDRLLPTRSGKGGQAPSPSAMIDLPAADLFDKLSSHDPVWSLVAGLKDQPLQTQQLDRLGRAMGVDGETLAMALTRATSRSGETLAPLRVHSFHRAFSGLWCCTNPACPDSLGGEWAAGRLLFERDEACPKCHMPVAELYSCNECGEAFMIADEKGKRLAPPRNLPPNDEFLFEADRSASDDDEVNADEKLDLDTPTIAHCFSLSGRGLMPIFVDTATGMTADGDGERRYRLSAHPGGGKGPCPGCGATAKSGDKLYPFRFGAPFTISNAAPMLLEAMPPAEGLVQPSLPQTPPDLPTGGRQLISFTDSRQGTARMAAKLQMESERAFVRSFIYQVVQHKASGSGDNGKAEELKARIAKVASYPDWEDGPLKNVVREAEEQLAKLSGGGSIPWSDLRAQLAERTEVRDWLPDVWGSRADLFKKAAASAPSQIAEALLLREMMRRPKLANSPETMGLARFVFPGIEKHAQAPSGFLQRGGSLEDWKAWLTCLVTFSIRSNLAVAVNSDLLQWIMRKGFPKTLASPGMEPGRRQLRWPAASAAGKQPQVVELLRLGLGLNVGSSSDRAEINDWLQKAWNQLHTLFPKNANGEQALDFDKLEVGPLRNAFRCPVTRRIVDVAPFGLSPYARTKVDRPQPITMPVAPADADTATRTLFLSEDTDVAALRDSGLWTDMHDRIALYSPYSRSAEHSAQLSSRHLRHYESEFKAGRINLLNCSTTMEMGVDIGSVNGVLMANVPPSIANYKQRVGRAGRRGQPLSLAFTFAKDRPLDREAFRDPVAFLSRSIAAPRVALDSRPIVQRHVNALLFGRFLNLNSGNPLSMETGDFFGFPAAPNSVRAAKDARPIELMLRWLAKATTAEENKVALQRLVRGSVLAGRDDLLDQCAEALKSAETEFETEWSGLQSQFQGADIIGASAAIEAHLKRLCKEFLLADLADRGFLPGHGFPNHVVAFELDRNDLQGELNNDDRRGRRHGGPKRPLDIAIRDYAPGSETVVDGQVYRVGGVTLNWHRPSSDDGVREVQALRWAARCSHCGDNWTGAGSRPEECRTCADPSIVAESFLKPAGFLRDRHAPVHAEVENVDFIRAEAPRISAGASRWEALSQPTTGRFRVNRRGTVYYHTRGQNNEGYGLCLRCGRMEAMKPGETICTGLIDHKPLRARENFLQPCEGNSETFAVQHSLHLGYEIYTDVLELQPARSPEIGAANAIAIAIREATARHLGIEPEEMGYSIGPSRNAMATSTLSIFLHDRAAGGAGYVVQAANEMRAILRSARRILDCPRDCAHACSSCVLVSDAPEREEDLDRHKAISFLDTHLSLPDVIDVADAFAAESDVSDRPLSEIDDWLSHRAGSELHVWTGVNDIVELSDWAFTPLFKRWTDNGRRVSLILPSDFVSSLDAAQVLFLRDYCTRNGLDVAEGEPKRFNNGGYLFAYATDGTKGRGWASRDETVLMAGPGWGATHAAPIAHAPVVLSPKYREISLQELKPRSGAAVVVLGSGLEGPIADFGASMARKIRDAMVKCGVATADLVIRANYQDRYARSPLVLKLLVDTVASLNSTGAPSLSILTAPDRSGYSRTHIASDIISDVVLADLARNYAANKGFEAELSVGQLPHKRSLSLHMQSGTTMIVDLDQGFGWLEYNGRERFFDANGSTQRNTEWLRKLMGQVKRRNAYDSQMVLWQKT

SEQ ID NO: 26736 - protein, 911 aa, Rhizobium sp. NT-26
MEDALSRGSLPTYNEIVDYAESNAGFLPESYRDETIYELTAELIGHLHACRKKLPPGETQTNPAGWLDVHDAGWRERLPIHLPEDVAACNRLFNNLLTVAPRARGGGIGLARYLYRDLSGAWKQGFVAQADGELAFDALANFTEGRFRAYFAGRAGQLMSREFAHVYRSETESNGNFTVTSQAIGRLDLIGPVPFSEAIAVNLVRDGMAIPAVCWPGGSQRVSNCLVLRPTDREDRLELLATGSLRSTLPCLFVLTPKGSTVSGHEGGEATRIWNDSTWQLWRIEGMALVVTPGGERYRIESAANTSDDRRLELNQLFHPDLVFEDTSLVAVEAPLNLRQFSADGGATSNGVIRVLKSGQPIAARDEVSGVVTVQWQDDEGFIIDRGRLLVLPRNFELRGQIDSGGARVEWHELPGWRIDALASDGTVTTTTDRTEYGWLCPWSGTRNGYQRIQLTDPHGSTIKARLRLTAKQTVLLDAEGKVRTDQPQMSLAELRGSLLLTSRPVLIDLDLRGAGANRALISRRIEGETPMVRFGDLAQSLLGLSAERGPSVCLLDDSHRTICSIRRPQEQPSILHDQIEFARPLAEGELTVVRSLQCPDEEHVLGDQDQLIPRLLDKVPGPLLLYRRKGDAVTTRPTVISGAQDAVPEEALDAIARAAVIQDEALRRRAYHALLSGAANNPAAGSTISRILRTIHSLRGLSPRALDITRELPHFPNLLCRLLLAANSERVESIVALERDLPFLWMALNVNSWRDAALAEWERAKEDFAQFYDAKDAQSQASALMKERIDFLVERTQWFAGIRAALGFSSELRSDLRQLAQEHVRLQVDQSDPIATALINEAEKAGLPADIATLNYHHYATLVAPVVLAAVASGRIEWSPAVAAGLRNALDIDHNYISAAFPHCLQRFQS

SEQ ID NO: 26737 - protein, 2007 aa, Rhizobium sp. Root149
MTIRPFETLSRLRQRMAEAIVAQSGVRNPALAAQLRQSLSRADSEGALVPPPILEAAFPFVPSDKMLGELSGNLLASATVDALVGDDTGRGYSFPRERRPYLHQLTAWKTLTSSETKSALITAGTGSGKTECFLVPLLDSLFRRQERATGVEAIMLYPLNALIASQQERLDAWTKPAGGKIRYCLYNGNLPETHKSVVQRDKLSSNPQQVPDRKTLRASPPPLLVTNLTMLEYMLIRPQDRPIIDQSKGKLKWIILDEAHTLVGSAAAEVALLLRRVIEAFEVDPKNVRFVATSATIGDGPKVKEDLRRFLADVAGTDVSTIEVISGDRLLPTRSGNGGQAPSPSAMIDLPAADLFDKLSSYDPVWSLVAGLKDQPLQTQQLDSLGRAMGVDGETLAMALTRATSRSGETLAPLRVHSFHRAFSGLWCCTNPACPDSMGGEWTAGRLLFERDEECPKCRMPVAELYACNECGEAFMIADEKGTRLAPPRNLPPSDEFLFEADRSTSDDDEESDDDQLNLDTPSVSHCFSLSGRGLMPIFVDTATGMTADGDGEGRYRLSAHAGGGKGPCPACSATAKSGDKLYPFRFGAPFTISNAAPMLLEAMPGAEGLVQPPLPQTAPDLPTGGRQLISFTDSRQGTARMAAKLQMESERAFVRSFIYQAVQHKASGGGDNAKAEELKARIAKVKSFPDWADGPLESVVREAEEQLAKLSGGGTIPWTELRAQLADRTEVRDWLPDVWGSRADLFKKAAASAPSQIAEALLLREMMRRPKLANSPETMGLARFVYPAIEQHAQAPSGFVQRGGSLEDWKAWLSCLVSFSIRSNLAVTVSSDLLQWIMRKGFPKNLAAPGMEPSRRQHRWPAASAAGKQSQVVELLRLGLGLNVGSSSDRAEINDWLQKAWNQLHTVFPKNANGEQALDFNKLEVGPLRNAFHCPVTRRIVDVAPFGLSPYARTKVDRAQPITMPVAPADADAATRSVFLSEDADVAALRNSGLWTDMHDRIALYSPYSRSAEHSAQLSPGHLRHYESEFKAGRINLLNCSTTMEMGVDIGSVNGVLMANVPPSIANYKQRVGRAGRRGQPLSLAFTFAKDRPLDREAFRNPIAFLSRSLAAPRVALDSRPIVQRHVNAFLFGRFLNLNSGNPMSMEAGDFFGFSAAPNSVRITKDARPVELMLRWLSKATTAVENKIALQRLVRGSVLVGRSDLLDLCAEALKSAEAEFEAEWSGLQNQLQGADIIGASAAIEAHLKRLCKEFLLSDLADRGFLPGHGFPNHVVAFELDRKDLDSEFYNDDRRGQRHGGPKRPLDIAIRDYAPGSETVVDGQVYRVGGVTLNWHRPSSDEGVREIQALRWAARCSHCGDNWTGAGSRPEECRTCGDLSVVAESFLKPAGFLRDRHVPIHAEVDKVDYVRPETPRISAGSSQWEALSQPTAGRLRMNRRGTVYYHTRGPDSEGYGLCLKCGRMEAMRPGEAICTGLIDHKPLRARENFLQPCEGNSETFAIQTSLHLGYEIHTDVLELQPAETPTIGAANAIAIAMREATARHLGIEPDEIGYGIGPSRNAMATPTLSIFLHDRAAGGAGYVVQAASEMRVILRSARQILNCPRGCAHACSSCVLVSDAPEREEDLDRHKAISFMDAHLALPDIINAEDVFAVDSDISDRPVSEIDDWLGHRAHSVLNVWASVSDIVNLSDWALTPLFKRWTENGRRVRLILPTDSVSSLDAAQVLFLRDYNARNGLDIAEGEPVRFGNGGWLFAYVTDGTRGRGWASRDPSVLVAGPGWGANHAAPIAHAPLKLSPVYRDISHDDLKPKAGAAVVTLDAKLDGPVAGFGASMAAQMRKAMANCGIETEDHVIEAKYQDRYARSPIVLKLLIDTVASLNSKGALSLSIVTAADRGGYSRTHIASDIISDVTLSSLARDYGAQKGLVASLSVGQLAHKRSLFLQMQSGATLIVDLDQGFGWLEYVGRDKFFDPNGSNEGNVDWLKRLIGRVQRRHAHDSQMVVWRKS

SEQ ID NO: 26738 - protein, 1079 aa, Rhizobium sp. Root149
MTTSDGKILENGRQAKPSAARRLLDDILKRQGLDRPNGQPIYSYRISRDEFQRGRELLEKSAAFLDRRNAPLCAVFALVTSEWYRREAKSLWRVWSHIGVVPDTLKVSDRNDIADVGLAWWGQSPKISRQSNRKRREFLLTLALNGGLPSSLIVGETGNRVRRFFLGVMEDALSSGAVLTEDDLIDFAESRAEILPDSYRDETIYELTAELIRHLHACRMKLPRGEQQANPTGWLDIHDAGWRERLPIHLPEEVAACNRLFNNLLTVEPRARGNGIGLRRYLYRVSSGDWKQGFIALADGQLAFDAFANFSEGRFRAYFSGSAGQLMSREFAQLYRSETEKNGSFTVTSQSTARVGLVGPVPFSEAVAVSLLRDGKAVPAVCWPGGSPRVSNCIILRPTDREDRLELLATGSVRSTLPCLFALTSKDSTVSGHEGGAVNCTWNDDASALWQIEGMALVETTSGERYRVQSAADTSDDRRLEFEQLFLPDLIFEDTSLVAVEAPLRPRQFGRDVIAEENGTVRILKSGRPTDARDEVTGVVSVQWQDDEGFIVDRARLLVLPRNFSLRGQIDNGGARVEWRNLPGWRVDALDADGAVTATTDRTAHGWLCPWAGTRNGYQRIQLTDLNGVSVKARLHLTAQQIVLVDANGTVRSDQPEMSLAELRGSLLLANRPVLVDLDLRRAGANRALISRKIEGETPMVRFVDLAQSLLGLSNQRGPSVFLLDDTQRTICSIRRPQEQPTIVNDRIEFASAPADGEITVVRSLRRPDEEHVLGDDHQLSLPLPVGIPGPLLVYRRKGDAVTTRPTVTNGAQDAVSEEPADAIAQAALIEDEATRRRTYHALLKEATADPTAGATISRIVRTIHSLRGLSPRAMDITRELPQFPSLLCRLLLAANSERVESIIALERDLPFLWMAQPVGAWQDAALAEWERAKGDFAQFYDSPEAQAQATALMMERVGFLVERTQWFAGIRAALGFGGELSGSLRQLAQDHVRLHVDQSEPIATTLIMEAERAGLPADIASLNYGHYATLVAPVVLAAVARRRLEWSPSLAAGLRNALDIDQNYITSAFPHCLKHFQS

SEQ ID NO: 26739 - protein, 2033 aa, Rhizobium sp. UR51a
MKPFNTLSDIRARSAEAILSQSSVRNTALLGHLRSMFNSPSTAEGGLLQQPIVEGAHPFVPADVDMGGVDPSVLHPDFVAAIDALPNGSDYRFPKKRQPFKHQLEAWRHLSSTGNPQSVLVTSGTGSGKTECFLFPILSDLVSQAKGRSAPLEGVQAIMLYPLNALIESQRERLSAWTRPFDGKVRYCLYNGDLPNSQPASLHRATPEQQVDREQLRESPPPVLVTNITMLEYMLARSEDQPIIEKSKGKLKWIVLDEAHSLVGAAAAEIALLLRRVLLAFDCKPEDVHFVATSATIGSGDDVQNQLKRFLADVAGIKDANVHVVEGKRQLPVRPSARGKLPPADTLRNLPPSSLFDAMSADEAVWNFIEKQLFVAPQNLSEFERVARSAGLDADEFLALLSTAARPHPRTGEEERLAPMRIHSFERAVPGVWSCINPACKDSPDGWLFGKIFLDRCDTCQTCKAPVLEVISCVDCGDVVLEAEEDAANDRILPTRRVAERDEFEFEAGREQDEADADENAESDEATEVALRRRILIGPSTAGRFRPLHLSTTTWTIEATATTETVTVGSDLKGDACPCCSTPSRNGIDKLLRPMRFGAPFMIANAAPILLEGVDASGNAAAVPSEGRRLLSFTDSRQGTARMSAKVQAEAERNFLRSFVYHSVQDSMRSGTAVDKVGLETQIMALETAVAATPIPALQSMLDDARKKLADASGPNMEGIRWGEMVERLSRTREVSNWLKDVWEPRDDDALFHDNARLADFLLMREFARRPRTALSVETLGLARLRFKEIDDLATMPSAFSRYGKSIEDWRAFLYAMTTFFLRANAVVDVQQGVMRWITPRAKLRSLLAPGVSADGDRRRQTWPGIPGKAISTPQFLLVTGLGLDVSNPEHRADILECFDRAWQQLQPLFSSDPTHRALDLRKAYIAPVVQAYLCPLTRRVLDAAPFGITPLGRTARHGARRQVEAIELPCHPHPLIGSPDLTRDRASTKEWLEESDVIASLRNRGAWNNITDRVSMFADYARSAEHSAQQDSSLLRRYEQMFKDGQINILNCSTTMEMGVDIGSVSTVMMTNVPPSVASYKQRVGRAGRRGQPYSLAFTFCRDRPLDREAFTSPISYLNRSMAAPKVALSSRPIVQRHVNAYLLRRFMVERGGDALRMTIGSFMGTPARLGDPRPLMGERPVSMFKDWLAAPTTATAVSGDLEKLVRHSVLEGETLLTDASRTIVDELQGNFENEWDGLLALARDEGVKEAGKSRMGMELKRLCDEFLLSALADRGFLPGHGFPTGVVTFLPHKPRNEDPVDGGRMKRLTGPQRSLDLAIRDYAPGSEIVLDGLVHKSAGVLLNWKRPASEEHIRDVQSLKYHWSCDRCGTSDTARSRMAECPVCAATVWNRSYIRPAGFSVDVRDKVHAETDIISYVAPEEPSVSVRASPWISLPVPEMGRFRSSREGAVYYSNRGQTKNGYALCLHCGRAAPDHQALDNGDADPTLGSPLAQHPPLRWKRGEDASRCQGNDNAWAVRRNLELGYEISTDVFELQPSASLKKPAATALVIAMREGVARLLGIEADEMGYATQTSEGLLAQHARSVLIFDRAAGGAGFSASIASRLPAVLGEARKVLECRNPGCVTGCAACVLVSDAPFEDGGLDRSAALRFLMNHLAFQDALEEEDRLSPDAAISISVADEVERNLRETAKPTVYVFLPETTDPGRLSEWSATAYLDRWRFLGNRVAIVIPDGFASRCDTAGRLALYDLGQRFAHAGGSPLRIGAAPEINGLTVGIAVTSQSGVKVWATRDSSSWEANPEWGQPMSAPIIMGSTNAEIQTTVVELGSLLPAASSHFERISTELDRSLSLFGGGMANRLRARLESVGIPKSQVIRGISYSDPYIRSPLVAKMFIDTVAGLLKGAAGVAVELSTGAPGGKLNMPSRIFDDWRESVDAEAVMSEYAKLKGIDLTIQFAQVPHGRYMSIAFEGGASATIVFDQGFGAWRTTSSGHLVAHDFRTSPRRQAEALSRSSVSVAKSGYGPTYIVASKDS

SEQ ID NO: 26740 - protein, 1133 aa, Rhizobium sp. UR51a
MLRLRGFTDAELRSEFARHRDDLVQLDALNRELNSRDTDEAFDLQIEVVQVLTNLRKAAQTNTRGDAVAAWLKAFLLSRRMSAADGRPLHQYRMSDAEYDSARLLLKASRFRLDRDDGPAASLFVAFCAEWFRREATSFFLRWDALAPDVFSTIPHSRRRNLVEVGLNYWKRSLIKSETATEFLLTIAIEGGISAHVISEYGSSWLAEYLRKLMRFALADGNRDHVRGFAGDMSNEIRISFRQDGFIDLCCELILKLVEWKRVADQGPPGVDPLSFLDARHPDWKDSLPIYMPADDDRIARRLLSGLLVEKAGPVGGSGITVDRYLKFEAGIWRPAIALTADGEVSPGKLPGVSGARRWKAVPSGQLANYLPSQIALFEPPTEDQQKWRVRSLTPLDRLLVGMPLAHTVTVNLTSGSEVSPIAWPGGAGVTSPVLSFLPIEVAEGDAPKTLRLIKTGSTSLPASKIYVLVPREWRAVPAEGTEPGPIWNAEDGGILHEVTGTIYFMKPGAAAEERYRIEANMDARQESLILSSAGEVSIHSEDGIETLAGPVTLGILSEGATRAPAPEELLIRSVDDRWRPITDRKITSPGAYEISWRDPKADIQLERRRIAIVPSGGRIVGEMIGAQEGRIVHERLPGWRVDVTGEMTALKKTEGELQFTMSGKPRYRIEALLHPPMGRPFRISVPMKVREAAIILADGSVVSGGQTIDVTALRGAVAASPHATTLTLSSRTDRSNSMQFRFAGEFPLAALKPAVQEMMAPMNDQDAMLELEFLGETRIPIRLRKYRYARPIMVGGAVVFSENFSALPVAKMILQPAKEHLLQRKPDGSFEIPDWCHGPCLVYLRDGPDIVARPLVVNRPTRDNLTTPLQAALAQTEYIRLKVEVGVALDDLSEGNLPSSDVRLLVDMAVNLNGMPATGFVALQELASRPKALLRLLLSAPAQDRQALWALQQELPFLWLALPSTAWSQVLMSESDALHAALSEVPDDVRLPMIMTHLTGLREKLVEIEPALDSVFVRAGFPPLEKQSLDVVLQGFVQSQRMHDDETQTPVRRNPVLEDLKKSAISLPEDFHRFSFEEFECMAAPAALAAIAAGRLNLSATTELIVRKTLREHAHFVSCAYPHLLKFYEVQA

SEQ ID NO: 26741 - protein, 2012 aa, Rhodobacter capsulatus
MTLTNSNLDHALSRMARRSASAVVARARTSNTALNSVLLRRLAAAPGHPEALLAAPVFEAAKAWKPGDKTLGDLSGTLLEPQLVEALSAGQKYRLPKERPPYFHQLEAWRAALEAQKSVLVTSGTGSGKTECFLIPLLNDILKRVRVGAGVQAILLYPLNALIESQRERLSDWAEGLDGRVKFALYNGDTPETAFKAGHPSTRVELKNRKDIRDNPPDILVTNITMLEYLLLRAQDRAILEASQGALRWIVLDEAHSYVGSQAAEMALLLRRVRAAFGVAPEDVRLMATSATIGGEENALEKLTDFTAALAGVGRDRVAVIEGVEEDPQLPMPGPDGPLDPAALAAMTPSELWSALSPHPRIQALHRELKADPCSLTQIAGVLFADQGRTEAAQQVLDAVARAEGNGRALLAWRAHLFHRAQGGVYACVDPACPHRDAELIAPESGWSFGAVYTAPRPLCRCGAPVFEVVACGGCGAVHLQARLISGAQARLETPDPVEGDDFALDAEPEEDVAEGAASMVLLAGPQGKGRRVHLEKTTGLIFDNAPPEGTTSWPVALVEEPATRACCDQADEARLQEMRFGPAFFMGNALPQALEDLAAPEDRPGLPSGGRRAISFSDSRQGVARLAAKLQQEAERSLTRAFLYHAVQEGGAAADPHQLAELDAKIAKLKAVDAEMFAREIADAEGKRAEMTGDAGAVVRWADLVARFAAHPELRNFAGEVWRRRKLGGRMGDNPADLAQMFLLRELFRRPKVQNNPETMGLVQLVFPELDAAALNDPVPGALARAGVDAAGWLGLARAAIDFVFRDALASRIPDWMVPIVSPRFGKLNMIAAPELRFEDRPNNTRSWPGPVWKSRPMRLQSMVYDLIAGDPANPQHQDLAGEVLEKLWNLLKRTVLVSAAPGAYQLDFAKAAVTRLDAAWLCPVTRRPFGYSVAGRSPFDCKRKMDKVIFPRLPVARAVGVTTDERRALSHWCETDPEVAELRRRGLWSDMTDRVAAYPAFLRAQEHSAQIKRIELKDYEDRFNAGEINLLNCSTTMEMGVDLAAVPLVVNANVPPALSNYRQRVGRAGRRREPWAFGLTFCRDLPLDRQAFLNPAAFLTRKIAAPKVWFDSAPLVQRHVNAALIGRWLAEDGGMKIKANTGSFLGLPGSIENATPTEAPVDQFLRALAGEWGRGAALAASLRDLVRGTALEAVTPATLVAQTSAAMERLTVSWRQEYAALLDRSLGADEDTAKAFEFRARRMAGEFLLGDLARRGFTPAYGFATDVVSFDPLVSGRSDVDTEISFNARGGASRELHQAIREYAPGSEVVIDGLVYQSEGVRPAWGGEQDSSKLEDFQEMWDCGNCHAFGVSALGRPDTCPDCGSIVSDLRRILRPAGFLTAKPPHTGYESLAFSPFVAPRVSAQGGDWVALPDPAAGRYRYDPAGLVVTRASGRLGGGFAICLECGRAAPMEEGVQGVAAPVPESMVRHYPLARGRATKLTSDGHCPGGYTLPNRLQKHVHLAQTSHTDVFELQLPPPATEAQALALAAALREVLCARLGVEIPEIGLTSGPSVGADATRQVSAWLIDRAAGGAGLVARLQEVDLFSSVLAEAAQRLACPEECAHGCPSCILQPDLSLRDIRLDRRGARRLAEALVLRLQIPEALRVFGPQTRSLGGALVPAIDRLRRGGTLAKVVLCLHGMPDTWDFQGWPMRASLAMLASAGIAVELRLPSGALTHAGFDLSIKLALHRIAQHARISAVENAPHVGGLPVVSMLADAAGGWRGVAVHAAEEAQTNECWAMGGQGTVLIGPMEPPALLSSLSIEKLFEFGTGNGRVLTPEGDLDGPVAGFGRRFWGWIGKTALLEVGAMKAVGVTEVSYSDRYLLTPITLCLLAETIKATPGLGGAAVHIDLAPNGERRGLRDPSKIFEGYDDDRARQQTLAALLPKAKLRMAAQKNDLPHRRELAFTLSDGRRYRLLFDQGFGGMRAEGRDLRHDFRAPPELQAAKLHQIDLNVHAGDEPVILETRP

SEQ ID NO: 26742 - protein, 1033 aa, Rhodobacter capsulatus
MVIGANMTYDERFFASRGLEGADGRPLHGWRVSDVEKAELRRNLFVRVSSGQVLESTAKWFVLWAAEHINRTYARGVLSWELVFGGLGVSVDIKLAHALTGLGLKAWGRPLRRRASDNAALYLQSLLAEGGLPDALLSRESGYQKAVLAAVEELERHGNADPETARLIADRTLNRLPEVFGHADSSLLLAELALAIVELRRALPPEIDEAAIETWLDRAVPGWADRFPIRLSEAARAAILRPALRRESTRSESNGPPLLRALRPRADGAGWLGIIKATGGVLPDALIPAAARGQILRLTSEQGLILRAHPEAGGWRLDPVGRNFTVMPLVEPAIFTANLDGRALCDVVLEAGLPEPEEILSFWVSGEEGGLKPAAQPRTRSDRIWVLAPEGVTGEPDAGVTILGAASAPGGRLWELSGVGEIRFGPHRTSIATGAETDAQSLQILPFGEIFRGWRALGRLPVYQGRMRYLGADLGLPLRDLQGQIRETPMRRVLGGRIVQWHLGGDLCAALRCVVLPADLQIDAGEIAPGVVEARAKGLPVGWRMSLAAAGVQTPFGTEARLDVGARDPGDIVLTLHDTASGLSLDLVRAWPARAPLLISPEGERLRSNRVLALRSIHGWRGVLPEQGAAVQLRIAKAAHAIGFAEAGQIRLASYGALLGQALAMTGADGKVNLRLVAGVETNRLEIGRYDWELPRGDAPDLGAEPCRLTALTVAPPHELRVKEVEGPLDLSGWLSDVSGIWFVQGQSARGVMRPFPWSSDPLPRSTREARIETYLAQIQGLMRRPTDPGWGEIEALIRLGRAGGDCGALDQVQALGAVPECAVALLLRTNTPAEILDLETEAPLWWPLTPVSAWRSAVLHLRDLLMPKLEAAGFSAAEAKEMFLTRLRQQLGHVVSLRRELSGHVAQALGGLGLAHEVIGPDGKVISLRVMNAPALLTVSAAGLVARSPVMPQGSGGLHPKQLVAPKGFSRKVLPALEAPLIVAEVAAGLAKHPVPADILELLALRLVDPDWFDTALPLAIQIALSNPGQRK

SEQ ID NO: 26743 - protein, 2012 aa, Rhodobacter capsulatus; identical to SEQ ID NO: 26741

SEQ ID NO: 26744 - protein, 1033 aa, Rhodobacter capsulatus; identical to SEQ ID NO: 26742

SEQ ID NO: 26745 - protein, 2020 aa, Roseivivax halodurans JCM 10272
MKDQSALPSSGYNAILARVNDRAADAVIGKGRVQSRSLRANLSARLHGQAGGPDAFVADPVFEAARVWERADVCLDDLAGGMLDEDLVAALDRGTLLDGTPNDRRWPRRGDDVAPYLHQLRAWEAAEAGRSFMVTSGTGSGKTECFMIPMLNDLLRSHKPGETGVRGIVLYPLNALIDSQKERLGAWMDPLANRLSYALYNRHMPDTLPGPKRRGAQVMERRAMRQATPSLMVTNVTMLEYMLMRAQDRPILDKSQGTLRWIVLDEAHSYVGAQAAEMALLLRRVRDAFGVAPEDVRLAATSATIGEGDENRETLRQFLADLAGLSPAQVEVIEGQERAPHLPPEGPDETLEPDTMPSAPDVLWRKLAPNPRLRKVRTAMRDRGIGLRAAAALMGRESDTEGALRLLEAAAQAIDPDTGVALAPWRLHVFHRAQGGLWACVDPECSKRDEALLQEDRDWPFGRIHFAERDRCDCGAPVLEIAACDECGTPWLRAEVVNEGPHRILRPAHGAGIDDDYILDVEPEDDDDGEPAASLLSENVIVGPGNGTEGEFLRFSDAHLFEHPKEGDRVLSLTILAEQDRRCCERAGHKGVTVRPQRFGAPFLMGNAMPLLIEAAKPSSHDHPVPFGGRRLLSFTDSRQGTARFSAKLQQDAERTLTRAIMYHSVQNREGDPEKAAQIRATIEALRPAAASNPLLAASLAEQEAALHAAEGAPRPVPWSDMVQRVAQNEEFRNFARPVWHNRPEKGDDALGTHPTALAELFLYRELFRRPRLQNNVETMGLARLLFPELVAQARLSVPDPLREAGQNQTVWADLLHAAVDLVFRTNLAIRLPEDPADVRHWISPHSALSAVVEPGLSKDDVPGVGNPRFFPTAQSDRSNLVRLVYRLIGGSMDSATDVERAAATLAAIWDRLRKAGVIVNAASGVWRVEFKRAAIAPVETAFECSVTRRLLPFAPGGLSLNAIAASEVTRAVAMPTLPLAVPVGTSAAQRDTLRAWLAHDPIVAGLRLEGHWTDLHDRTAEFTPFLRAQEHSAQIDRQSLKTYEDAFREGRINVLNCSTTMEMGVDIPDVGLVVNTNVPPSPANYRQRIGRAGRRGEPWAMAFTFCKDLPLDNMIFREPERLLGAQVAAPQVRLDSAILVQRHVNAALLGLFLREGGGMSIRTNMASFMGATEAMDAPFLPDSVADDFLFALKGDWGAQDGVSQALARLVRGTCLAGHTGLVSRAEGDFGAMRNRWRDEYEQLVEAQSVYADTDPAHWLYRKRAKRLREEFMMTELARRGFTPSYGFPVDVVSFDHAGKGRGEPGPSRPLDMAIREYSPGCEVVIDGLVHRSDGVLPTWGNRNDPGSVEDLRTLFTCRSCNLFGTTRHEAADCPRCGKPLVRTEILRPAGFLGTRRPHSAYEKLAYVPPDPPRVSAEPENWVSLPDPEVGRQRTAREGRVLVTASGDHGDGYAVCIACGRAEAEIGEHDSPLPAGMVRHRPLQKLRDNPRHDGLCPANDDASRKIRRHVKLGTEMVTDVFELQLDSLPSTEAGKGKASAIGAALREALGARLGVDAETMGLAVAPSLRPDEARRSAVFLYDKASGGSGFASAADRDLPSLLREAASRLSCPANCATGCPECVLRRDLQFGTAMDRPGALEMLKKEILPRLELPEALQLFGPSTQAVTRPLADWIGRQLAHGAIERLALFLTDPPSGWDVAEWPGTRIAEDAGRTGVPVTIVMRSSDVHRLEMSQKLDLVRLVTRARATLHLADDLPAAGDAPILAETRLDGQEIAIAAPDQDAGHVNRHWGDVSRTLAVRGPRVPLAVSAALSLDKVTAYGEGNSAQKDVTTELDGPVGQFGQRFWGIAKGLRPQVFTGSARLVQVTYNDRYLRSPFTARLLFEAWRTLPLKNADTRLDIVTEALGSPERPGFLLWHNWETDMLRGEVLSALLPGASVILGTKSDCAHARFFRFRFEDGSETSLFLDQGFGAWREASRRTSRFAHDVTPDAQARALRDLRFDVALQDGGRFPSPVWLRW

SEQ ID NO: 26746 - protein, 1055 aa, Roseivivax halodurans JCM 10272
MYAYCVGEKLYHELRDTVGHNLKLGRFKTAAAPFVLWAAERYRKEYDGGGLSWEFLTEPLGIALTQQQLREITGVGMARMGRSVRRLDSGVQYLRAIAAEGGIPVRLLSDQRGGYRAALVGLVADLSRIGLGCPRDVALTFAAQRTRRLPVGYRTGEYHALFVDFAFEVLELRELAPEGMSAQEVEPFLDRGKPGWRDALSLRLDGDAARSLLSDAVLVSARHGLVTDPMTRVLRRCEDGNWSAWIEVEEAAEIAPQLVQGVEPDRRRLRLAPVGALASAVPDLLFALDRETPDRPWDSRRISGRRTARFHFPLNTGAELMAMADGAFLGRVRLAGGEAIEIDAGPTFWRLAEMGEAGAEALSYAGNGALRTHDPHVWMLAEGGKVPDCTGSLVAEPDGSVPGGTIWRLSGNGRVLVAGGNAQIETGAEEDTREEIHASGPLEYRLLDTRGTPVHRGVPAILHRHPGRGFRQLLGAELRHQIAGSTIWHGGSPSDTMMGRVSFAVREGAGVGARVTVNLVPPKFSAGEVTYGDDPCRRIRFDGVPQGWLLRVASGKPQQPDADGVVEVRLDAPIGSQARLPLTLAGPNGAPPMSWVLNLPRPRGEFQTVAGETLASNQDISMQTLKDWRIVPAEDRRTELRIRLHSASAGGAPIVGRRVTVEQPLSAFRSLLEEMLVTGGADAELRLRVITGADQSPRLIVRHALGETRLLGEDVLVLNDQTPVHEPALAITAVDLNDPARVVETGARGLSHLGRGRWFLLPRRGSAPMRPPRPYVRPEPAGTTGQDAPRRADRIAHYARRFSETNIENDLARLAALSEMLLANGVSPSALDEVHALAKVPSAAVRLLFRVAPSDLEDALSLDLHGGPGWSFIGPVDWAKGFADEAAAVHATLAALPALADRADEHARDAVTARAADILRLRPALEGHVALALQQLDPMAIAALAQRLGGLSRGLQNPEGTLLETARAIISRQAENPHSLHTLAARRRPSGFDVFHPDLRGLIEAPLVVAEIAFGLRPPPTTRERVELLLAVQADQAAYETAQPAAIAWLAQQRT

SEQ ID NO: 26747 - protein, 1995 aa, Roseovarius sp. BRH_c41
MTDSHSNLLPAIDHLAQRSARGIVARSRLASTGLNSLLLRVLSAPSGFPAALVADPVIEAAKSWLLARETMGDLSGRLLSEDLITALDQAEGKAMARESHPRQHQLEAWRASLEGNNSVLVTAGTGAGKTECFLIPILQDILANPRSGGGVRAILLYPLNALIESQRERLAAWAAGLGGKVRFALLNGDTPETERDAVIKSDKVELRSRAKIRECPPEILVTNITMLEYLLLRTKDKPLIEMSQGALRWIVLDEAHSYIGSQAAEMALLLRRVRAGFGVLSDDVRLMATSATIGGDKDAPNKLRAFAAALAGQDGGRVVVVEGKEDAPVLPAPGPDVALDAVALADMTSEEAGAVLAPHPRIQLLWNEMSQQGLTLSRVAEVLADDPTQRAEAARLLDLLGRSTRQGRPLLPWRGHLFHRSQGGIWACPDANCMCRQPDLISDEANWPFGAVWFSARARCECGAPVYEVVSCSDCGQVFLQGLFHGGAEPRLEPPESGEADDYALDAEPDEGEGGEADRGFAWLLCGEGIWLADDTRIYDNTVPEGVRARRMQLLHVPADRTCCDSAGSARLMGLHFGPAFLMGNALGGLMEDIVPPDETPGLPAGGRRALTFTDSRQGVARLAAKMQQDAERSLTRAFLWHSVQEGGAADPVCVAKLQSDAAKLRAVGLDEMAADKERELAKVTGASAEPVKWPDLVRRFGGHVDLAEFAGDIWRNRRIGREMADDPLKLAEAFLFRELFRRPRVQNNPETMGLVRLVFPALAERARLSGPPAPLAETGIDAEGWVSLAHLAVDMVFRQALAVEIPLDMVPLVAPRFGRLNTIHAADTPPDRMAERSRRWPGSRAERHKLVQLVYALTGGNPDSAIDQERADEVLTALWSIICSTAARDMGQGAWRLNFSRAGVERLERAWLCPITRRPYGWSAGGRSPNDPSQFMAEITMPRLPAANAGGLTTEQRREVAHWTEKDTTVAFLRGRGLWTDLHDRLAAFPPYIRAQEHSAQIPRATLQRYEEKFRDGRINLLNCSTTMEMGVDIADVRLVVNSNVPPALSNYRQRAGRAGRRGEPWAFTMTFCRDLPLDRRVFDSPTDFLCRPIVAPKVWFDSPSLVQRHVNAALLAAWLSENGGQDVRGSIGAFLGAGQRVDEAVLPGAMADAFLIALDSEWGASQVKRIAPLVAGTCLEVRALHALVLHCHEAFERLVLRWRTEHRILLEGAETMPDKDAGKALELRARRLAGEFLLGELARRGFTPAYGFPTDVVTFANLSQSPADADGGTSHLRRGTASRPLDQAIREYAPGAELVIDGLVHQSEGILPAWEAGTDASGLEDLRTLWTCDACHSFALEAGEPIACPQCGHTGLSYRKVLRPAGFLGAKPAHVGYENLAHVETDPLRLSAHGGDWIALGEGVGRMRADPAGLVAPSVAGPLGGGFAICLDCGRAEAEPRTQPGIPTVTSKTMRHHRPLMLGRRLKLTHDGYCPSANAPGRIQHNVHLAQVARTDVWEWQLPVGVAAGTALTLAAALREALAEGLGVEPDEIGPATDRSTGPAQDACQSLFLHDRAAGGAGLVARMAEPAMLETCLDRALVLLDCADGCRKGCPSCILRPDLNRRDINLDRPGARDLAQALRMRLALDPGEQVFGPQTRLAGRNATDFVAERLQSGRLRSLDVWLHGDPAVWDFGEWRMRRLLERVSQAGVRPRIHLPTAALTAAGFDLSCKLAIFAFSSVADLHRIDQPPMAGAAPIILRFDCGAGVDALAVLDPMEARPGAEWGAGAMALVVAGPAPEVDIGAKLSAQRLIELGLGNAHLLNVGTEMDGPASGFGRRFWSWLSGKAPLDIAAMQSVGVSSLAYSDRYLLSPYTLRLLAEVIKSAPGAKDAHKVINMAFSDRSRDATRYLHDTFPSDTTRREVIRQMVPGVEVTLLAKSHMAHGRSLAITLKDGRQLTIHLDQGFGGWRVDGMHRHDFAVPDAAQAKGIAAAVFSIIGDGMVGAPLAISRM

SEQ ID NO: 26748 - protein, 1042 aa, Roseovarius sp. BRH_c41
MKIVQLILERNGLKRPDGRPLYSYGVTDSEREDLGSFLRMRIGVGGLTPSTAQGFVIWAAEHIRTGFSGGQLTWDFVFDGIALDYDRPAAIDLTSRGLDAWGRKLRRSDQGHREFLYSLLAEGGLPDLALANAPRYRGALLGLVSAIEGEGVLGASIAHAAALRLVEDLPQVLRSGEQARLMAELAQAIIAARSLLPGDLAVEAAENWLDTHNPDWRQELPLRLSHAAFEALVLPVLLSERRRATPVSVLARRQLRKHVSGSWIGVAEISEGALLPHANLAGVDRSLRLRLTTDAGAGFLGVPVEDGWELTRSAGRGALMMPVAPSEPVFLNAHADGRFLTQVLVDAGQVSPDDAPSLWRALDPDVAMPEVLVPLSGRGQTKADRVFVLAPDRAIPESAHDMRFSKDAIGPGGAVWSVSGCGVARFGAHELVIATGANEDAPATRLAVLGRPIQGFMIDGGIAAFLGAPILLGFEGDAPMRPIGKDVRTRSVPGLLGGHVAEWCDGGVVLARCRYVVLSETMKMDLREIVDGQAMLKASGLPQGIHLHLGVGKERHATVISDEGCATLVFQVAGQPATFDIRLSSPANGESLSMTGVWPSRVARVLDGRGALVSSNRPLSRQGLVGWRGVLPEAGGAVQLRMARGGAPVAFAAAGVVPLVQFGNVIDLALSLQGADGRVNLRLVGGGQETPRLEIGRYDWNAEPKGPFWHLDPGVTHLTAVSLDDPARTVSVDVESCTDPVVWLGEEEGLWFVQGWSETQGVMRPVVWSARPMGWSSRDQRLQSYTVEWQRLLSDRDDLAWDRIWSLILAVREAGDASALDQVQALARVPGAAVALLLRVGRVDRAAALAIETESPLWWPLVPCSAWTEGLVAVRDGLRGRLRSASIDEAEIGKLVEERLARAAGEIIALRPELAVHIGQAFARAGETPLALTSGGIPFPLALPNARAKFVAAAQEALRRFSKLPDGVSGLLAEKLQDPLPVSDDFRPLLHAPFVAAEVASGLRPALSAQEHLQLIALRAADPVWFDTALPAALTLALDLSR

SEQ ID NO: 26749 - protein, 1417 aa, Rubellimicrobium thermophilum DSM 16684
MPPASNLTAALDRLTRASAMGMVARTRMASPGLNLWLARELAKDPGTAGALIADPVIEIARAWKPADRPLSALAPDLLSPDLVAALDGTQVARLPAERPPYAHQLAAWQATLGERRSAIVTAGTGAGKTECFLIPVLQDALAHPRPDGGVRAILLYPLNALIESQRDRLRAWAERLRGRVRFALLNGDTPETERQAKEQSDDIELRSRQAIRKRPPEVLVTNITMLEYLLLRSADRPILAASQGALRWIVLDEAHTYAGSQAAEMALLLRRVRAAFGVTPGDVRLIATSATIGGEDRTAEKLAAFAGALAGQEPERVAVIEGQERTPDLPPAGPDGPLAPDLPAEALAGHPRVQALRRALSESGRPLGEVARILTGDATRRDEAVRLLDALAAADWQGHRLLPWRAHLFHRAQGGLWACPDPACPHRAPELTGAGAGWPFGAVWLTPRAACACGAPVYEVVACNDCGTAHLQGLAQPGAQLRLLAPEAGEGDDFALDQDPGEEDAPAAPAGSAWLAAEGQGGGMAGWLGADGLWFDNTPPHGTRAIRARWIATPADRACCARAGQAGLTGFRFGPAFLMGNGVGGVLEDLAPPGGRPGLPAGGRRAISFSDSRQGVARLAAKLQQGAERDLTRAFLWHAVQEAPAGADPAEIAALREKIAKMEAAGLGDYADADRRRLGELTGAAAAPIPWGSLVQGLAAHADLREFAGDIWRGRALGAGLADDPAKLAEMFLYRELFRRPRVQNNPETLGLLRLTFPAMEERARLSGPPRLLAEAGMDAEGWAALAQVAVDLVFRQSLAVDMPPAFVPLVAPRHGVLNAVVPADTRAEDMPANSRRWPGPQAVNGRLTRLAELVYAPTGGSPDSRTDQDRAGEVLDALWQLIAGTAARDTGAGAWRLDFARAAVLRLDRAFLCPVTRRPYAYSLSGRSPNDPARTMQPFEMPRLPMANRGGLTRDQAAEIAEWCQTDPTVAALRAGGLWTNLHDRLAAFPPYIRAQEHSAQIPRPTLQRYEQAFAEGRINLLNCSTTMEMGVDLADVRLVVNANVPPSLANYRQRAGRPAAGEPFAFTLTFCRDLPLDRRAFDNPAAWLTRPIVAPRVWFDSPALVRRHVNAAILTAWLAARGGTDVTGSIGAFLGAGSSANRPVEDGAAADAFLADLDAGWAGGLDGPLRDLLAGTVLTGQGVEALAAHTRAAFEALVAGWRREHLALLQAAAAAPDREARQALELRARRLAGEFLLGELARRGFTPAYGFPTDVVTFQNLCHRSPDADTGQSRFLRGTAARSLDQALREYAPGAELVIDGLVHRASGILPAWEAGADASGLEDLRSLWSCPACRAFDWAPTAPESCPRCGYKPLKIRRALRPAGFLGDEPAHVGYENLSHIAADPRGFPPMAATGWRWPKAPGGCAPIPKAALR

SEQ ID NO: 26750 - protein, 547 aa, Rubellimicrobium thermophilum DSM 16684
MEWLEDGAVLARLRLVVLPTGLRLTLRETGSEALRLEAEGLPPGWHLALRAGEGAAQGIADARGHALLSLTAAQPPGLVALRLSDPGRGAALDLIGLWPARTPRLIDPEGQVLREEQRLSLRRLAGWRGHLPRGQGAVLIRLGGQGAQVGFPVAGEVRPAAVAGVLGQALALLGADGQVNLRLALVQETPRLSIARYDWQSEEAGPFRHLGGGRTRLRAVLLEDPARTAETEAESRIDLGGWLGEDEGLWFVQGENATRGVMRPFVWAARPQPRSTRDERLARYAAEWQEILEAPRDPRWDRIAALIAAVRAAGDCGALDQVQALARVPAAAVALLWMARREGRAAALALESEAPIWWPLIPVQAWALGARAAYARLVAQLRAAGIDDAEAVAAGTMARAAGEILALRPELAAHLGRALQASGLRPQSCDVQGNASPLLPPGPAARALLDGAAQEAARRFTGLPQGVDGLRARRLAPPRIGDGGMDALLHAPFAAAEIAAGLRPAPEPPEVLRLLALRAADPAWFEAALPCALTLALTEAPCPPPRT

SEQ ID NO: 26751 - protein, 2106 aa, Salmonella enterica
MTTRYFSSLIEQSLSRSTEATLSIMGVTNPQLREHLAQQMGADCGESGSFLAAPVFQQMFGWKESNNTMRSLTEGKALLSKAVVDSLDDQNNGRYRFGADWKPFTHQLASWKALLEEKHSVVVTSGTGSGKTECFMVPVLEDLYRELHENGNNPLVGVRALFLYPLNALINSQRERLDAWTRGFGTGIRYCLYNGNTENLHAAVKSEQIKRPNEVLSREKMREEPAPILVTNGTMLEYMMVRQIDAPIIQQSKAQKSLRWIVLDEAHTYVGSQAAELALQLRRVMTAFGVTPDDVRFVATSATIAGGDAEKQLKKFLSELSGIPQERIDVLDGTRVIPKLEPCKHVYIPLEEIEQIPDTDMMGVSPERFEALTHSPEAHYLREMLVTQPDPMKLDTMTQRLNTLTRQHYSQQDVLRWIDVCSGTQPNTKDPAFLKVRAHIFQRNTQGVWACVDKECRKKHGTPLEKGWSFGYVYVNQRQNCDCGSPVYELAFCNECNEPHLLARDKKGKLVQWENKGGDEFSLQDDMHVEYDGVEDKVEKESTFQPPLIIAAEKTNEMGYTIQRLDRQTRRIGVGSNDSIPLVINDIEQVCSASGCGYRGTSGKQPFRRALLGGPFYVTNIVPTVLEYCQDFISEEGKEGVGPDSLPGRGRRLITFTDSRQGTARMAVRMQQEAERSRLRGSVVEILSWHQRTQTTVTPNASADLEKLSARAKQARNEAEEYRSWGMPEQAKLAEAQAEQLEQAIQVATGGKAATVLLSRTWTEMVNELKEKADIRGPILQYNHYLKPEIFNENGGPLKLSEMLLFREFMRRPKRTNSLETQGLVQVGYQGLEKIIKLPVHWHEKGLTQGDWQDFLKVTLDLYVRESNFTQLDDELKNWIGSRFSSKFVRNPETKDPEDNQNKRWPQIRNGNLSHRLVKLLMLGAGFKTANTATIDIINAWLKEAWNQLTGPLAVLKPDGNRFYLPKEHLTFSLITDGWICPVTNKILDTTFKGLTPYLPTHISFEHLSQVQFDTFIAQKVTMPEIWKLDRSQEDYAAGLAKVRDWVSKEPLIAQLRSENVWTDINDRVVEGGFYYRTAEHSAQQSSERLQSYEKMFKNGQLNVLNCSTTMEMGVDIGGITAVVMNNVPPHPANYLQRAGRAGRSKESRAISYTLCKGNPHDQQVFANPLWPFETMIPAPMVAMNSARLVQRHVNALLLSDFLCNVIGETEKEKTSLDSLWFFGEEDGQSKCERFKVWLERPVLDIDAALERLVKGTALHGARPDLLRDKTINAITFLQQRWLSVYRDLVAQERESQPQTPYRKRIELEKKRHCGEYLLRDLAARTFLPGYGFPTDVVTFDNFTMEDYIREKSRKSRDKKDREDNVSRYKGLPSRNLGVAIREYAPGAEIILDGRVFRSAGVSLHWHNINADTNEAQRLDCAWRCHKCGTIGYKEGMSNSGTLYCTNSACGEKIITENRRQVLQPAGFVTDAHAPVTNNIETMKFIPVVPAWVFVKAEPMPLPNPIMGYMTSGADGHVFQQSLGEGGHGYALCLSCGRAESMLNANDAPKSMEAHYPPRPGKSDRDSQNQRLICPGSTALMKNVTLGALARTDVFEMVLRKPQNGEYLPDNTEEGRVVAMTLAVALRQALAGVLGISAAELGYAVRPVRLEDGQSVLAVQLYDVISGGAGFASSAPLHIESILQGMVKQLGCHHCDTSCSECLLDSQTRHDHDLLDRKAALAWLGDDFVYYVGLPDTETFSLPDARYCPGAISDTLRRAINEGAEKLTLWMNGPLNEWDLYARQFRAAIQNYRVKDNVAVDLVIPAGVDDPELMHELSQFTALGVRLCHSEQAPELPIVAQIAFADRVMTLASRSQQATIPGPGWHLNDELVVRSLGYKTVKLNEFVLPGKATSAVERVKDIAIHKELNGPLSLFGQRFWDVLFNDHEEAQSLMKNQRIIGVHYTDRYLQNPVALVLLAALLKPLKPLLTEEAKVAIDTLFKPKDRAGNRPFHDWMSDADFQDFADQWFAAAMGRAVALRVFDSLRDIPHHRKLTVTFENGQVLKIRFDQGMGYWRINFASKWYYFDFSDDVSFQLGNMALACQDGKVLNSEESWATDVLVEVMAA

SEQ ID NO: 26752 - protein, 1099 aa, Salmonella enterica
MSQSEYTSILKCTPWLDKFLARRGLKQPDHRPLYEYHATCDEYDELKRLLRAIGLPDGYKSDKGYAACFTLFCSEWYRRDYERDCGWTWEPIYKTLGILLPSSEMGNIIPKGLDGYWGRPVRFYDTERRNFLGSLFSEGGLPFRLLKESDSRFQSMFSLILNQYDQAKSSNISTYALVHAAVEKSSLPVVFKEDTSVELISRMAEQLVSLVQIYDLSNHTEPVKELERVHPKWRDSFPVPLEDDTGTSFLNGLLRTASTESKPRLQKNKTTLCQFLWSENNPEAVQALISLPEELSFSIDSEPSTTRFELAIYEDGNEIASLGPAYATLSKSQAKIRVRKREIKFCRRNPAVSLFIVARAGGMFVGSNLLEGSEVAVGDVPLVFVSDKSEWLLQGQASCSVRGSHVLIVLPKDGCLASEHEDCDSSFSALGCRTLTIKGRQDIIIEGDETYRIKTGREQIIQTGFSFQGKRLNWTSYPDEVFLGIPGITKNPENLSKYHYKRFFNGTFIDDCDVQERMGAQFISVRNESNETLLRKKIGILPNDFSLEIKNGEQANEGSVIITTQHPCLYRLKEKTLEVGRERLPGSTEIMMKAEGIPPASISLQITPNLTADPIVIWLPFPARGCLAFDKDEKPLPKNLTINDLLGARAYLFGKNGEPTRYQLELRLHSRSGMQAWYEWHYSAGESPVELTLYSLREHIDNLLSLEEGIDQIVDMRIEGGGSSFTWQIRRYKYSLDYDRERQILFANSISNRTGQIPSPVIMLLSEPERKPIPLMSRMSEGVPVGEFELSSTIQNNGPWLVLPKQGEEASFRPCYIAGESVIQSDTTTIQSLQKATQLFNPRSDVNTITLVLEQMANDPAHSGWQFLRNLYDQFGYLPLATFEVWRALVQHPQALAMSLFKFEMSIDYLSRIESEFPVFWEFLPIKEVKRAATRFRTFLTHKGAPEEMQIRLLDRMYQQLGTVFPTYASEVKLWLSRGKLPPVFSELVMKGIIQGWYQELLREHGESRWPEFGGPSLFRWYMSQQNPVIGISPDSSYRYSVTLLPVFAAAVASGKTTFGSVFENKPGAVFFLRQVRDFDSRWFNAIFQYCLLCNVTEK

SEQ ID NO: 26753 - protein, 2106 aa, Salmonella enterica; identical to SEQ ID NO: 26751

SEQ ID NO: 26754 - protein, 1099 aa, Salmonella enterica; identical to SEQ ID NO: 26752

SEQ ID NO: 26755 - protein, 2106 aa, Salmonella enterica subsp. enterica
MTTRYFSSLIEQSLSRSTEATLSIMGVTNPNLREHLTQQMAADCGKEGSFLASPVFEQTFGWKESNSTMKDLATKQTLLSKEVVDSLDSEENGRYRFGSDWKPFTHQLASWQSLLEKKHSVVVTSGTGSGKTECFMVPVLEDLYRELQVKNKKPLIGVRALFLYPLNALINSQRERLDAWTRSFGSGIRYCLYNGNTEELHALVKSEQANRPNEVLSREKMREEPAPILVTNGTMLEYMMVRQVDAPIIQKSKAEKSLRWIVLDEAHTYVGSQAAELALQLRRVMTAFGVTPDDVRFVATSATMAGSDAEKQLKKFLSELSGVPQERIDVLGGSRVIPELEPCKQYSLSLDEIEHIPDSESEGISPERYSALTHSPEARCLREMLVSQPRPMKLDTLTQRLNELTKHQYTQQDVLRWIDLCSGTLPNAKDPAFLKVRAHIFQRNTQGIWACVDKNCAAKKNTALEKNWSFGNVYVNQRQNCECGSPVFELAFCNECNEPHLLARDKKGKLVQWDNKGGDEFSLQDEISDDFETSGEKVQKDFVFQSPQIIAAECNTEAGYIMQRLDRQTRSIGVVNPDSIPLAINDIEQICSASNCGYKGGKGKQPFRRALLGGPFYVTNIVPTVLEYCQDFTSDEGKDGVGPLSLPGRGRRLITFTDSRQGTARMAVRMQQEAERSRLRGSVVEILGWHQRKQPTSAPNDQADVMKLVARVTQYREEAREYREWGMPEEAKLSEAQAERLEQAIQTATGGKAATILVCRTWTEMVNELKEKADIQGPILQYNHYLKPEIFTENGGPLKLAEMLLFREFMRRPKRTNSLETQGLVQVGYQGLEKAHSVPAHWQAKGLTLDDWRDFLKVTLDFYVRESNYIQLDDDLRNWIGSRFSSKFVRNPDSKEPDDNQVKRWPQIRHGNVTQRLVKLLILGAKFNTVNTVTIDIVNAWLKEAWLQLTGSLAVLKPDGNRFYLPKEHLTFSLVQKARICPVTNKLLATTFKGLTPYLPMHIQFERLTSAQYDAFLAQEVTLPAIWEHDRSQDDYVDGLTKVRDWVSLDPQVLSLRSQNLWTDINDRVVEGGFYYRTAEHSAQQSSERLQSYERMFKNGQLNVLNCSTTMEMGVDIGGISAVVMNNVPPHPANYLQRAGRAGRSKESRAISYTLCKGNPHDQQVFANPLWPFETVIPAPMVAMNSERLVQRHVNSLLLSEYLCHVVGETEKERTSLNSQWFFGEELDQSVCNRFKAWLERPTLSIDNALERLVKGTALHGVTAEKLRDKTQEAIAVLQTRWLGIFRDLVKQESESQPNTPYRRRLELEKKRHCGEYLLRDLAARTFLPGYGFPTDVVTFDNFTMEDYIREKTHKGRDKNDREDNVSRYKGLPSRNLSVAIREYAPGAEIILDGRVFRSAGVSLHWHNLNADTNEAQRLDSAWRCHKCGTLGYEEGIGGPGDLFCTNSACGERITLDNRRQVLQPAGFVTDAHTPVTNNIETMKFIPVVPAWVFVKAERVPLPNPLMGFMASGADGHVFQQSMGEGGHGYALCLSCGRAESMLSATDAPKSMEAHYPPRPGKSDRDSQNQRIICPGSTALNKNVTLGALARTDVFELILRRPQNGEYIPDNSDEGRIVAMTLVVALRRALASVLGVSAAELGYAVRPVRLENEQSVLAVQLYDIISGGAGFASSAPLHIEAVLKGMVKQLGCRHCDTACSECLLDSQTRHDHDQLDRKAAQAWLGEDFSHYIGLPEAEKFSLADAQYCPGSIEDAIRRAINDGARKLTLWMNGPLNEWDLYARQFRAAIQNYRLKDEVEVTLVVPGHIEDPELLQEIAQFAAIGVQLCQSELNTDTPVVAQVAFNDRLMTLISRSPEATIPGPNWHLNSQMVIRSHAFEPITLSKAELLSDAAGNRGLVNDIEIHKQLNGPVSQFGQRFWGVLTGAQEDIQTLLKENQVTRIHYSDRYLQNPVALALLGGLLKPLKSILAQDAQVTIDTLFKSKERPGNKPFHDWMSEADFQDFADQWFAASMGRAVVVNTFGSPRDIPHHRKLMVTFSNGQALKIRFDQGMGYWRIVFARAYRDFDFNDDVAFQLGNMAKACVEGQVVNSEESWATDVLVQVIVP

SEQ ID NO: 26756 - protein, 1099 aa, Salmonella enterica subsp. enterica
MSQSEYTSILKCTPWLAKFLTRRGLKQPDHRPLYEYHATSEEYDELKWLLRSIGVPDGYKSDKGYAACFTLFCSEWYRRDYEREYGWAWEPIYKTIGISASSSEMGKIIPKGLDGYWGRPVRFYDTERRNFLGSLFSEGGLPFRLLKESNSRFQSMFSLILNQYDQAKYSNISTFALVHAAVEKSSLPVVFKEDTSVELISRMAEQLVSLVQIYDLSNHTEPVKELERVHPKWRDSFPVPLDDDTGTSFLNGLLRTASTESKPRLQKNKTTLCQFLWSENHPEAVQALISLPEELSFSIDIEPSTTRFELAIYEDGNEIASLGPAYATLSNSQAKIKVRKREIKFYRRNPTVSLFIVARAGGMFVGSNLLEGSEVAVGDVPLVFVSDKNEWLLQGQASCSVRGSHVLIVLPKDGCLASEHEDCDSGFSALGCRALTIKGRQDIIIEGDETYRIKTGRDQIIHAGFSFQGKRLNWTSYPDELFLGVPGITQHSENLSTHHYKRFFNGTFIDNCDVQEKMGAQFISVRNENNETLLRKKIGILPNDFSLEIKNGQQANEGSVIITTQHPCLYSLKEKTLEVGRKRLPGSTEIMMKAEGIPPASISLQITPNLTANPIVIWLPFPARGCLAFDKDEKPLPKNLTINDLLGARAYLFGKNGEPTRYQLELRLRSRSGMQAWYEWHYSAGECPVELTLYSLREHIDNLLSLEEGIDQTVDMRIKGGGSSFTWQIRRYKYSLDYDRGRQILLANSISNRTGQIPSPVIMLLSEPERKVVPLTSRMSEGVPVGEFELSSIIQKNGPWLVLPKPGEEASFRPCFIAGEPVIQNNATAIQSLQKATQLFNPRSDVNTIMLVLEQMASDPAHSGWQFLRNLYDQFGYLPLATFEVWRALVQHPQALAMSLFKFEMSIDYLSRIESEFPVFWEFLPITEVKRSATRFRAFLAHKGAPEEMQIRLLDRMYQQLGTTFPTYASEVQLWLSQGKLPPVFPELTMKGIILEWYQELLREHGESRWPEFGGPGLLRWYMSQQNPVIDISPDASYRYSVTLLPVFAAAVASGKTTFDSVFENKPGAVFFLRQVRDFDSRWFNAIFQYCLLRNVTEK

SEQ ID NO: 26757 - protein, 2106 aa, Salmonella enterica subsp. enterica
MTTRYFSSLIEQSLSRSTEATLSIMGVTNPNLREHLTQQMAADCGKEGSFLASPVFEQTFGWKESNSTMKDLATKQTLLSKEVVDSLDSEENGRYRFGSDWKPFTHQLASWQSLLEKKHSVVVTSGTGSGKTECFMVPVLEDLYRELQVKNKKPLIGVRALFLYPLNALINSQRERLDAWTRSFGSGIRYCLYNGNTEELHALVKSEQANRPNEVLSREKMREEPAPILVTNGTMLEYMMVRQVDAPIIQKSKAEKSLRWIVLDEAHTYVGSQAAELALQLRRVMTAFGVTPDDVRFVATSATMAGSDAEKQLKKFLSELSGVPQERIDVLGGSRVIPELEPCKQYSLSLDEIEHIPDSESEGISPERYSALTHSPEARCLREMLVSQPRPMKLDTLTQRLNELTKHQYTQQDVLRWIDLCSGTLPNAKDPAFLKVRAHIFQRNTQGIWACVDKNCAAKKNTALEKNWSFGNVYVNQRQNCECGSPVFELAFCNECNEPHLLARDKKGKLVQWDNKGGDEFSLQDEISDDFETSGEKVQKDFVFQSPQIIAAECNTEAGYIMQRLDRQTRSIGVVNPDSIPLAINDIEQICSASNCGYKGGKGKQPFRRALLGGPFYVTNIVPTVLEYCQDFTSDEGKDGVGPLSLPGRGRRLITFTDSRQGTARMAVRMQQEAERSRLRGSVVEILGWHQRKQPTSAPNDQADVMKLVARVTQYREEAREYREWGMPEEAKLSEAQAERLEQAIQTATGGKAATILVCRTWTEMVNELKEKADIQGPILQYNHYLKPEIFTENGGPLKLAEMLLFREFMRRPKRTNSLETQGLVQVGYQGLEKAHSVPAHWQAKGLTLDDWRDFLKVTLDFYVRESNYIQLDDDLRNWIGSRFSSKFVRNPDSKEPDDNQVKRWPQIRHGNVTQRLVKLLILGAKFNTVNTVTIDIVNAWLKEAWLQLTGSLAVLKPDGNRFYLPKEHLTFSLVQKARICPVTNKLLATTFKGLTPYLPMHIQFERLTSAQYDAFLAQEVTLPAIWEHDRSQDDYVDGLTKVRDWVSLDPQVLSLRSQNLWTDINDRVVEGGFYYRTAEHSAQQSSERLQSYERMFKNGQLNVLNCSTTMEMGVDIGGISAVVMNNVPPHPANYLQRAGRAGRSKESRAISYTLCKGNPHDQQVFANPLWPFETVIPAPMVAMNSERLVQRHVNSLLLSEYLCHVVGETEKERTSLNSQWFFGEELDQSVCNRFKAWLERPTLSIDNALERLVKGTALHGVTAEKLRDKTQEAIAVLQTRWLGIFRDLVKQESESQPNTPYRRRLELEKKRHCGEYLLRDLAARTFLPGYGFPTDVVTFDNFTMEDYIREKTHKGRDKNDREDNVSRYKGLPSRNLSVAIREYAPGAEIILDGRVFRSAGVSLHWHNLNADTNEAQRLDSAWRCHKCGTLGYEEGIGGPGDLFCTNSACGERITLDNRRQVLQPAGFVTDAHTPVTNNIETMKFIPVVPAWVFVKAERVPLPNPLMGFMASGADGHVFQQSMGEGGHGYALCLSCGRAESMLSATDAPKSMEAHYPPRPGKSDRDSQNQRIICPGSTALNKNVTLGALARTDVFELILRRPQNGEYIPDNSDEGRIVAMTLVVALRRALASVLGVSAAELGYAVRPVRLENEQSVLAVQLYDIISGGAGFASSAPLHIEAVLKGMVKQLGCRHCDTACSECLLDSQTRHDHDQLDRKAAQAWLGEDFSHYIGLPEAEKFSLADAQYCPGSIEDAIRRAINDGARKLTLWMNGPLNEWDLYARQFRTAIQNYRLKDEVEVTLVVPGHIEDPELLQEIAQFAAIGVQLCQSELNTDTPVVAQVAFNDRLMTLISRSPEATIPGPNWHLNSQMVIRSHAFEPITLSKAELLSDAAGSRGLVNDIEIHKQLNGPVSQFGQRFWGVLTGAQEDIQTLLKENQVTRIHYSDRYLQNPVALALLGGLLKPLKSILAQDAQVTIDTLFKSKERPGNKPFHDWMSEADFQDFADQWFAASMGRAVVVNAFGSPRDIPHHRKLMVTFSNGQALKIRFDQGMGYWRIVFARAYRDFDFNDNVAFQLGNMAKACVEGQVVNSEESWATDVLVQVIVP

SEQ ID NO: 26758 - protein, 1099 aa, Salmonella enterica subsp. enterica
MSQSEYTSILKCTPWLAKFLTRRGLKQPDHRPLYEYHATSEEYDELKWLLRSIGVPDGYKSDKGYAACFTLFCSEWYRRDYEREYGWAWEPIYKTIGISASSSEMGKIIPKGLDGYWGRPVRFYDTERRNFLGSLFSEGGLPFRLLKESNSRFQSMFSLILNQYDQAKYSNISTFALVHAAVEKSSLPVVFKEDTSVELISRMAEQLVSLVQIYDLSNHTEPVKELERVHPKWRDSFPVPLDDDTGTSFLNGLLRTASTESKPRLQKNKTTLCQFLWSENHPEAVQALISLPEELSFSIDIEPSTTRFELAIYEDGNEIASLGPAYATLSNSQAKIKVRKREIKFYRRNPTVSLFIVARAGGMFVGSNLLEGSEVAVGDVPLVFVSDKNEWLLQGQASCSVRGSHVLIVLPKDGCLASEHEDCDSGFSALGCRALTIKGRQDIIIEGDETYRIKTGRDQIIHAGFSFQGKRLNWTSYPDELFLGVPGITQHSENLSTHHYKRFFNGTFIDNCDVQEKMGAQFISVRNENNETLLRKKIGILPNDFSLEIKNGQQANEGSVIITTQHPCLYSLKEKTLEVGRKRLPGSTEIMMKAEGIPPASISLQITPNLTANPIVIWLPFPARGCLAFDKDEKPLPKNLTINDLLGARAYLFGKNGEPTRYQLELRLRSRSGMQAWYEWHYSAGECPVELTLYSLREHIDNLLSLEEGIDQTVDMRIKGGGSSFTWQIRRYKYSLDYDRGRQILLANSISNRTGQIPSPVIMLLSEPERKVVPLTSRMSEGVPVGEFELSSIIQKNGPWLVLPKPGEEASFRPCFIAGEPVIQSNATAIQSLQKATQLFNPRSDVNTIMLVLEQMASDPAHSGWQFLRNLYDQFGYLPLATFEVWRALVQHPQALAMSLFKFEMSIDYLSRIESEFPVFWEFLPITEVKRSATRFRAFLAHKGAPEEMQIRLLDRMYQQLGTTFPTYASEVQLWLSQGKLPPVFPELTMKGIILEWYQELLREHGESRWPEFGGPGLLRWYMSQQNPVIDISPDASYRYSVTLLPVFAAAVASGKTTFDSVFENKPGAVFFLRQVRDFDSRWFNAIFQYCLLRNVTEK

SEQ ID NO: 26759 - protein, 2106 aa, Salmonella enterica; identical to SEQ ID NO: 26755
  subsp. enterica serovar Havana str. CFSAN001082

SEQ ID NO: 26760 - protein, 1099 aa, Salmonella enterica; identical to SEQ ID NO: 26756
  subsp. enterica serovar Havana str. CFSAN001082

SEQ ID NO: 26761 - protein, 2106 aa, Salmonella enterica subsp. enterica serovar Infantis
MTTRYFSSLIEQSLSRSTEATLSIMGVTNPNLREHLTQQMAADCGKEGSFLASPVFEQTFGWKESNSTMKDLATKQTLLSKEVVDSLDSEENGRYRFGSDWKPFTHQLASWQSLLEKKHSVVVTSGTGSGKTECFMVPVLEDLYRELQVKNKKPLIGVRALFLYPLNALINSQRERLDAWTRSFGSGIRYCLYNGNTEELHALVKSEQANRPNEVLSREKMREEPAPILVTNGTMLEYMMVRQVDAPIIQKSKAEKSLRWIVLDEAHTYVGSQAAELALQLRRVMTAFGVTPDDVRFVATSATIAGSDAEKQLKKFLSELSGVPQERIDVLGGSRVIPELEPCKQYSLSLDEIEHIPDSESEGISPERYSALTHSPEARCLREMLVSQPRPMKLDTLTQRLNELTKHQYTQQDVLRWIDLCSGTFPNAKDPAFLKVRAHIFQRNTQGIWACVDKNCSAKKNTALEKNWSFGNVYVNQRQNCECGSPVFELAFCNECNEPHLLARDKKGKLVQWDNKGGDEFSLQDEISDDFETSGEKVQKDFVFQSPQIIAAECNTEAGYIMQRLDRQTRSIGVVNPDSIPLAINDIEQICSASNCGYKGGKGKQPFRRALLGGPFYVTNIVPTVLEYCQDFTSDEGKDGVGPLSLPGRGRRLITFTDSRQGTARMAVRMQQEAERSRLRGSVVEILGWHQRKQPTSAPNDQADVMKLVARVTQYREEAREYREWGMPEEAKLSEAQAERLEQAIQTATGGKAATILVCRTWTEMVNELKEKADIQGPILQYNHYLKPEIFTENGGPLKLAEMLLFREFMRRPKRTNSLETQGLVQVGYLGLEKAHSVPAHWQAKGLTLDDWRDFLKVTLDFYVRESNYIQLDDDLRNWIGSRFSSKFVRNPDSKEPDDNQVKRWPQIRHGNVTQRLVKLLILGAKFNTVNTVTIDIVNAWLKEAWLQLTGVLAVLKPDGNRFYLPKEHLTFSLVQKARICPVTNKLLATTFKGLTPYLPMHIQFERLTSAQYDAFLAQEVTLPAIWEHDRSQDDYVDGLTKVRDWVSQDPQVLPLRSQNLWTDINDRVVEGGFYYRTAEHSAQQSSERLQSYERMFKNGQLNVLNCSTTMEMGVDIGGISAVVMNNVPPHPANYLQRAGRAGRSKESRAISYTLCKGNPHDQQVFANPLWPFETVIPAPMVAMNSERLVQRHVNSLLLSEYLCHVVGETEKERTSLNSQWFFGEELGQSVCNRFKAWLERPTLSIDNALERLVKGTALHGVTAEKLRDKTQEAIAVLQTRWLGIFRDLVKQESESQPNTPYRRRLELEKKRHCGEYLLRDLAARTFLPGYGFPTDVVTFDNFTMEDYIREKTHKGRDKNDREDNVSRYKGLPSRNLSVAIREYAPGAEIILDGRVFRSAGVSLHWHNLNADTNEAQRLDSAWRCHKCGTLGYEEGIGGSGDLFCTNSACGERITLDNRRQVLQPAGFVTDAHTPVTNNIETMKFIPVVPAWVFVKAERVPLPNPLMGFMASGADGHVFQQSMGEGGHGYALCLSCGRAESMLSATDAPKSMEAHYPPRPGKSDRDSQNQRIICPGSTALNKNVTLGALARTDVFELILRRPQNGEYIPDNSDEGRIVAMTLVVALRRALASVLGVSAAELGYAVRPVRLENEQSVLAVQLYDIISGGAGFASSAPLHIEAVLKGMVKQLGCCHCDTACSECLLDSQTRHDHDQLDRKAAQAWLGEDFSHYIGLPEAEKFSLADAQYCPGSIEDAIRRAINDGARKLTLWMNGPLNEWDLYARQFRAAIQNYRLKDEVEVTLVVPGHIEDPELLQEIAQFAAIGVQLCQSELNTDTPVVAQVAFNDRLMTLISRSPEATIPGPNWHLNSQMVIRSHAFEPITLSKAELLSDAAGSRGLVNDIEIHKQLNGPVSQFGQRFWGVLTGAQEDIQTLLKENQVTRIHYSDRYLQNPVALALLGGLLKPLKSILAQDAQVTIDTLFKSKERPGNKPFHDWMSEADFQDFADQWFAASMGRAVVINTFGSPRDIPHHRKLMVTFSNGQALKIRFDQGMGYWRIVFARAYRDFDFNDDVAFQLGNMAKACVEGQVVNSEESWATDVLVQVIVP

SEQ ID NO: 26762 - protein, 1099 aa, Salmonella enterica subsp. enterica serovar Infantis
MSQSEYTSILKCTPWLAKFLTRRGLKQPDHRPLYEYHATSEEYDELKRLLRSIGVPDGYKSDKGYAACFTLFCSEWYRRDYEREYGWAWEPIYKTIGISASSSEMGKIIPKGLDGYWGRPVRFYDTERRNFLGSLFSEGGLPFRLLKESNSRFQSMFSLILNQYDQAKSSNISTFALVHAAVEKSSLPVVFKEDTSVELISRMAEQLVSLVQIYDLSNHTEPVKELERVHPKWRDSFPVPLDDDTGTSFLNGLLRTASTESKPRLQKNKTTLCQFLWSENHPEAVQALISLPEELSFSIDIEPSTTRFELAIYEDGNEIASLGPAYATLGNSQAKIKVRKREIKFYRRNPTVSLFIVARAGGMFVGSNLLEGSEVAVGDVPLVFVSDKNEWLLQGQASCSVRGSHVLIVLPKDGCLASEHEDCDSGFSALGCRALTIKGRQDIIIEGDETYRIKTGRDQIIHAGFSFQGKRLNWTSYPDELFLGVPGITQHSENLSTHHYKRFFNGTFIDNCDVQEKMGAQFISVRNENNETLLRKKIGILPNDFSLEIKNGQQANEGSVIITTQHPCLYSLKEKTLEVGRKRLPGSTEIMMKAEGIPPASVSLQITPNLTANPIVIWLPFPARGCLAFDKDEKPLPKNLTINDLLGARAYLFGKNGEPTRYQLELRLRSRSGMQAWYEWHYSAGECPVELTLYSLREHIDNLLSLEEGIDQTVDMRIKGGGSSFTWQIRRYKYSLDYDRDRQILLANSISNRTGQIPSPVIMLLSEPERKVVPLMSRMSEGVPVGEFELSSIIQNNGPWLVLPKPGEEASFRPCFIAGEPVIQSDATAIQSLQKATQLFNPRSDVNTIMLVLEQMASDPAHSGWQFLRNLYDQFGYLPLATFEVWRALVQHPQALAMSLFKFEMSIDYLSRIESEFPVFWEFLPITEVKRSATRFRAFLTHKGAPEEMQIKLLNRMYQQLGTTFPTYASEVQLWLSQGKLPPVFPELTMKGIILEWYQELLREHGESRWPEFGGPGLLRWYMSQQNPVIDISPDASYRYSVTLLPVFAAAVASGKTTFESVFENKPGAVFFLRQVRDFDSRWFNAIFQYCLLRNVTEK

SEQ ID NO: 26763 - protein, 2106 aa, Salmonella enterica subsp. enterica serovar Paratyphi A
MTTRYFSSLIEQSLSRSTEATLSIMGVTNPNLREHLTQQMAADCGKEGSFLASPVFEQTFGWKESNSTMKDLATKQTLLSKEVVDSLDSEENGRYRFGSDWKPFTHQLASWQSLLEKKHSVVVTSGTGSGKTECFMVPVLEDLYRELQVKNKKPLIGVRALFLYPLNALINSQRERLDAWTRSFGSGIRYCLYNGNTEELHALVKSEQANRPNEVLSREKMREEPAPILVTNGTMLEYMMVRQVDAPIIQKSKAEKSLRWIVLDEAHTYVGSQAAELALQLRRVMTAFGVTPDDVRFVATSATIAGSDAEKQLKKFLSELSGVPQERIDVLGGSRVIPELEPCKQYSLSLDEIEHIPDSESEGISPERYSALTHSPEARCLREMLVSQPRPMKLDTLTQRLNELTKHQYTQQDVLRWIDLCSGTLPNAKDPAFLKVRAHIFQRNTQGIWACVDKNCAAKKNTALEKNWSFGNVYVNQRQNCECGSPVFELAFCNECNEPHLLARDKKGKLVQWDNKGGDEFSLQDEISDDFETSGEKIQKDFVFQSPQIIAAECNTEAGYIMQRLDRQTRSIGVVNPDSIPLAINDIEQICSASNCGYKGGKGKQPFRRALLGGPFYVTNIVPTVLEYCQDFTSDEGKDGVGPLSLPGRGRRLITFTDSRQGTARMAVRMQQEAERSRLRGSVVEILGWHQRKQPTSAPNDQADVMKLVARVTQYREEAREYREWGMPEEAKLSEAQAERLEQAIQTATGGKAATILVCRTWTEMVNDLKEKADIQGPILQYNHYLKPEIFTENGGPLKLAEMLLFREFMRRPKRTNSLETQGLVQVGYQGLEKAHSVPTHWQAKGLTLDDWRDFLKVALDFYVRESNYIQLDDDLRNWIGSRFSSKFVRNPDSKEPDDNQVKRWPQIRHGNVTQRLVKLLILGAKFNTVNTVTIDIVNAWLKEAWLQLTGSLAVLKPDGNRFYLPKEHLTFSLVQKARICPVTNKLLATTFKGLTPYLPMHIQFERLTSAQYDAFLAQEVTLPAIWEHDRSQDDYVDGLTKVRDWVSQDPQVLPLRSQNLWTDINDRVVEGGFYYRTAEHSAQQSSERLQSYERMFKNGQLNVLNCSTTMEMGVDIGGISAVVMNNVPPHPANYLQRAGRAGRSKESRAISYTLCKGNPHDQQVFANPLWPFETVIPAPMVAMNSERLVQRHVNSLLLSEYLCHVVGETEKERTSLNSQWFFGEELDQSVCNRFKAWLERPTLSIDNALERLVKGTALHGVTAEKLRDKTQEAIAVLQTRWLGIFRDLVKQESESQPNTPYRRRLELEKKRHCGEYLLRDLAARTFLPGYGFPTDVVTFDNFTMEDYIREKTHKSSDKNDREDNVSRYKGLPSRNLSVAIREYAPGAEIILDGRVFRSAGVSLHWHNLNADTNEAQRLDSAWRCHKCGTLGYEEGIGGSGDLFCTNSACGERITLDNRRQVLQPAGFVTDAHTPVTNNIETMKFIPVVPAWVFVKAERVPLPNPLMGFMASGADGHVFQQSMGEGGHGYALCLSCGRAESMLNATDTPKSMEAHYPPRPGKSDRDSQNQRIICPGSTALNKNVTLGALARTDVFELILRRPQNGEYIPDNSDEGRIVAMTLAVALRRALASVLGVSATELGYAVRPVRLDNEQSVLAVQLYDIISGGAGFASSAPLHIEAVLKGMVKQLGCRHCDTACSECLLDSQTRHDHDQLDRKAAQAWLGEDFSHYIGLPEAEKFSLADAQYCPGSIEDAIRRAINDGARKLTLWMNGPLNEWDLYARQFRTAIQNYRLKDEVEVTLVVPGHIEDPELLQEIAQFAAIGVQLCQSELNTDTPVVAQVAFNDRLMTLISRSPEATIPGPNWHLNSQMVIRSHAFEPITLSKAELLSDAAGSRGLVNDIEIHKQLNGPVSQFGQRFWGVLTGAQEDIQTLLKENQVTRIHYSDRYLQNPVALALLGGLLKPLKSILAQDAQVTIDTLFKSKERPGNKPFHDWMSEADFQDFADQWFAASMGRAVVVNTVGSPRDIPHHRKLMVTFSNGQALKIRFDQGMGYWRIVFARAYRDFDFNDDVAFQLGNMAKACVEGQVVNSEESWATDVLVQVIVP

SEQ ID NO: 26764 - protein, 1099 aa, Salmonella enterica subsp. enterica serovar Paratyphi A
MSQSEYTSILKCTPWLAKFLTRRGLKQPDHRPLYEYHATSEEYDELKRLLRAIGVPDGYKSDKGYAACFTLFCSEWYRRDYEREYGWAWEPIYKTIGISASSSEMGKIIPKGLDGYWGRPVRFYDTERRNFLGSLFSEGGLPFRLLKESNSRFQSMFSLILNQYDQAKSSNISTFALVHAAVEKSSLPVVFKEDTSVELISRMAEQLVSLVQIYNLSNHTEPVKELERVHPKWRDSFPVPLDDDTGTSFLNGLLRTASTESKPRLQKNKTTLCQFLWSENHPEALQALISLPEELSFSIDIEPSTTRFELAIYEDGNEIASLGPAYATLSNSQAKIKVRKREIKFYRRNPTVSLFIVARAGGMFFGSNLLEGSEVAVGDVPLVFVSDKNEWLLQGQASCSVRGSHVLIVLPKDGCLASEHEDCDSGFSALGCHALTIKGRQDIIIKGDETYRIKIGRDQIIHTGFSFQGKRLNWTSYPDELFLGVPGITQHSENLSTRHYKRFFNGTFIENCDVQEKMGAQFISVRNENDETLLRKKIGILPNDFSLEIKNGQQANEGSVIITTQHPCLYSLKEKTLEVGRKRLPGSTEIMMKAEGIPPASISLQITPNLTANPIVIWLPFPARGCLAFDKDEKPLPKNLTINDLLGARAYLFGKNGEPTRYQLELRLRSRSGMQAWYEWHYSAGECPVELTLYSLREHIDNLLSLEEGIDQTVDMRIKGGGSSFTWQIRRYKYSLDYDRGRQILLANSISNRTGQIPSPVIMLLSEPERKVVLLTSRMSEGVPVGEFELSSIIQKNGPWLVLPKPGEEASFRPCFIAGEPVIQSDATAIQSLQKATQLFNPRSDVNTIMLVLEQMASDPAHSGWQFLRNLYDQFGYLPLATFEVWRALVQHPQALAMSLFKFEMSIDYLSRIESEFPVFWEFLSITKVKRSATRFRAFLTHKGAPEEMQIRLLDRMYQQLGTTFPTYASEVQLWLSQGKLPPVFPELTMKGIILEWYQELLREHGESRWPEFGGPGLLRWYMSQQNPVIDISPDASYRYSVTLLPVFAAAVASGKTTFESVFENKPGAVFFLRQVRDFDSRWFNAIFQYCLLRNVTEK

SEQ ID NO: 26765 - protein, 2106 aa, Salmonella enterica subsp. enterica serovar Paratyphi A; identical to SEQ ID NO: 26763

SEQ ID NO: 26766 - protein, 1099 aa, Salmonella enterica subsp. enterica serovar Paratyphi A; identical to SEQ ID NO: 26764

SEQ ID NO: 26767 - protein, 2106 aa, Salmonella enterica subsp. enterica serovar Paratyphi A; identical to SEQ ID NO: 26763

SEQ ID NO: 26768 - protein, 1099 aa, Salmonella enterica subsp. enterica serovar Paratyphi A; identical to SEQ ID NO: 26764

SEQ ID NO: 26769 - protein, 2106 aa, Salmonella enterica subsp. enterica serovar Paratyphi A; identical to SEQ ID NO: 26763

SEQ ID NO: 26770 - protein, 1099 aa, Salmonella enterica subsp. enterica serovar Paratyphi A; identical to SEQ ID NO: 26764

SEQ ID NO: 26771 - protein, 2106 aa, Salmonella enterica subsp. enterica serovar Paratyphi A; identical to SEQ ID NO: 26763

SEQ ID NO: 26772 - protein, 1099 aa, Salmonella enterica subsp. enterica serovar Paratyphi A; identical to SEQ ID NO: 26764

SEQ ID NO: 26773 - protein, 2106 aa, Salmonella enterica subsp. enterica serovar Paratyphi A; identical to SEQ ID NO: 26763

SEQ ID NO: 26774 - protein, 1099 aa, Salmonella enterica subsp. enterica serovar Paratyphi A; identical to SEQ ID NO: 26764

SEQ ID NO: 26775 - protein, 2106 aa, Salmonella enterica subsp. enterica serovar Paratyphi A; identical to SEQ ID NO: 26763

SEQ ID NO: 26776 - protein, 1099 aa, Salmonella enterica subsp. enterica serovar Paratyphi A; identical to SEQ ID NO: 26764

SEQ ID NO: 26777 - protein, 2106 aa, Salmonella enterica subsp. enterica serovar Paratyphi A; identical to SEQ ID NO: 26763

SEQ ID NO: 26778 - protein, 1099 aa, Salmonella enterica subsp. enterica serovar Paratyphi A; identical to SEQ ID NO: 26764

SEQ ID NO: 26779 - protein, 2106 aa, Salmonella enterica subsp. enterica serovar Paratyphi A; identical to SEQ ID NO: 26763

SEQ ID NO: 26780 - protein, 1099 aa, Salmonella enterica subsp. enterica serovar Paratyphi A; identical to SEQ ID NO: 26764

SEQ ID NO: 26781 - protein, 2106 aa, Salmonella enterica subsp. enterica serovar Paratyphi A; identical to SEQ ID NO: 26763

SEQ ID NO: 26782 - protein, 1099 aa, Salmonella enterica subsp. enterica serovar Paratyphi A; identical to SEQ ID NO: 26764

SEQ ID NO: 26783 - protein, 2106 aa, Salmonella enterica subsp. enterica serovar Paratyphi A; identical to SEQ ID NO: 26763

SEQ ID NO: 26784 - protein, 1099 aa, Salmonella enterica subsp. enterica serovar Paratyphi A; identical to SEQ ID NO: 26764

SEQ ID NO: 26785 - protein, 2106 aa, Salmonella enterica subsp. enterica serovar Paratyphi A; identical to SEQ ID NO: 26763

SEQ ID NO: 26786 - protein, 1099 aa, Salmonella enterica subsp. enterica serovar Paratyphi A; identical to SEQ ID NO: 26764

SEQ ID NO: 26787 - protein, 2106 aa, Salmonella enterica subsp. enterica serovar Paratyphi A; identical to SEQ ID NO: 26763

SEQ ID NO: 26788 - protein, 1099 aa, Salmonella enterica subsp. enterica serovar Paratyphi A; identical to SEQ ID NO: 26764

SEQ ID NO: 26789 - protein, 2106 aa, Salmonella enterica subsp. enterica serovar Paratyphi A; identical to SEQ ID NO: 26763

SEQ ID NO: 26790 - protein, 1099 aa, Salmonella enterica subsp. enterica serovar Paratyphi A; identical to SEQ ID NO: 26764

SEQ ID NO: 26791 - protein, 2106 aa, Salmonella enterica subsp. enterica serovar Paratyphi A; identical to SEQ ID NO: 26763

SEQ ID NO: 26792 - protein, 1099 aa, Salmonella enterica subsp. enterica serovar Paratyphi A; identical to SEQ ID NO: 26764

SEQ ID NO: 26793 - protein, 2106 aa, Salmonella enterica subsp. enterica serovar Paratyphi A; identical to SEQ ID NO: 26763

SEQ ID NO: 26794 - protein, 1099 aa, Salmonella enterica subsp. enterica serovar Paratyphi A; identical to SEQ ID NO: 26764

SEQ ID NO: 26795 - protein, 2106 aa, Salmonella enterica subsp. enterica serovar Paratyphi A; identical to SEQ ID NO: 26763

SEQ ID NO: 26796 - protein, 1099 aa, Salmonella enterica subsp. enterica serovar Paratyphi A; identical to SEQ ID NO: 26764

SEQ ID NO: 26797 - protein, 2106 aa, Salmonella enterica subsp. enterica serovar Paratyphi A; identical to SEQ ID NO: 26763

SEQ ID NO: 26798 - protein, 1099 aa, Salmonella enterica subsp. enterica serovar Paratyphi A; identical to SEQ ID NO: 26764

SEQ ID NO: 26799 - protein, 2106 aa, Salmonella enterica subsp. enterica serovar Paratyphi A; identical to SEQ ID NO: 26763

SEQ ID NO: 26800 - protein, 1099 aa, Salmonella enterica subsp. enterica serovar Paratyphi A; identical to SEQ ID NO: 26764

SEQ ID NO: 26801 - protein, 2106 aa, Salmonella enterica subsp. enterica serovar Paratyphi A; identical to SEQ ID NO: 26763

SEQ ID NO: 26802 - protein, 1099 aa, Salmonella enterica subsp. enterica serovar Paratyphi A; identical to SEQ ID NO: 26764

SEQ ID NO: 26803 - protein, 2106 aa, Salmonella enterica subsp. enterica serovar Paratyphi A; identical to SEQ ID NO: 26763

SEQ ID NO: 26804 - protein, 1099 aa, Salmonella enterica subsp. enterica serovar Paratyphi A; identical to SEQ ID NO: 26764

SEQ ID NO: 26805 - protein, 2106 aa, Salmonella enterica subsp. enterica serovar Paratyphi A; identical to SEQ ID NO: 26763

SEQ ID NO: 26806 - protein, 1099 aa, Salmonella enterica subsp. enterica serovar Paratyphi A; identical to SEQ ID NO: 26764

SEQ ID NO: 26807 - protein, 2106 aa, Salmonella enterica subsp. enterica serovar Paratyphi A; identical to SEQ ID NO: 26763

SEQ ID NO: 26808 - protein, 1099 aa, Salmonella enterica subsp. enterica serovar Paratyphi A; identical to SEQ ID NO: 26764

SEQ ID NO: 26809 - protein, 2106 aa, Salmonella enterica subsp. enterica serovar Paratyphi A; identical to SEQ ID NO: 26763

SEQ ID NO: 26810 - protein, 1099 aa, Salmonella enterica subsp. enterica serovar Paratyphi A; identical to SEQ ID NO: 26764

SEQ ID NO: 26811 - protein, 2106 aa, Salmonella enterica subsp. enterica serovar Paratyphi A; identical to SEQ ID NO: 26763

SEQ ID NO: 26812 - protein, 1099 aa, Salmonella enterica subsp. enterica serovar Paratyphi A; identical to SEQ ID NO: 26764

SEQ ID NO: 26813 - protein, 2106 aa, Salmonella enterica subsp. enterica serovar Paratyphi A; identical to SEQ ID NO: 26763

SEQ ID NO: 26814 - protein, 1099 aa, Salmonella enterica subsp. enterica serovar Paratyphi A; identical to SEQ ID NO: 26764

SEQ ID NO: 26815 - protein, 2106 aa, Salmonella enterica subsp. enterica serovar Paratyphi A; identical to SEQ ID NO: 26763

SEQ ID NO: 26816 - protein, 1099 aa, Salmonella enterica subsp. enterica serovar Paratyphi A; identical to SEQ ID NO: 26764

SEQ ID NO: 26817 - protein, 2106 aa, Salmonella enterica subsp. enterica serovar Paratyphi A; identical to SEQ ID NO: 26763

SEQ ID NO: 26818 - protein, 1099 aa, Salmonella enterica subsp. enterica serovar Paratyphi A; identical to SEQ ID NO: 26764

SEQ ID NO: 26819 - protein, 2106 aa, Salmonella enterica subsp. enterica serovar Paratyphi A; identical to SEQ ID NO: 26763

SEQ ID NO: 26820 - protein, 1099 aa, Salmonella enterica subsp. enterica serovar Paratyphi A; identical to SEQ ID NO: 26764

SEQ ID NO: 26821 - protein, 2106 aa, Salmonella enterica subsp. enterica serovar Paratyphi A; identical to SEQ ID NO: 26763

SEQ ID NO: 26822 - protein, 1099 aa, Salmonella enterica subsp. enterica serovar Paratyphi A; identical to SEQ ID NO: 26764

SEQ ID NO: 26823 - protein, 2106 aa, Salmonella enterica subsp. enterica serovar Paratyphi A; identical to SEQ ID NO: 26763

SEQ ID NO: 26824 - protein, 1099 aa, Salmonella enterica subsp. enterica serovar Paratyphi A; identical to SEQ ID NO: 26764

SEQ ID NO: 26825 - protein, 2106 aa, Salmonella enterica subsp. enterica serovar Paratyphi A; identical to SEQ ID NO: 26763

SEQ ID NO: 26826 - protein, 1099 aa, Salmonella enterica subsp. enterica serovar Paratyphi A; identical to SEQ ID NO: 26764

SEQ ID NO: 26827 - protein, 2106 aa, Salmonella enterica subsp. enterica serovar Paratyphi A; identical to SEQ ID NO: 26763

SEQ ID NO: 26828 - protein, 1099 aa, Salmonella enterica subsp. enterica serovar Paratyphi A; identical to SEQ ID NO: 26764

SEQ ID NO: 26829 - protein, 2106 aa, Salmonella enterica subsp. enterica serovar Paratyphi A; identical to SEQ ID NO: 26763

SEQ ID NO: 26830 - protein, 1099 aa, Salmonella enterica subsp. enterica serovar Paratyphi A; identical to SEQ ID NO: 26764

SEQ ID NO: 26831 - protein, 2106 aa, Salmonella enterica subsp. enterica serovar Paratyphi A; identical to SEQ ID NO: 26763

SEQ ID NO: 26832 - protein, 1099 aa, Salmonella enterica subsp. enterica serovar Paratyphi A; identical to SEQ ID NO: 26764

SEQ ID NO: 26833 - protein, 2106 aa, Salmonella enterica subsp. enterica serovar Paratyphi A; identical to SEQ ID NO: 26763

SEQ ID NO: 26834 - protein, 1099 aa, Salmonella enterica subsp. enterica serovar Paratyphi A; identical to SEQ ID NO: 26764

SEQ ID NO: 26835 - protein, 2106 aa, Salmonella enterica subsp. enterica serovar Paratyphi A; identical to SEQ ID NO: 26763

SEQ ID NO: 26836 - protein, 1099 aa, Salmonella enterica subsp. enterica serovar Paratyphi A; identical to SEQ ID NO: 26764

SEQ ID NO: 26837 - protein, 2106 aa, Salmonella enterica subsp. enterica serovar Paratyphi A; identical to SEQ ID NO: 26763

SEQ ID NO: 26838 - protein, 1099 aa, Salmonella enterica subsp. enterica serovar Paratyphi A; identical to SEQ ID NO: 26764

SEQ ID NO: 26839 - protein, 2106 aa, Salmonella enterica subsp. enterica serovar Paratyphi A; identical to SEQ ID NO: 26763

SEQ ID NO: 26840 - protein, 1099 aa, Salmonella enterica subsp. enterica serovar Paratyphi A; identical to SEQ ID NO: 26764

SEQ ID NO: 26841 - protein, 2106 aa, Salmonella enterica subsp. enterica serovar Paratyphi A; identical to SEQ ID NO: 26763

SEQ ID NO: 26842 - protein, 1099 aa, Salmonella enterica subsp. enterica serovar Paratyphi A; identical to SEQ ID NO: 26764

SEQ ID NO: 26843 - protein, 2106 aa, Salmonella enterica subsp. enterica serovar Paratyphi A; identical to SEQ ID NO: 26763

SEQ ID NO: 26844 - protein, 1099 aa, Salmonella enterica subsp. enterica serovar Paratyphi A; identical to SEQ ID NO: 26764

SEQ ID NO: 26845 - protein, 2106 aa, Salmonella enterica subsp. enterica serovar Paratyphi A; identical to SEQ ID NO: 26763

SEQ ID NO: 26846 - protein, 1099 aa, Salmonella enterica subsp. enterica serovar Paratyphi A; identical to SEQ ID NO: 26764

SEQ ID NO: 26847 - protein, 2106 aa, Salmonella enterica subsp. enterica serovar Paratyphi A; identical to SEQ ID NO: 26763

SEQ ID NO: 26848 - protein, 1099 aa, Salmonella enterica subsp. enterica serovar Paratyphi A; identical to SEQ ID NO: 26764

SEQ ID NO: 26849 - protein, 2106 aa, Salmonella enterica subsp. enterica serovar Paratyphi A; identical to SEQ ID NO: 26763

SEQ ID NO: 26850 - protein, 1099 aa, Salmonella enterica subsp. enterica serovar Paratyphi A; identical to SEQ ID NO: 26764

SEQ ID NO: 26851 - protein, 2106 aa, Salmonella enterica subsp. enterica serovar Paratyphi A; identical to SEQ ID NO: 26763

SEQ ID NO: 26852 - protein, 1099 aa, Salmonella enterica subsp. enterica serovar Paratyphi A; identical to SEQ ID NO: 26764

SEQ ID NO: 26853 - protein, 2106 aa, Salmonella enterica subsp. enterica serovar Paratyphi A; identical to SEQ ID NO: 26763

SEQ ID NO: 26854 - protein, 1099 aa, Salmonella enterica subsp. enterica serovar Paratyphi A; identical to SEQ ID NO: 26764

SEQ ID NO: 26855 - protein, 2106 aa, Salmonella enterica subsp. enterica serovar Paratyphi A; identical to SEQ ID NO: 26763

SEQ ID NO: 26856 - protein, 1099 aa, Salmonella enterica subsp. enterica serovar Paratyphi A; identical to SEQ ID NO: 26764

SEQ ID NO: 26857 - protein, 2106 aa, Salmonella enterica subsp. enterica serovar Paratyphi A; identical to SEQ ID NO: 26763

SEQ ID NO: 26858 - protein, 1099 aa, Salmonella enterica subsp. enterica serovar Paratyphi A; identical to SEQ ID NO: 26764

SEQ ID NO: 26859 - protein, 2106 aa, Salmonella enterica subsp. enterica serovar Paratyphi A; identical to SEQ ID NO: 26763

SEQ ID NO: 26860 - protein, 1099 aa, Salmonella enterica subsp. enterica serovar Paratyphi A; identical to SEQ ID NO: 26764

SEQ ID NO: 26861 - protein, 2106 aa, Salmonella enterica subsp. enterica serovar Paratyphi A; identical to SEQ ID NO: 26763

SEQ ID NO: 26862 - protein, 1099 aa, Salmonella enterica subsp. enterica serovar Paratyphi A; identical to SEQ ID NO: 26764

SEQ ID NO: 26863 - protein, 2106 aa, Salmonella enterica subsp. enterica serovar Paratyphi A; identical to SEQ ID NO: 26763

SEQ ID NO: 26864 - protein, 1099 aa, Salmonella enterica subsp. enterica serovar Paratyphi A; identical to SEQ ID NO: 26764

SEQ ID NO: 26865 - protein, 2106 aa, Salmonella enterica subsp. enterica serovar Paratyphi A; identical to SEQ ID NO: 26763

SEQ ID NO: 26866 - protein, 1099 aa, Salmonella enterica subsp. enterica serovar Paratyphi A; identical to SEQ ID NO: 26764

SEQ ID NO: 26867 - protein, 2106 aa, Salmonella enterica subsp. enterica serovar Paratyphi A; identical to SEQ ID NO: 26763

SEQ ID NO: 26868 - protein, 1099 aa, Salmonella enterica subsp. enterica serovar Paratyphi A; identical to SEQ ID NO: 26764

SEQ ID NO: 26869 - protein, 2106 aa, Salmonella enterica subsp. enterica serovar Paratyphi A; identical to SEQ ID NO: 26763

SEQ ID NO: 26870 - protein, 1099 aa, Salmonella enterica subsp. enterica serovar Paratyphi A; identical to SEQ ID NO: 26764

SEQ ID NO: 26871 - protein, 2106 aa, Salmonella enterica subsp. enterica serovar Paratyphi A; identical to SEQ ID NO: 26763

SEQ ID NO: 26872 - protein, 1099 aa, Salmonella enterica subsp. enterica serovar Paratyphi A; identical to SEQ ID NO: 26764

SEQ ID NO: 26873 - protein, 2106 aa, Salmonella enterica subsp. enterica serovar Paratyphi A; identical to SEQ ID NO: 26763

SEQ ID NO: 26874 - protein, 1099 aa, Salmonella enterica subsp. enterica serovar Paratyphi A; identical to SEQ ID NO: 26764

SEQ ID NO: 26875 - protein, 2106 aa, Salmonella enterica subsp. enterica serovar Paratyphi A; identical to SEQ ID NO: 26763

SEQ ID NO: 26876 - protein, 1099 aa, Salmonella enterica subsp. enterica serovar Paratyphi A; identical to SEQ ID NO: 26764

SEQ ID NO: 26877 - protein, 2106 aa, Salmonella enterica subsp. enterica serovar Paratyphi A; identical to SEQ ID NO: 26763

SEQ ID NO: 26878 - protein, 1099 aa, Salmonella enterica subsp. enterica serovar Paratyphi A; identical to SEQ ID NO: 26764

SEQ ID NO: 26879 - protein, 2106 aa, Salmonella enterica subsp. enterica serovar Paratyphi A; identical to SEQ ID NO: 26763

SEQ ID NO: 26880 - protein, 1099 aa, Salmonella enterica subsp. enterica serovar Paratyphi A; identical to SEQ ID NO: 26764

SEQ ID NO: 26881 - protein, 2106 aa, Salmonella enterica subsp. enterica serovar Paratyphi A; identical to SEQ ID NO: 26763

SEQ ID NO: 26882 - protein, 1099 aa, Salmonella enterica subsp. enterica serovar Paratyphi A; identical to SEQ ID NO: 26764

SEQ ID NO: 26883 - protein, 2106 aa, Salmonella enterica subsp. enterica serovar Paratyphi A; identical to SEQ ID NO: 26763

SEQ ID NO: 26884 - protein, 1099 aa, Salmonella enterica subsp. enterica serovar Paratyphi A; identical to SEQ ID NO: 26764

SEQ ID NO: 26885 - protein, 2106 aa, Salmonella enterica subsp. enterica serovar Paratyphi A; identical to SEQ ID NO: 26763

SEQ ID NO: 26886 - protein, 1099 aa, Salmonella enterica subsp. enterica serovar Paratyphi A; identical to SEQ ID NO: 26764

SEQ ID NO: 26887 - protein, 2106 aa, Salmonella enterica subsp. enterica serovar Paratyphi A; identical to SEQ ID NO: 26763

SEQ ID NO: 26888 - protein, 1099 aa, Salmonella enterica subsp. enterica serovar Paratyphi A; identical to SEQ ID NO: 26764

SEQ ID NO: 26889 - protein, 2106 aa, Salmonella enterica subsp. enterica serovar Paratyphi A; identical to SEQ ID NO: 26763

SEQ ID NO: 26890 - protein, 1099 aa, Salmonella enterica subsp. enterica serovar Paratyphi A; identical to SEQ ID NO: 26764

SEQ ID NO: 26891 - protein, 2106 aa, Salmonella enterica subsp. enterica serovar Paratyphi A; identical to SEQ ID NO: 26763

SEQ ID NO: 26892 - protein, 1099 aa, Salmonella enterica subsp. enterica serovar Paratyphi A; identical to SEQ ID NO: 26764

SEQ ID NO: 26893 - protein, 2106 aa, Salmonella enterica subsp. enterica serovar Paratyphi A; identical to SEQ ID NO: 26763

SEQ ID NO: 26894 - protein, 1099 aa, Salmonella enterica subsp. enterica serovar Paratyphi A; identical to SEQ ID NO: 26764

SEQ ID NO: 26895 - protein, 2106 aa, Salmonella enterica subsp. enterica serovar Paratyphi A; identical to SEQ ID NO: 26763

SEQ ID NO: 26896 - protein, 1099 aa, Salmonella enterica subsp. enterica serovar Paratyphi A; identical to SEQ ID NO: 26764

SEQ ID NO: 26897 - protein, 2106 aa, Salmonella enterica subsp. enterica serovar Paratyphi A; identical to SEQ ID NO: 26763

SEQ ID NO: 26898 - protein, 1099 aa, Salmonella enterica subsp. enterica serovar Paratyphi A; identical to SEQ ID NO: 26764

SEQ ID NO: 26899 - protein, 2106 aa, Salmonella enterica subsp. enterica serovar Paratyphi A; identical to SEQ ID NO: 26763

SEQ ID NO: 26900 - protein, 1099 aa, Salmonella enterica subsp. enterica serovar Paratyphi A; identical to SEQ ID NO: 26764

SEQ ID NO: 26901 - protein, 2106 aa, Salmonella enterica subsp. enterica serovar Paratyphi A; identical to SEQ ID NO: 26763

SEQ ID NO: 26902 - protein, 1099 aa, Salmonella enterica subsp. enterica serovar Paratyphi A; identical to SEQ ID NO: 26764

SEQ ID NO: 26903 - protein, 2106 aa, Salmonella enterica subsp. enterica serovar Paratyphi A; identical to SEQ ID NO: 26763

SEQ ID NO: 26904 - protein, 1099 aa, Salmonella enterica subsp. enterica serovar Paratyphi A; identical to SEQ ID NO: 26764

SEQ ID NO: 26905 - protein, 2106 aa, Salmonella enterica subsp. enterica serovar Paratyphi A; identical to SEQ ID NO: 26763

SEQ ID NO: 26906 - protein, 1099 aa, Salmonella enterica subsp. enterica serovar Paratyphi A; identical to SEQ ID NO: 26764

SEQ ID NO: 26907 - protein, 2106 aa, Salmonella enterica subsp. enterica serovar Paratyphi A; identical to SEQ ID NO: 26763

SEQ ID NO: 26908 - protein, 1099 aa, Salmonella enterica subsp. enterica serovar Paratyphi A; identical to SEQ ID NO: 26764

SEQ ID NO: 26909 - protein, 2106 aa, Salmonella enterica subsp. enterica serovar Paratyphi A; identical to SEQ ID NO: 26763

SEQ ID NO: 26910 - protein, 1099 aa, Salmonella enterica subsp. enterica serovar Paratyphi A; identical to SEQ ID NO: 26764

SEQ ID NO: 26911 - protein, 2106 aa, Salmonella enterica subsp. enterica serovar Paratyphi A; identical to SEQ ID NO: 26763

SEQ ID NO: 26912 - protein, 1099 aa, Salmonella enterica subsp. enterica serovar Paratyphi A; identical to SEQ ID NO: 26764

SEQ ID NO: 26913 - protein, 2106 aa, Salmonella enterica subsp. enterica serovar Paratyphi A; identical to SEQ ID NO: 26763

SEQ ID NO: 26914 - protein, 1099 aa, Salmonella enterica subsp. enterica serovar Paratyphi A; identical to SEQ ID NO: 26764

SEQ ID NO: 26915 - protein, 2106 aa, Salmonella enterica subsp. enterica serovar Paratyphi A; identical to SEQ ID NO: 26763

SEQ ID NO: 26916 - protein, 1099 aa, Salmonella enterica subsp. enterica serovar Paratyphi A; identical to SEQ ID NO: 26764

SEQ ID NO: 26917 - protein, 2106 aa, Salmonella enterica subsp. enterica serovar Paratyphi A; identical to SEQ ID NO: 26763

SEQ ID NO: 26918 - protein, 1099 aa, Salmonella enterica subsp. enterica serovar Paratyphi A; identical to SEQ ID NO: 26764

SEQ ID NO: 26919 - protein, 2106 aa, Salmonella enterica subsp. enterica serovar Paratyphi A; identical to SEQ ID NO: 26763

SEQ ID NO: 26920 - protein, 1099 aa, Salmonella enterica subsp. enterica serovar Paratyphi A; identical to SEQ ID NO: 26764

SEQ ID NO: 26921 - protein, 2106 aa, Salmonella enterica subsp. enterica serovar Paratyphi A; identical to SEQ ID NO: 26763

SEQ ID NO: 26922 - protein, 1099 aa, Salmonella enterica subsp. enterica serovar Paratyphi A; identical to SEQ ID NO: 26764

SEQ ID NO: 26923 - protein, 2106 aa, Salmonella enterica subsp. enterica serovar Paratyphi A; identical to SEQ ID NO: 26763

SEQ ID NO: 26924 - protein, 1099 aa, Salmonella enterica subsp. enterica serovar Paratyphi A; identical to SEQ ID NO: 26764

SEQ ID NO: 26925 - protein, 2106 aa, Salmonella enterica subsp. enterica serovar Paratyphi A; identical to SEQ ID NO: 26763

SEQ ID NO: 26926 - protein, 1099 aa, Salmonella enterica subsp. enterica serovar Paratyphi A; identical to SEQ ID NO: 26764

SEQ ID NO: 26927 - protein, 2106 aa, Salmonella enterica subsp. enterica serovar Paratyphi A; identical to SEQ ID NO: 26763

SEQ ID NO: 26928 - protein, 1099 aa, Salmonella enterica subsp. enterica serovar Paratyphi A; identical to SEQ ID NO: 26764

SEQ ID NO: 26929 - protein, 2106 aa, Salmonella enterica subsp. enterica serovar Paratyphi A; identical to SEQ ID NO: 26763

SEQ ID NO: 26930 - protein, 1099 aa, Salmonella enterica subsp. enterica serovar Paratyphi A; identical to SEQ ID NO: 26764

SEQ ID NO: 26931 - protein, 2106 aa, Salmonella enterica subsp. enterica serovar Paratyphi A; identical to SEQ ID NO: 26763

SEQ ID NO: 26932 - protein, 1099 aa, Salmonella enterica subsp. enterica serovar Paratyphi A; identical to SEQ ID NO: 26764

SEQ ID NO: 26933 - protein, 2106 aa, Salmonella enterica subsp. enterica serovar Paratyphi A; identical to SEQ ID NO: 26763

SEQ ID NO: 26934 - protein, 1099 aa, Salmonella enterica subsp. enterica serovar Paratyphi A; identical to SEQ ID NO: 26764

SEQ ID NO: 26935 - protein, 2106 aa, Salmonella enterica subsp. enterica serovar Paratyphi A; identical to SEQ ID NO: 26763

SEQ ID NO: 26936 - protein, 1099 aa, Salmonella enterica subsp. enterica serovar Paratyphi A; identical to SEQ ID NO: 26764

SEQ ID NO: 26937 - protein, 2106 aa, Salmonella enterica subsp. enterica serovar Paratyphi A; identical to SEQ ID NO: 26763

SEQ ID NO: 26938 - protein, 1099 aa, Salmonella enterica subsp. enterica serovar Paratyphi A; identical to SEQ ID NO: 26764

SEQ ID NO: 26939 - protein, 2106 aa, Salmonella enterica subsp. enterica serovar Paratyphi A; identical to SEQ ID NO: 26763

SEQ ID NO: 26940 - protein, 1099 aa, Salmonella enterica subsp. enterica serovar Paratyphi A; identical to SEQ ID NO: 26764

SEQ ID NO: 26941 - protein, 2106 aa, Salmonella enterica subsp. enterica serovar Paratyphi A; identical to SEQ ID NO: 26763

SEQ ID NO: 26942 - protein, 1099 aa, Salmonella enterica subsp. enterica serovar Paratyphi A; identical to SEQ ID NO: 26764

SEQ ID NO: 26943 - protein, 2106 aa, Salmonella enterica subsp. enterica serovar Paratyphi A; identical to SEQ ID NO: 26763

SEQ ID NO: 26944 - protein, 1099 aa, Salmonella enterica subsp. enterica serovar Paratyphi A; identical to SEQ ID NO: 26764

SEQ ID NO: 26945 - protein, 2106 aa, Salmonella enterica subsp. enterica serovar Paratyphi A; identical to SEQ ID NO: 26763

SEQ ID NO: 26946 - protein, 1099 aa, Salmonella enterica subsp. enterica serovar Paratyphi A; identical to SEQ ID NO: 26764

SEQ ID NO: 26947 - protein, 2106 aa, Salmonella enterica subsp. enterica serovar Paratyphi A; identical to SEQ ID NO: 26763

SEQ ID NO: 26948 - protein, 1099 aa, Salmonella enterica subsp. enterica serovar Paratyphi A; identical to SEQ ID NO: 26764

SEQ ID NO: 26949 - protein, 2106 aa, Salmonella enterica subsp. enterica serovar Paratyphi A; identical to SEQ ID NO: 26763

SEQ ID NO: 26950 - protein, 1099 aa, Salmonella enterica subsp. enterica serovar Paratyphi A; identical to SEQ ID NO: 26764

SEQ ID NO: 26951 - protein, 2106 aa, Salmonella enterica subsp. enterica serovar Paratyphi A; identical to SEQ ID NO: 26763

SEQ ID NO: 26952 - protein, 1099 aa, Salmonella enterica subsp. enterica serovar Paratyphi A; identical to SEQ ID NO: 26764

SEQ ID NO: 26953 - protein, 2106 aa, Salmonella enterica subsp. enterica serovar Paratyphi A; identical to SEQ ID NO: 26763

SEQ ID NO: 26954 - protein, 1099 aa, Salmonella enterica subsp. enterica serovar Paratyphi A; identical to SEQ ID NO: 26764

SEQ ID NO: 26955 - protein, 2106 aa, Salmonella enterica subsp. enterica serovar Paratyphi A; identical to SEQ ID NO: 26763

SEQ ID NO: 26956 - protein, 1099 aa, Salmonella enterica subsp. enterica serovar Paratyphi A; identical to SEQ ID NO: 26764

SEQ ID NO: 26957 - protein, 2106 aa, Salmonella enterica subsp. enterica serovar Paratyphi A; identical to SEQ ID NO: 26763

SEQ ID NO: 26958 - protein, 1099 aa, Salmonella enterica subsp. enterica serovar Paratyphi A; identical to SEQ ID NO: 26764

SEQ ID NO: 26959 - protein, 2106 aa, Salmonella enterica subsp. enterica serovar Paratyphi A; identical to SEQ ID NO: 26763

SEQ ID NO: 26960 - protein, 1099 aa, Salmonella enterica subsp. enterica serovar Paratyphi A; identical to SEQ ID NO: 26764

SEQ ID NO: 26961 - protein, 2106 aa, Salmonella enterica subsp. enterica serovar Paratyphi A; identical to SEQ ID NO: 26763

SEQ ID NO: 26962 - protein, 1099 aa, Salmonella enterica subsp. enterica serovar Paratyphi A; identical to SEQ ID NO: 26764

SEQ ID NO: 26963 - protein, 2106 aa, Salmonella enterica subsp. enterica serovar Paratyphi A; identical to SEQ ID NO: 26763

SEQ ID NO: 26964 - protein, 1099 aa, Salmonella enterica subsp. enterica serovar Paratyphi A; identical to SEQ ID NO: 26764

SEQ ID NO: 26965 - protein, 2106 aa, Salmonella enterica subsp. enterica serovar Paratyphi A; identical to SEQ ID NO: 26763

SEQ ID NO: 26966 - protein, 1099 aa, Salmonella enterica subsp. enterica serovar Paratyphi A; identical to SEQ ID NO: 26764

SEQ ID NO: 26967 - protein, 2106 aa, Salmonella enterica subsp. enterica serovar Paratyphi A
MTTRYFSSLIEQSLSRSTEATLSIMGVTNPNLREHLTQQMAADCGKEGSFLASPVFEQTFGWKESNSTMKDLATKQTLLSKEVVDSLDSEENGRYRFGSDWKPFTHQLASWQSLLEKKHSVVVTSGTGSGKTECFMVPVLEDLYRELQVKNKKPLIGVRALFLYPLNALINSQRERLDAWTRSFGSGIRYCLYNGNTEELHALVKSEQANRPNEVLSREKMREEPAPILVTNGTMLEYMMVRQVDAPIIQKSKAEKSLRWIVLDEAHTYVGSQAAELALQLRRVMTAFGVTPDDVRFVATSATIAGSDAEKQLKKFLSELSGVPQERIDVLGGSRVIPELEPCKQYSLSLDEIEHIPDSESEGISPERYSALTHSPEARCLREMLVSQPRPMKLDTLTQRLNELTKHQYTQQDVLRWIDLCSGTLPNAKDPAFLKVRAHIFQRNTQGIWACVDKNCAAKKNTALEKNWSFGNVYVNQRQNCECGSPVFELAFCNECNEPHLLARDKKGKLVQWDNKGGDEFSLQDEISDDFETSGEKIQKDFVFQSPQIIAAECNTEAGYIMQRLDRQTRSIGVVNPDSIPLAINDIEQICSASNCGYKGGKGKQPFRRALLGGPFYVTNIVPTVLEYCQDFTSDEGKDGVGPLSLPGRGRRLITFTDSRQGTARMAVRMQQEAERSRLRGSVVEILGWHQRKQPTSAPNDQADVMKLVARVTQYREEAREYREWGMPEEAKLSEAQAERLEQAIQTATGGKAATILVCRTWTEMVNDLKEKADIQGPILQYNHYLKPEIFTENGGPLKLAEMLLFREFMRRPKRTNSLETQGLVQVGYQGLEKAHSVPTHWQAKGLTLDDWRDFLKVALDFYVRESNYIQLDDDLRNWIGSRFSSKFVRNPDSKEPDDNQVKRWPQIRHGNVTQRLVKLLILGAKFNTVNTVTIDIVNAWLKEAWLQLTGSLAVLKPDGNRFYLPKEHLTFSLVQKARICPVTNKLLATTFKGLTPYLPMHIQFERLTSAQYDAFLAQEVTLPAIWEHDRSQDDYVDGLTKVRDWVSQDPQVLPLRSQNLWTDINDRVVEGGFYYRTAEHSAQQSSERLQSYERMFKNGQLNVLNCSTTMEMGVDIGGISAVVMNNVPPHPANYLQRAGRAGRSKESRAISYTLCKGNPHDQQVFANPLWPFETVIPAPMVAMNSERLVQRHVNSLLLSEYLCHVVGETEKERTSLNSQWFFGEELDQSVCNRFKAWLERPTLSIDNALERLVKGTALHGVTAEKLRDKTQEAIAVLQTRWLGIFRDLVKQESESQPNTPYRRRLELEKKRHCGEYLLRDLAARTFLPGYGFSTDVVTFDNFTMEDYIREKTHKSSDKNDREDNVSRYKGLPSRNLSVAIREYAPGAEIILDGRVFRSAGVSLHWHNLNADTNEAQRLDSAWRCHKCGTLGYEEGIGGSGDLFCTNSACGERITLDNRRQVLQPAGFVTDAHTPVTNNIETMKFIPVVPAWVFVKAERVPLPNPLMGFMASGADGHVFQQSMGEGGHGYALCLSCGRAESMLNATDTPKSMEAHYPPRPGKSDRDSQNQRIICPGSTALNKNVTLGALARTDVFELILRRPQNGEYIPDNSDEGRIVAMTLAVALRRALASVLGVSATELGYAVRPVRLDNEQSVLAVQLYDIISGGAGFASSAPLHIEAVLKGMVKQLGCRHCDTACSECLLDSQTRHDHDQLDRKAAQAWLGEDFSHYIGLPEAEKFSLADAQYCPGSIEDAIRRAINDGARKLTLWMNGPLNEWDLYARQFRTAIQNYRLKDEVEVTLVVPGHIEDPELLQEIAQFAAIGVQLCQSELNTDTPVVAQVAFNDRLMTLISRSPEATIPGPNWHLNSQMVIRSHAFEPITLSKAELLSDAAGSRGLVNDIEIHKQLNGPVSQFGQRFWGVLTGAQEDIQTLLKENQVTRIHYSDRYLQNPVALALLGGLLKPLKSILAQDAQVTIDTLFKSKERPGNKPFHDWMSEADFQDFADQWFAASMGRAVVVNTVGSPRDIPHHRKLMVTFSNGQALKIRFDQGMGYWRIVFARAYRDFDFNDDVAFQLGNMAKACVEGQVVNSEESWATDVLVQVIVP

SEQ ID NO: 26968 - protein, 1099 aa, Salmonella enterica subsp. enterica serovar Paratyphi A; identical to SEQ ID NO: 26764

SEQ ID NO: 26969 - protein, 2106 aa, Salmonella enterica subsp. enterica serovar Paratyphi A; identical to SEQ ID NO: 26763

SEQ ID NO: 26970 - protein, 1099 aa, Salmonella enterica subsp. enterica serovar Paratyphi A; identical to SEQ ID NO: 26764

SEQ ID NO: 26971 - protein, 2106 aa, Salmonella enterica subsp. enterica serovar Paratyphi A; identical to SEQ ID NO: 26763

SEQ ID NO: 26972 - protein, 1099 aa, Salmonella enterica subsp. enterica serovar Paratyphi A; identical to SEQ ID NO: 26764

SEQ ID NO: 26973 - protein, 2106 aa, Salmonella enterica subsp. enterica serovar Paratyphi A; identical to SEQ ID NO: 26763

SEQ ID NO: 26974 - protein, 1099 aa, Salmonella enterica subsp. enterica serovar Paratyphi A; identical to SEQ ID NO: 26764

SEQ ID NO: 26975 - protein, 2106 aa, Salmonella enterica subsp. enterica serovar Paratyphi A; identical to SEQ ID NO: 26763

SEQ ID NO: 26976 - protein, 1099 aa, Salmonella enterica subsp. enterica serovar Paratyphi A; identical to SEQ ID NO: 26764

SEQ ID NO: 26977 - protein, 2106 aa, Salmonella enterica subsp. enterica serovar Paratyphi A; identical to SEQ ID NO: 26763

SEQ ID NO: 26978 - protein, 1099 aa, Salmonella enterica subsp. enterica serovar Paratyphi A; identical to SEQ ID NO: 26764

SEQ ID NO: 26979 - protein, 2106 aa, Salmonella enterica subsp. enterica serovar Paratyphi A
MTTRYFSSLIEQSLSRSTEATLSIMGVTNPNLREHLTQQMAADCGKEGSFLASPVFEQTFGWKESNSTMKDLATKQTLLSKEVVDSLDSEENGRYRFGSDWKPFTHQLASWQSLLEKKHSVVVTSGTGSGKTECFMVPVLEDLYRELQVKNKKPLIGVRALFLYPLNALINSQRERLDAWTRSFGSGIRYCLYNGNTEELHALVKSEQANRPNEVLSREKMREEPAPILVTNGTMLEYMMVRQVDAPIIQKSKAEKSLRWIVLDEAHTYVGSQAAELALQLRRVMTAFGVTPDDVRFVATSATIAGSDAEKQLKKFLSELSGVPQERIDVLGGSRVIPELEPCKQYSLSLDEIEHIPDSESEGISPERYSALTHSPEARCLREMLVSQPRPMKLDTLTQRLNELTKHQYTQQDVLRWIDLCSGTLPNAKDPAFLKVRAHIFQRNTQGIWACVDKNCAAKKNTALEKNWSFGNVYVNQRQNCECGSPVFELAFCNECNEPHLLARDKKGKLVQWDNKGGDEFSLQDEISDDFETSGEKIQKDFVFQPPQIIAAECNTEAGYIMQRLDRQTRSIGVVNPDSIPLAINDIEQICSASNCGYKGGKGKQPFRRALLGGPFYVTNIVPTVLEYCQDFTSDEGKDGVGPLSLPGRGRRLITFTDSRQGTARMAVRMQQEAERSRLRGSVVEILGWHQRKQPTSAPNDQADVMKLVARVTQYREEAREYREWGMPEEAKLSEAQAERLEQAIQTATGGKAATILVCRTWTEMVNDLKEKADIQGPILQYNHYLKPEIFTENGGPLKLAEMLLFREFMRRPKRTNSLETQGLVQVGYQGLEKAHSVPTHWQAKGLTLDDWRDFLKVALDFYVRESNYIQLDDDLRNWIGSRFSSKFVRNPDSKEPDDNQVKRWPQIRHGNVTQRLVKLLILGAKFNTVNTVTIDIVNAWLKEAWLQLTGSLAVLKPDGNRFYLPKEHLTFSLVQKARICPVTNKLLATTFKGLTPYLPMHIQFERLTSAQYDAFLAQEVTLPAIWEHDRSQDDYVDGLTKVRDWVSQDPQVLPLRSQNLWTDINDRVVEGGFYYRTAEHSAQQSSERLQSYERMFKNGQLNVLNCSTTMEMGVDIGGISAVVMNNVPPHPANYLQRAGRAGRSKESRAISYTLCKGNPHDQQVFANPLWPFETVIPAPMVAMNSERLVQRHVNSLLLSEYLCHVVGETEKERTSLNSQWFFGEELDQSVCNRFKAWLERPTLSIDNALERLVKGTALHGVTAEKLRDKTQEAIAVLQTRWLGIFRDLVKQESESQPNTPYRRRLELEKKRHCGEYLLRDLAARTFLPGYGFPTDVVTFDNFTMEDYIREKTHKSSDKNDREDNVSRYKGLPSRNLSVAIREYAPGAEIILDGRVFRSAGVSLHWHNLNADTNEAQRLDSAWRCHKCGTLGYEEGIGGSGDLFCTNSACGERITLDNRRQVLQPAGFVTDAHTPVTNNIETMKFIPVVPAWVFVKAERVPLPNPLMGFMASGADGHVFQQSMGEGGHGYALCLSCGRAESMLNATDTPKSMEAHYPPRPGKSDRDSQNQRIICPGSTALNKNVTLGALARTDVFELILRRPQNGEYIPDNSDEGRIVAMTLAVALRRALASVLGVSATELGYAVRPVRLDNEQSVLAVQLYDIISGGAGFASSAPLHIEAVLKGMVKQLGCRHCDTACSECLLDSQTRHDHDQLDRKAAQAWLGEDFSHYIGLPEAEKFSLADAQYCPGSIEDAIRRAINDGARKLTLWMNGPLNEWDLYARQFRTAIQNYRLKDEVEVTLVVPGHIEDPELLQEIAQFAAIGVQLCQSELNTDTPVVAQVAFNDRLMTLISRSPEATIPGPNWHLNSQMVIRSHAFEPITLSKAELLSDAAGSRGLVNDIEIHKQLNGPVSQFGQRFWGVLTGAQEDIQTLLKENQVTRIHYSDRYLQNPVALALLGGLLKPLKSILAQDAQVTIDTLFKSKERPGNKPFHDWMSEADFQDFADQWFAASMGRAVVVNTVGSPRDIPHHRKLMVTFSNGQALKIRFDQGMGYWRIVFARAYRDFDFNDDVAFQLGNMAKACVEGQVVNSEESWATDVLVQVIVP

SEQ ID NO: 26980 - protein, 1099 aa, Salmonella enterica subsp. enterica serovar Paratyphi A; identical to SEQ ID NO: 26764

SEQ ID NO: 26981 - protein, 2106 aa, Salmonella enterica subsp. enterica serovar Paratyphi A; identical to SEQ ID NO: 26763

SEQ ID NO: 26982 - protein, 1099 aa, Salmonella enterica subsp. enterica serovar Paratyphi A; identical to SEQ ID NO: 26764

SEQ ID NO: 26983 - protein, 2106 aa, Salmonella enterica subsp. enterica serovar Paratyphi A; identical to SEQ ID NO: 26763

SEQ ID NO: 26984 - protein, 1099 aa, Salmonella enterica subsp. enterica serovar Paratyphi A; identical to SEQ ID NO: 26764

SEQ ID NO: 26985 - protein, 2106 aa, Salmonella enterica subsp. enterica serovar Paratyphi A; identical to SEQ ID NO: 26763

SEQ ID NO: 26986 - protein, 1099 aa, Salmonella enterica subsp. enterica serovar Paratyphi A; identical to SEQ ID NO: 26764

SEQ ID NO: 26987 - protein, 2106 aa, Salmonella enterica subsp. enterica serovar Paratyphi A
MTTRYFSSLIEQSLSRSTEATLSIMGVTNPNLREHLTQQMAADCGKEGSFLASPVFEQTFGWKESNSTMKDLATKQTLLSKEVVDSLDSEENGRYRFGSDWKPFTHQLASWQSLLEKKHSVVVTSGTGSGKTECFMVPVLEDLYRELQVKNKKPLIGVRALFLYPLNALINSQRERLDAWTRSFGSGIRYCLYNGNTEELHALVKSEQANRPNEVLSREKMREEPAPILVTNGTMLEYMMVRQVDAPIIQKSKAEKSLRWIVLDEAHTYVGSQAAELALQLRRVMTAFGVTPDDVRFVATSATIAGSDAEKQLKKFLSELSGVPQERIDVLGGSRVIPELEPCKQYSLSLDEIEHIPDSESEGISPERYSALTHSPEARCLREMLVSQPRPMKLDTLTQRLNELTKHQYTQQDVLRWIDLCSGTLPNAKDPAFLKVRAHIFQRNTQGIWACVDKNCAAKKNTALEKNWSFGNVYVNQRQNCECGSPVFELAFCNECNEPHLLARDKKGKLVQWDNKGGDEFSLQDEISDDFETSGEKIQKDFVFQSPQIIAAECNTEAGYIMQRLDRQTRSIGVVNPDSIPLAINDIEQICSASNCGYKGGKGKQPFRRALLGGPFYVTNIVPTVLEYCQDFTSDEGKDGVGPLSLPGRGRRLITFTDSRQGTARMAVRMQQEAERSRLRGSVVEILGWHQRKQPTSAPNDQADVMKLVARVTQYREEAREYREWGMPEEAKLSEAQAERLEQAIQTATGGKAATILVCRTWTEMVNDLKEKADIQGPILQYNHYLKPEIFTENGGPLKLAEMLLFREFMRRPKRTNSLETQGLVQVGYQGLEKAHSVPTHWQAKGLTLDDWRDFLKVALDFYVRESNYIQLDDDLRNWIGSRFSSKFVRNPDSKEPDDNQVKRWPQIRHGNVTQRLVKLLILGAKFNTVNTVTIDIVNAWLKEAWLQLTGSLAVLKPDGNRFYLPKEHLTFSLVQKARICPVTNKLLATTFKGLTPYLPMHIQFERLTSAQYDAFLAQEVTLPAIWEHDRSQDDYVDGLTKVRDWVSQDPQVLPLRSQNLWTDINDRVVEGGFYYRTAEHSAQQSSERLQSYERMFKNGQLNVLNCSTTMEMGVDIGGISAVVMNNVPPHPANYLQRAGRAGRSKESRAISYTLCKGNPHDQQVFANPLWPFETVIPAPMVAMNSERLVQRHVNSLLLSEYLCHVVGETEKERTSLNSQWFFGEELDQSVCNRFKAWLERPTLSIDNALERLVKGTALHGVTAEKLRDKTQEAIAVLQTRWLGIFRDLVKQESESQPNTPYRRRLELEKKRHCGEYLLRDLAARTFLPGYGFPTDVVTFDNFTMEDYIREKTHKSSDKNDREDNVSRYKGLPSRNLSVAIREYAPGAEIILDGRVFRSAGVSLHWHNLNADTNEAQRLDSAWRCHKCGTLGYEEGIGGSGDLFCTNSACGERITLDNRRQVLQPAGFVTDAHTPVTNNIETMKFIPVVPAWVFVKAERVPLPNPLMGFMASGADGHVFQQSMGEGGHGYALCLSCGRAESMLNATDTPKSMEAHYPPRPGKSDRDSQNQRIICPGSTALNKNVTLGALARTDVFELILRRPQNGEYIPDNSDEGRIVAMTLAVALRRALASVLGVSATELGYAVRPVRLDNEQSVLAVQLYDIISGGAGFASSAPLHIEAVLKGMVKQLGCRHCDTACSECLLDSQTRHDHDQLDRKAAQAWLGEDFSHYIGLPEAEKFSLADAQYCPGSIEDAIRRAINDGARKLTLWMNGPLNEWDLYARQFRTAIQNYRLKDEVKVTLVVPGHIEDPELLQEIAQFAAIGVQLCQSELNTDTPVVAQVAFNDRLMTLISRSPEATIPGPNWHLNSQMVIRSHAFEPITLSKAELLSDAAGSRGLVNDIEIHKQLNGPVSQFGQRFWGVLTGAQEDIQTLLKENQVTRIHYSDRYLQNPVALALLGGLLKPLKSILAQDAQVTIDTLFKSKERPGNKPFHDWMSEADFQDFADQWFAASMGRAVVVNTVGSPRDIPHHRKLMVTFSNGQALKIRFDQGMGYWRIVFARAYRDFDFNDDVAFQLGNMAKACVEGQVVNSEESWATDVLVQVIVP

SEQ ID NO: 26988 - protein, 1099 aa, Salmonella enterica subsp. enterica serovar Paratyphi A; identical to SEQ ID NO: 26764

SEQ ID NO: 26989 - protein, 2106 aa, Salmonella enterica subsp. enterica serovar Paratyphi A; identical to SEQ ID NO: 26763

SEQ ID NO: 26990 - protein, 1099 aa, Salmonella enterica subsp. enterica serovar Paratyphi A; identical to SEQ ID NO: 26764

SEQ ID NO: 26991 - protein, 2106 aa, Salmonella enterica subsp. enterica serovar Paratyphi A; identical to SEQ ID NO: 26763

SEQ ID NO: 26992 - protein, 1099 aa, Salmonella enterica subsp. enterica serovar Paratyphi A; identical to SEQ ID NO: 26764

SEQ ID NO: 26993 - protein, 2106 aa, Salmonella enterica subsp. enterica serovar Paratyphi A; identical to SEQ ID NO: 26763

SEQ ID NO: 26994 - protein, 1099 aa, Salmonella enterica subsp. enterica serovar Paratyphi A; identical to SEQ ID NO: 26764

SEQ ID NO: 26995 - protein, 2106 aa, Salmonella enterica subsp. enterica serovar Paratyphi A; identical to SEQ ID NO: 26763

SEQ ID NO: 26996 - protein, 1099 aa, Salmonella enterica subsp. enterica serovar Paratyphi A; identical to SEQ ID NO: 26764

SEQ ID NO: 26997 - protein, 2106 aa, Salmonella enterica subsp. enterica serovar Paratyphi A; identical to SEQ ID NO: 26763

SEQ ID NO: 26998 - protein, 1099 aa, Salmonella enterica subsp. enterica serovar Paratyphi A; identical to SEQ ID NO: 26764

SEQ ID NO: 26999 - protein, 2106 aa, Salmonella enterica subsp. enterica serovar Paratyphi A; identical to SEQ ID NO: 26763

SEQ ID NO: 27000 - protein, 1099 aa, Salmonella enterica subsp. enterica serovar Paratyphi A; identical to SEQ ID NO: 26764

SEQ ID NO: 27001 - protein, 2106 aa, Salmonella enterica subsp. enterica serovar Paratyphi A; identical to SEQ ID NO: 26763

SEQ ID NO: 27002 - protein, 1099 aa, Salmonella enterica subsp. enterica serovar Paratyphi A; identical to SEQ ID NO: 26764

SEQ ID NO: 27003 - protein, 2106 aa, Salmonella enterica subsp. enterica serovar Paratyphi A; identical to SEQ ID NO: 26763

SEQ ID NO: 27004 - protein, 1099 aa, Salmonella enterica subsp. enterica serovar Paratyphi A; identical to SEQ ID NO: 26764

SEQ ID NO: 27005 - protein, 2106 aa, Salmonella enterica subsp. enterica serovar Paratyphi A; identical to SEQ ID NO: 26763

SEQ ID NO: 27006 - protein, 1099 aa, Salmonella enterica subsp. enterica serovar Paratyphi A; identical to SEQ ID NO: 26764

SEQ ID NO: 27007 - protein, 2106 aa, Salmonella enterica subsp. enterica serovar Paratyphi A; identical to SEQ ID NO: 26763

SEQ ID NO: 27008 - protein, 1099 aa, Salmonella enterica subsp. enterica serovar Paratyphi A; identical to SEQ ID NO: 26764

SEQ ID NO: 27009 - protein, 2106 aa, Salmonella enterica subsp. enterica serovar Paratyphi A; identical to SEQ ID NO: 26763

SEQ ID NO: 27010 - protein, 1099 aa, Salmonella enterica subsp. enterica serovar Paratyphi A; identical to SEQ ID NO: 26764

SEQ ID NO: 27011 - protein, 2106 aa, Salmonella enterica subsp. enterica serovar Paratyphi A; identical to SEQ ID NO: 26763

SEQ ID NO: 27012 - protein, 1099 aa, Salmonella enterica subsp. enterica serovar Paratyphi A; identical to SEQ ID NO: 26764

SEQ ID NO: 27013 - protein, 2106 aa, Salmonella enterica subsp. enterica serovar Paratyphi A; identical to SEQ ID NO: 26763

SEQ ID NO: 27014 - protein, 1099 aa, Salmonella enterica subsp. enterica serovar Paratyphi A; identical to SEQ ID NO: 26764

SEQ ID NO: 27015 - protein, 2106 aa, Salmonella enterica subsp. enterica serovar Paratyphi A; identical to SEQ ID NO: 26763

SEQ ID NO: 27016 - protein, 1099 aa, Salmonella enterica subsp. enterica serovar Paratyphi A; identical to SEQ ID NO: 26764

SEQ ID NO: 27017 - protein, 2106 aa, Salmonella enterica subsp. enterica serovar Paratyphi A; identical to SEQ ID NO: 26763

SEQ ID NO: 27018 - protein, 1099 aa, Salmonella enterica subsp. enterica serovar Paratyphi A; identical to SEQ ID NO: 26764

SEQ ID NO: 27019 - protein, 2106 aa, Salmonella enterica subsp. enterica serovar Paratyphi A; identical to SEQ ID NO: 26763

SEQ ID NO: 27020 - protein, 1099 aa, Salmonella enterica subsp. enterica serovar Paratyphi A; identical to SEQ ID NO: 26764

SEQ ID NO: 27021 - protein, 2106 aa, Salmonella enterica subsp. enterica serovar Paratyphi A; identical to SEQ ID NO: 26763

SEQ ID NO: 27022 - protein, 1099 aa, Salmonella enterica subsp. enterica serovar Paratyphi A; identical to SEQ ID NO: 26764

SEQ ID NO: 27023 - protein, 2106 aa, Salmonella enterica; identical to SEQ ID NO: 26763
  subsp. enterica serovar Paratyphi A str. AKU_12601

SEQ ID NO: 27024 - protein, 1099 aa, Salmonella enterica; identical to SEQ ID NO: 26764
  subsp. enterica serovar Paratyphi A str. AKU_12601

SEQ ID NO: 27025 - protein, 2106 aa, Salmonella enterica; identical to SEQ ID NO: 26763
  subsp. enterica serovar Paratyphi A str. ATCC 11511

SEQ ID NO: 27026 - protein, 1099 aa, Salmonella enterica; identical to SEQ ID NO: 26764
  subsp. enterica serovar Paratyphi A str. ATCC 11511

SEQ ID NO: 27027 - protein, 2106 aa, Salmonella enterica; identical to SEQ ID NO: 26763
  subsp. enterica serovar Paratyphi A str. ATCC 9150

SEQ ID NO: 27028 - protein, 1099 aa, Salmonella enterica; identical to SEQ ID NO: 26764
  subsp. enterica serovar Paratyphi A str. ATCC 9150

SEQ ID NO: 27029 - protein, 2106 aa, Salmonella enterica
  subsp. enterica serovar Paratyphi A str. GXS2268
MTTRYFSSLIEQSLSRSTEATLSIMGVTNPNLREHLTQQMAADCGKEGSFLASPVFEQTFGWKESNSTMKDLATKQTLLSKEVVDSLDSEENGRYRFGSDWKPFTHQLASWQSLLEKKHSVVVTSGTGSGKTECFMVPVLEDLYRELQVKNKKPLIGVRALFLYPLNALINSQRERLDAWTRSFGSGIRYCLYNGNTEELHALVKSEQANRPNEVLSREKMREEPAPILVTNGTMLEYMMVRQVDAPIIQKSKAEKSLRWIVLDEAHTYVGSQAAELALQLRRVMTAFGVTPDDVRFVATSATIAGSDAEKQLKKFLSELSGVPQERIDVLGGSRVIPELEPCKQYSLSLDEIEHIPDSESEGISPERYSALTHSPEARCLREMLVSQPRPMKLDTLTQRLNELTKHQYTQQDVLRWIDLCSGTLPNAKDPAFLKVRAHIFQRNTQGIWACVDKNCAAKKNTALEKNWSFGNVYVNQRQNGECGSPVFELAFFNECNEPHLLARDKKGKLVQWDNKGGDEFSLQDEISDDFETSGEKIQKDFVFQSPQIIAAECNTEAGYIMQRLDRQTRSIGVVNPDSIPLAINDIEQICSASNCGYKGGKGKQPFRRALLGGPFYVTNIVPTVLEYCQDFTSDEGKDGVGPLSLPGRGRRLITFTDSRQGTARMAVRMQQEAERSRLRGSVVEILGWHKRKQPTSAPNDQADVMKLVARVTQYREEAREYREWGMPEEAKLSEAQAERLEQAIQTATGGKAATILVCRTWTEMVNDLKEKADIQGPILQYNHYLKPEIFTENGGPLKLAEMLLFREFMRRPKRTNSLETQGLVQVGYQGLEKAHSVPTHWQAKGLTLDDWRDFLKVALDFYVRESNYIQLDDDLRNWIGSRFSSKFVRNPDSKEPDDNQVKRWPQIRHGNVTQRLVKLLILGAKFNTVNTVTIDIVNAWLKEAWLQLTGSLAVLKPDGNRFYLPKEHLTFSLVQKARICPVTNKLLATTFKGLTPYLPMHIQFERLTSAQYDAFLAQEVTLPAIWEHDRSQDDYVDGLTKVRDWVSQDPQVLPLRSQNLWTDINDRVVEGGFYYRTAEHSAQQSSERLQSYERMFKNGQLNVLNCSTTMEMGVDIGGISAVVMNNVPPHPANYLQRAGRAGRSKESRAISYTLCKGNPHDQQVFANPLWPFETVIPAPMVAMNSERLVQRHVNSLLLSEYLCHVVGETEKERTSLNSQWFFGEELDQSVCNRFKAWLERPTLSIDNALERLVKGTALHGVTAEKLRDKTQEAIAVLQTRWLGIFRDLVKQESESQPNTPYRRRLELEKKRHCGEYLLRDLAARTFLPGYGFPTDVVTFDNFTMEDYIREKTHKSSDKNDREDNVSRYKGLPSRNLSVAIREYAPGAEIILDGRVFRSAGVSLHWHNLNADTNEAQRLDSAWRCHKCGTLGYEEGIGGSGDLFCTNSACGERITLDNRRQVLQPAGFVTDAHTPVTNNIETMKFIPVVPAWVFVKAERVPLPNPLMGFMASGADGHVFQQSMGEGGHGYALCLSCGRAESMLNATDTPKSMEAHYPPRPGKSDRDSQNQRIICPGSTALNKNVTLGALARTDVFELILRRPQNGEYIPDNSDEGRIVAMTLAVALRRALASVLGVSATELGYAVRPVRLDNEQSVLAVQLYDIISGGAGFASSAPLHIEAVLKGMVKQLGCRHCDTACSECLLDSQTRHDHDQLDRKAAQAWLGEDFSHYIGLPEAEKFSLADAQYCPGSIEDAIRRAINDGARKLTLWMNGPLNEWDLYARQFRTAIQNYRLKDEVEVTLVVPGHIEDPELLQEIAQFAAIGVQLCQSELNTDTPVVAQVAFNDRLMTLISRSPEATIPGPNWHLNSQMVIRSHAFEPITLSKAELLSDAAGSRGLVNDIEIHKQLNGPVSQFGQRFWGVLTGAQEDIQTLLKENQVTRIHYSDRYLQNPVALALLGGLLKPLKSILAQDAQVTIDTLFKSKERPGNKPFHDWMSEADFQDFADQWFAASMGRAVVVNTVGSPRDIPHHRKLMVTFSNGQALKIRFDQGMGYWRIVFARAYRDFDFNDDVAFQLGNMAKACVEGQVVNSEESWATDVLVQVIVP

SEQ ID NO: 27030 - protein, 1099 aa, Salmonella enterica
  subsp. enterica serovar Paratyphi A str. GXS2268
MSQSEYTSILKCTPWLAKFLTRRGLKQPDHRPLYEYHATSEEYDELKRLLRAIGVPDGYKSDKGYAACFTLFCSEWYRRDYEREYGWAWEPIYKTIGISASSSEMGKIIPKGLDGYWGRPVRFYDTERRNFLGSLFSEGGLPFSLLKESNSRFQSMFSLILNQYDQAKSSNISTFALVHAAVEKSSLPVVFKEDTSVELISRMAEQLVSLVQIYNLSNHTEPVKELERVHPKWRDSFPVPLDDDTGTSFLNGLLRTASTESKPRLQKNKTTLCQFLWSENHPEALQALISLPEELSFSIDIEPSTTRFELAIYEDGNEIASLGPAYATLSNSQAKIKVRKREIKFYRRNPTVSLFIVARAGGMFFGSNLLEGSEVAVGDVPLVFVSDKNEWLLQGQASCSVRGSHVLIVLPKDGCLASEHEDCDSGFSALGCHALTIKGRQDIIIKGDETYRIKIGRDQIIHTGFSFQGKRLNWTSYPDELFLGVPGITQHSENLSTRHYKRFFNGTFIENCDVQEKMGAQFISVRNENDETLLRKKIGILPNDFSLEIKNGQQANEGSVIITTQHPCLYSLKEKTLEVGRKRLPGSTEIMMKAEGIPPASISLQITPNLTANPIVIWLPFPARGCLAFDKDEKPLPKNLTINDLLGARAYLFGKNGEPTRYQLELRLRSRSGMQAWYEWHYSAGECPVELTLYSLREHIDNLLSLEEGIDQTVDMRIKGGGSSFTWQIRRYKYSLDYDRGRQILLANSISNRTGQIPSPVIMLLSEPERKVVLLTSRMSEGVPVGEFELSSIIQKNGPWLVLPKPGEEASFRPCFIAGEPVIQSDATAIQSLQKATQLFNPRSDVNTIMLVLEQMASDPAHSGWQFLRNLYDQFGYLPLATFEVWRALVQHPQALAMSLFKFEMSIDYLSRIESEFPVFWEFLSITKVKRSATRFRAFLTHKGAPEEMQIRLLDRMYQQLGTTFPTYASEVQLWLSQGKLPPVFPELTMKGIILEWYQELLREHGESRWPEFGGPGLLRWYMSQQNPVIDISPDASYRYSVTLLPVFAAAVASGKTTFESVFENKPGAVFFLRQVRDFDSRWFNAIFQYCLLRNVTEK

SEQ ID NO: 27031 - protein, 2106 aa, Salmonella enterica; identical to SEQ ID NO: 26763
  subsp. enterica serovar Paratyphi A str. GZ9A00052

SEQ ID NO: 27032 - protein, 1099 aa, Salmonella enterica
  subsp. enterica serovar Paratyphi A str. GZ9A00052
MSQSEYTSILKCTPWLAKFLTRRGLKQPDHRPLYEYHATSEEYDELKRLLRAIGVPDGYKSDKGYAACFTLFCSEWYRRDYEREYGWAWEPIYKTIGISASSSEMGKIIPKGLDGYWGRPVRFYDTERRNFLGSLFSEGGLPFRLLKESNSRFQSMFSLILNQYDQAKSSNISTFALVHAAVEKSSLPVVFKEDTSVELISRMAEQLVSLVQIYNLSNHTEPVKELERVHPKWRDSFPVPLDDDTGTSFLNGLLRTASTESKPRLQKNKTTLCQFLWSENHPEALQALISLPEELSFSIDIEPSTTRFELAIYEDGNEIASLGPAYATLSNSQAKIKVRKREIKFYRRNPTVSLFIVARAGGMFFGSNLLEGSEVAVGDVPLVFVSDKNEWLLQGQASCSVRGSHVLIVLPKDGCLASEHEDCDSGFSALGCHALTIKGRQDIIIKGDETYRIKIGRDQIIHTGFSFQGKRLNWTSYPDELFLGVPGITQHSENLSTRHYKRFFNGTFIENCDVQEKMGAQFISVRNENDETLLRKKIGILPNDFSLEIKNGQQANEGSVIITTQHPCLYSLKEKTLEVGRKRLPGSTEIMMKAEGIPPASISLQITPNLTANPIVIWLPFPARGCLAFDKDEKPLPKNLTINDLLGARAYLFGKNGEPTRYQLELRLRSRSGMQAWYEWHYSAGECPVELTLYSLREHIDNLLSLEEGIDQTVDMRIKGGGSSFTWQIRRYKYSLDYDRGRQILLANSISNRTGQIPSPVIMLLSEPERKVVLLTSRMSEGVPVGEFELSSIIQKNGPWLVLPKPGEEASFRPCFIAGEPVIQSDATAIQSLQKATQLFNPRSDVNTIMLVLEQMASDPAHSGWQFLRNLYDQFGYLPLATFEVWRGPVQHPQAVAMSLFKFEMSIDYLSRIESEFPVFWEFLSITKVKRSATRFRAFLTHKGAPEEMQIRLLDRMYQQLGTTFPTYASEVQLWLSQGKLPPVFPELTMKGIILEWYQELLREHGESRWPEFGGPGLLRWYMSQQNPVIDISPDASYRYSVTLLPVFAAAVASGKTTFESVFENKPGAVFFLRQVRDFDSRWFNAIFQYCLLRNVTEK

SEQ ID NO: 27033 - protein, 2106 aa, Salmonella enterica
  subsp. enterica serovar Paratyphi A str. JX05-19
MTTRYFSSLIEQSLSRSTEATLSIMGVTNPNLREHLTQQMAADCGKEGSFLASPVFEQTFGWKESNSTMKDLATKQTLLSKEVVDSLDSEENGRYRFGSDWKPFTHQLASWQSLLEKKHSVVVTSGTGSGKTECFMVPVLEDLYRELQVKNKKPLIGVRALFLYPLNALINSQRERLDAWTRSFGSGIRYCLYNGNTEELHALVKSEQANRPNEVLSREKMREEPAPILVTNGTMLEYMMVRQVDAPIIQKSKAEKSLRWIVLDEAHTYVGSQAAELALQLRRVMTAFGVTPDDVRFVATSATIAGSDAEKQLKKFLSELSGVPQERIDVLGGSRVIPELEPCKQYSLSLDEIEHIPDSESEGISPERYSALTHSPEARCLREMLVSQPRPMKLDTLTQRLNELTKHQYTQQDVLRWIDLCSGTLPNAKDPAFLKVRAHIFQRNTQGIWACVDKNCAAKKNTALEKNWSFGNVYVNQRQNCECGSPVFELAFCNECNEPHLLARDKKGKLVQWDNKGGDEFSLQDEISDDFETSGEKIQKDFVFQSPQIIAAECNTEAGYIMQRLDRQTRSIGVVNPDSIPLAINDIEQICSASNCGYKGGKGKQPFRRALLGGPFYVTNIVPTVLEYCQDFTSDEGKDGVGPLSLPGRGRRLITFTDSRQGTARMAVRMQQEAERSRLRGSVVEILCWPQRKQPTSAPNDQADVMKLVARVTQYREEAREYREWGMPEEAKLSEAQAERLEQAIQTATGGKAATILVCRTWTEMVNDLKEKADIQGPILQYNHYLKPEIFTENGGPLKLAEMLLFREFMRRPKRTNSLETQGLVQVGYQGLEKAHSVPTHWQAKGLTLDDWRDFLKVALDFYVRESNYIQLDDDLRNWIGSRFSSKFVRNPDSKEPDDNQVKRWPQIRHGNVTQRLVKLLILGAKFNTVNTVTIDIVNAWLKEAWLQLTGSLAVLKPDGNRFYLPKEHLTFSLVQKARICPVTNKLLATTFKGLTPYLPMHIQFERLTSAQYDAFLAQEVTLPAIWEHDRSQDDYVDGLTKVRDWVSQDPQVLPLRSQNLWTDINDRVVEGGFYYRTAEHSAQQSSERLQSYERMFKNGQLNVLNCSTTMEMGVDIGGISAVVMNNVPPHPANYLQRAGRAGRSKESRAISYTLCKGNPHDQQVFANPLWPFETVIPAPMVAMNSERLVQRHVNSLLLSEYLCHVVGETEKERTSLNSQWFFGEELDQSVCNRFKAWLERPTLSIDNALERLVKGTALHGVTAEKLRDKTQEAIAVLQTRWLGIFRDLVKQESESQPNTPYRRRLELEKKRHCGEYLLRDLAARTFLPGYGFPTDVVTFDNFTMEDYIREKTHKSSDKNDREDNVSRYKGLPSRNLSVAIREYAPGAEIILDGRVFRSAGVSLHWHNLNADTNEAQRLDSAWRCHKCGTLGYEEGIGGSGDLFCTNSACGERITLDNRRQVLQPAGFVTDAHTPVTNNIETMKFIPVVPAWVFVKAERVPLPNPLMGFMASGADGHVFQQSMGEGGHGYALCLSCGRAESMLNATDTPKSMEAHYPPRPGKSDRDSQNQRIICPGSTALNKNVTLGALARTDVFELILRRPQNGEYIPDNSDEGRIVAMTLAVALRRALASVLGVSATELGYAVRPVRLDNEQSVLAVQLYDIISGGAGFASSAPLHIEAVLKGMVKQLGCRHCDTACSECLLDSQTRHDHDQLDRKAAQAWLGEDFSHYIGLPEAEKFSLADAQYCPGSIEDAIRRAINDGARKLTLWMNGPLNEWDLYARQFRTAIQNYRLKDEVEVTLVVPGHIEDPELLQEIAQFAAIGVQLCQSELNTDTPVVAQVAFNDRLMTLISRSPEATIPGPNWHLNSQMVIRSHAFEPITLSKAELLSDAAGSRGLVNDIEIHKQLNGPVSQFGQRFWGVLTGAQEDIQTLLKENQVTRIHYSDRYLQNPVALALLGGLLKPLKSILAQDAQVTIDTLFKSKERPGNKPFHDWMSEADFQDFADQWFAASMGRAVVVNTVGSPRDIPHHRKLMVTFSNGQALKIRFDQGMGYWRIVFARAYRDFDFNDDVAFQLGNMAKACVEGQVVNSEESWATDVLVQVIVP

SEQ ID NO: 27034 - protein, 1099 aa, Salmonella enterica; identical to SEQ ID NO: 26764
  subsp. enterica serovar Paratyphi A str. JX05-19

SEQ ID NO: 27035 - protein, 2106 aa, Salmonella enterica
  subsp. enterica serovar Paratyphi A str. SA19950809
MTTRYFSSLIEQSLSRSTEATLSIMGVTNPNLREHLTQQMAADCGKEGSFLASPVFEQTFGWKESNSTMKDLATKQTLLSKEVVDSLDSEENGRYRFGSDWKPFTHQLASWQSLLEKKHSVVVTSGTGSGKTECFMVPVLEDLYRELQVKNKKPLIGVRALFLYPLNALINSQRERLDAWTRSFGSGIRYCLYNGNTEELHALVKSEQANRPNEVLSREKMREEPAPILVTNGTMLEYMMVRQVDAPIIQKSKAEKSLRWIVLDEAHTYVGSQAAELALQLRRVMTAFGVTPDDVRFVATSATIAGSDAEKQLKKFLSELSGVPQERIDVLGGSRVIPELEPCKQYSLSLDEIEHIPDSESEGISPERYSALTHSPEARCLREMLVSQPRPMKLDTPTQRLNELTKHQYTQQDVLRWIDLCSGTLPNAKDPAFLKVRAHIFQRNTQGIWACVDKNCAAKKNTALEKNWSFGNVYVNQRQNCECGSPVFELAFCNECNEPHLLARDKKGKLVQWDNKGGDEFSLQDEISDDFETSGEKIQKDFVFQSPQIIAAECNTEAGYIMQRLDRQTRSIGVVNPDSIPLAINDIEQICSASNCGYKGGKGKQPFRRALLGGPFYVTNIVPTVLEYCQDFTSDEGKDGVGPLSLPGRGRRLITFTDSRQGTARMAVRMQQEAERSRLRGSVVEILGWHQRKQPTSAPNDQADVMKLVARVTQYREEAREYREWGMPEEAKLSEAQAERLEQAIQTATGGKAATILVCRTWTEMVNDLKEKADIQGPILQYNHYLKPEIFTENGGPLKLAEMLLFREFMRRPKRTNSLETQGLVQVGYQGLEKAHSVPTHWQAKGLTLDDWRDFLKVALDFYVRESNYIQLDDDLRNWIGSRFSSKFVRNPDSKEPDDNQVKRWPQIRHGNVTQRLVKLLILGAKFNTVNTVTIDIVNAWLKEAWLQLTGSLAVLKPDGNRFYLPKEHLTFSLVQKARICPVTNKLLATTFKGLTPYLPMHIQFERLTSAQYDAFLAQEVTLPAIWEHDRSQDDYVDGLTKVRDWVSQDPQVLPLRSQNLWTDINDRVVEGGFYYRTAEHSAQQSSERLQSYERMFKNGQLNVLNCSTTMEMGVDIGGISAVVMNNVPPHPANYLQRAGRAGRSKESRAISYTLCKGNPHDQQVFANPLWPFETVIPAPMVAMNSERLVQRHVNSLLLSEYLCHVVGETEKERTSLNSQWFFGEELDQSVCNRFKAWLERPTLSIDNALERLVKGTALHGVTAEKLRDKTQEAIAVLQTRWLGIFRDLVKQESESQPNTPYRRRLELEKKRHCGEYLLRDLAARTFLPGYGFPTDVVTFDNFTMEDYIREKTHKSSDKNDREDNVSRYKGLPSRNLSVAIREYAPGAEIILDGRVFRSAGVSLHWHNLNADTNEAQRLDSAWRCHKCGTLGYEEGIGGSGDLFCTNSACGERITLDNRRQVLQPAGFVTDAHTPVTNNIETMKFIPVVPAWVFVKAERVPLPNPLMGFMASGADGHVFQQSMGEGGHGYALCLSCGRAESMLNATDTPKSMEAHYPPRPGKSDRDSQNQRIICPGSTALNKNVTLGALARTDVFELILRRPQNGEYIPDNSDEGRIVAMTLAVALRRALASVLGVSATELGYAVRPVRLDNEQSVLAVQLYDIISGGAGFASSAPLHIEAVLKGMVKQLGCRHCDTACSECLLDSQTRHDHDQLDRKAAQAWLGEDFSHYIGLPEAEKFSLADAQYCPGSIEDAIRRAINDGARKLTLWMNGPLNEWDLYARQFRTAIQNYRLKDEVEVTLVVPGHIEDPELLQEIAQFAAIGVQLCQSELNTDTPVVAQVAFNDRLMTLISRSPEATIPGPNWHLNSQMVIRSHAFEPITLSKAELLSDAAGSRGLVNDIEIHKQLNGPVSQFGQRFWGVLTGAQEDIQTLLKENQVTRIHYSDRYLQNPVALALLGGLLKPLKSILAQDAQVTIDTLFKSKERPGNKPFHDWMSEADFQDFADQWFAASMGRAVVVNTVGSPRDIPHHRKLMVTFSNGQALKIRFDQGMGYWRIVFARAYRDFDFNDDVAFQLGNMAKACVEGQVVNSEESWATDVLVQVIVP

SEQ ID NO: 27036 - protein, 1099 aa, Salmonella enterica; identical to SEQ ID NO: 26764
  subsp. enterica serovar Paratyphi A str. SA19950809

SEQ ID NO: 27037 - protein, 2106 aa, Salmonella enterica subsp. enterica serovar Rissen str. 150; identical to SEQ ID NO: 26761

SEQ ID NO: 27038 - protein, 1099 aa, Salmonella enterica subsp. enterica serovar Rissen str. 150; identical to SEQ ID NO: 26762

SEQ ID NO: 27039 - protein, 2106 aa, Salmonella enterica
  subsp. enterica serovar Senftenberg str. A4-543
MTTRYFSSLIEQSLSRSTEATLSIMGVTNPNLREHLTQQMAADCGKEGSFLASPVFEQTFGWKESNSTMKDLATKQTLLSKEVVDSLDSEENGRYRFGSDWKPFTHQLASWQSLLEKKHSVVVTSGTGSGKTECFMVPVLEDLYRELQVKNKKPLIGVRALFLYPLNALINSQRERLDAWTRSFGSGIRYCLYNGNTEELHALVKSEQANRPNEVLSREKMREEPAPILVTNGTMLEYMMVRQVDAPIIQKSKAEKSLRWIVLDEAHTYVGSQAAELALQLRRVMTAFGVTPDDVRFVATSATMAGSDAEKQLKKFLSELSGVPQERIDVLGGSRVIPELEPCKQYSLSLDEIEHIPDSESEGISPERYSALTHSPEARCLREMLVSQPRPMKLDTLTQRLNELTKHQYTQQDVLRWIDLCSGTLPNAKDPAFLKVRAHIFQRNTQGIWACVDKNCAAKKNTALEKNWSFGNVYVNQRQNCECGSPVFELAFCNECNEPHLLARDKKGKLVQWDNKGGDEFSLQDEISDDFETSGEKVQKDFVFQSPQIIAAECNTEAGYIMQRLDRQTRSIGVVNPDSIPLAINDIEQICSASNCGYKGGKGKQPFRRALLGGPFYVTNIVPTVLEYCQDFTSDEGKDGVGPLSLPGRGRRLITFTDSRQGTARMAVRMQQEAERSRLRGSVVEILGWHQRKQPTSAPNDQADVMKLVARVTQYREEAREYREWGMPEEAKLSEAQAERLEQAIQTATGGKAATILVCRTWTEMVNELKEKADIQGPILQYNHYLKPEIFTENGGPLKLAEMLLFREFMRRPKRTNSLETQGLVQVGYQGLEKAHSVPAHWQAKGLTLDDWRDFLKVTLDFYVRESNYIQLDDDLRNWIGSRFSSKFVRNPDSKEPDDNQVKRWPQIRHGNVTQRLVKLLILGAKFNTVNTVTIDIVNAWLKEAWLQLTGSLAVLKPDGNRFYLPKEHLTFSLVQKARICPVTNKLLATTFKGLTPYLPMHIQFERLTSAQYDAFLAQEVTLPAIWEHDRSQDDYVDGLTKVRDWVSLDPQVLSLRSQNLWTDINDRVVEGGFYYRTAEHSAQQSSERLQSYERMFKNGQLNVLNCSTTMEMGVDIGGISAVVMNNVPPHPANYLQRAGRAGRSKESRAISYTLCKGNPHDQQVFANPLWPFETVIPAPMVAMNSERLVQRHVNSLLLSEYLCHVVGETEKERTSLNSQWFFGEELDQSVCNRFKAWLERPTLSIDNALERLVKGTALHGVTAEKLRDKTQEAIAVLQTRWLGIFRDLVKQESESQPNTPYRRRLELEKKRHCGEYLLRDLAARTFLPGYGFPTDVVTFDNFTMEDYIREKTHKGRDKNDREDNVSRYKGLPSRNLSVAIREYAPGAEIILDGRVFRSAGVSLHWHNLNADTNEAQRLDSAWRCHKCGTLGYEEGIGGPGDLFCTNSACGERITLDNRRQVLQPAGFVTDAHTPVTNNIETMKFIPVVPAWVFVKAERVPLPNPLMGFMASGADGHVFQQSMGEGGHGYALCLSCGRAESMLSATDAPKSMEAHYPPRPGKSDRDSQNQRIICPGSTALNKNVTLGALARTDVFELILRRPQNGEYIPDNSDEGRIVAMTLVVALRRALASVLGVSAAELGYAVRPVRLENEQSVLAVQLYDIISGGAGFASSAPLHIEAVLKGMVKQLGCRHCDTACSECLLDSQTRHDHDQLDRKAAQAWLGEDFSHYIGLPEAEKFSLADAQYCPGSIEDAIRRAINDGARKLTLWMNGPLNEWDLYARQFRAAIQNYRLKDEVEVTLVVPGHIEDPELLQEIAQFAAIGVQLCQSELNTDTPVVAQVAFNDRLMTLISRSPEATIPGPNWHLNSQMVIRSHAFEPITLSKAELLSDAAGNRGLVNDIEIHKQLNGPVSQFGQRFWGVLTGAQEDIQTLLKENQVTRIHYSDRYLQNPVALALLGGLLKPLKSILAQDAQVTIDTLFKSKERPGNKPFHDWMSETDFQDFADQWFAASMGRAVVVNTFGSPRDIPHHRKLMVTFSNGQALKIRFDQGMGYWRIVFARAYRDFDFNDDVAFQLGNMAKACVEGQVVNSEESWATDVLVQVIVP

SEQ ID NO: 27040 - protein, 77 aa, Salmonella enterica
  subsp. enterica serovar Senftenberg str. A4-543
MSQQNPVIDISPDASYRYSVTLLPVFAAAVASGKTTFDSVFENKPGAVFFLRQVRDFDSRWFNAIFQYCLLRNVTEK

SEQ ID NO: 27041 - protein, 2106 aa, Salmonella enterica; identical to SEQ ID NO: 27039
  subsp. enterica serovar Senftenberg str. ATCC 43845

SEQ ID NO: 27042 - protein, 1099 aa, Salmonella enterica
  subsp. enterica serovar Senftenberg str. ATCC 43845
MSQSEYTSILKCTPWLAKFLTRRGLKQPDHRPLYEYHATSEEYDELKWLLRSIGVPDGYKSDKGYAACFTLFCSEWYRRDYEREYGWAWEPIYKTIGISASSSEMGKIIPKGLDGYWGRPVRFYDTERRNFLGSLFSEGGLPFRLLKESNSRFQSMFSLILNQYDQAKYSNISTFALVHAAVEKSSLPVVFKEDTSVELISRMAEQLVSLVQIYDLSNHTEPVKELERVHPKWRDSFPVPLDDDTGTSFLNGLLRTASTESKPRLQKNKTTLCQFLWSENHPEAVQALISLPEELSFSIDIEPSTTRFELAIYEDGNEIASLGPAYATLSNSQAKIKVRKREIKFYRRNPTVSLFIVARAGGMFVGSNLLEGSEVAVGDVPLVFVSDKNEWLLQGQASCSVRGSHVLIVLPKDGCLASEHEDCDSGFSALGCRALTIKGRQDIIIEGDETYRIKTGRDQIIHAGFSFQGKRLNWTSYPDELFLGVPGITQHSENLSTRHYKRFFNGTFIENCDVQEKMGAQFISVRNENNETLLRKKIGILPNDFSLEIKNGQQANEGSVIITTQHPCLYSLKEKTLEVGRKRLPGSTEIMMKAEGIPPASISLQITPNLTANPIVIWLPFPARGCLAFDKDEKPLPKNLTINDLLGARAYLFGKNGEPTRYQLELRLRSRSGMQAWYEWHYSAGECPVELTLYSLREHIDNLLSLEEGIDQTVDMRIKGGGSSFTWQIRRYKYSLDYDRGRQILLANSISNRTGQIPSPVIMLLSEPERKVVPLTSRMSEGVPVGEFELSSIIQKNGPWLVLPKLGEEASFRPCFIAGEPVIQSDATSIQSLQKATQLFNPRSDVNTIMLVLEQMASDPAHSGWQFLRNLYDQFGYLPLATFEVWRALVQHPQALAMSLFKFEMSIDYLSRIESEFPVFWEFLPITEVKRSATRFRAFLAHKGAPEEMQIRLLDRMYQQLGTTFPTYASEVQLWLSQGKLPPVFPELTMKGIILEWYQELLREHGESRWPEFGGPGLLRWYMSQQNPVIDISPDASYRYSVTLLPVFAAAVASGKTTFDSVFENKPGAVFFLRQVRDFDSRWFNAIFQYCLLRNVTEK

SEQ ID NO: 27043 - protein, 2106 aa, Salmonella enterica subsp. enterica serovar Weltevreden
MTTRYFSSLIEQSLSRSTEATLSIMGVTNPNLREHLTQQMAADCGKEGSFLASPVFEQTFGWKEFNSTMKDLATKQTLLSKEVVDSLDSEENGRYRFGSDWKPFTHQLASWQSLLEKKHSVVVTSGTGSGKTECFMVPVLEDLYRELQVKNKKPLIGVRALFLYPLNALINSQRERLDAWTRSFGSGIRYCLYNGNTEELHALVKSEQANRPNEVLSREKMREEPAPILVTNGTMLEYMMVRQVDAPIIQKSKAEKSLRWIVLDEAHTYVGSQAAELALQLRRVMTAFGVTPDDVRFVATSATMAGSDAEKQLKKFLSELSGVPQERIDVLGGSRVIPELEPCKQYSLSLDEIEHIPDSESEGISPERYSALTHSPEARCLREMLVSQPRPMKLDTLTQRLNELTKHQYTQQDVLRWIDLCSGTLPNAKDPAFLKVRAHIFQRNTQGIWACVDKNCAAKKNTALEKNWSFGNVYVNQRQNCECGSPVFELAFCNECNEPHLLARDKKGKLVQWDNKGGDEFSLQDEISDDFETSGEKVQKDFVFQSPQIIAAECNTEAGYIMQRLDRQTRSIGVVNPDSIPLAINDIEQICSASNCGYKGGKGKQPFRRALLGGPFYVTNIVPTVLEYCQDFTSDEGKDGVGPLSLPGRGRRLITFTDSRQGTARMAVRMQQEAERSRLRGSVVEILGWHQRKQPTSAPNDQADVMKLVTRVTQYREEAREYREWGMPEEAKLSEAQAERLEQAIQTATGGKAATILVCRTWTEMVNELKEKADIQGPILQYNHYLKPEIFTENGGPLKLAEMLLFREFMRRPKRTNSLETQGLVQVGYQGLEKAHSVPAHWQAKGLTLDDWRDFLKVTLDFYVRESNYIQLDDDLRNWIGSRFSSKFVRNPDSKEPDDNQVKRWPQIRHGNVTQRLVKLLILGAKFNTVNTVTIDIVNAWLKEAWLQLTGSLAVLKPDGNRFYLPKEHLTFSLVQKARICPVTNKLLATTFKGLTPYLPMHIQFERLTSAQYDAFLAQEVTLPAIWEHDRSQDDYVDGLTKVRDWVSLDPQVLSLRSQNLWTDINDRVVEGGFYYRTAEHSAQQSSERLQSYERMFKNGQLNVLNCSTTMEMGVDIGGISAVVMNNVPPHPANYLQRAGRAGRSKESRAISYTLCKGNPHDQQVFANPLWPFETVIPAPMVAMNSERLVQRHVNSLLLSEYLCHVVGETEKERTSLNSQWFFGEELDQSVCNRFKAWLERPTLSIDNALERLVKGTALHGVTAEKLRDKTQEAIAVLQTRWLGIFRDLVKQESESQPNTPYRRRLELEKKRHCGEYLLRDLAARTFLPGYGFPTDVVTFDNFTMEDYIREKTHKGRDKNDREDNVSRYKGLPSRNLSVAIREYAPGAEIILDGRVFRSAGVSLHWHNLNADTNEAQRLDSAWRCHKCGTLGYEEGIGGPGDLFCTNSACGERITLDNRRQVLQPAGFVTDAHTPVTNNIETMKFIPVVPAWVFVKAERVPLPNPLMGFMASGADGHVFQQSMGEGGHGYALCLSCGRAESMLSATDAPKSMEAHYPPRPGKSDRDSQNQRIICPGSTALNKNVTLGALARTDVFELILRRPQNGEYIPDNSDEGRIVAMTLVVALRRALASVLGVSAAELGYAVRPVRLENEQSVLAVQLYDIISGGAGFASSAPLHIEAVLKGMVKQLGCRHCDTACSECLLDSQTRHDHDQLDRKAAQAWLGEDFSHYIGLPEAEKFSLADAQYCPGSIEDAIRRAINDGARKLTLWMNGPLNEWDLYARQFRTAIQNYRLKDEVEVTLVVPGHIEDPELLQEVAQFAAIGVQLCQSELNTDTPVVAQVAFNDRLMTLISRSPEATIPGPNWHLNSQMVIRSHAFEPITLSKAELLSDTAGSRGLVNDIEIHKQLNGPVSQFGQRFWGVLTGAQEDIQTLLKENQVTRIHYSDRYLQNPVALALLGGLLKPLKSILAQDAQVTIDTLFKSKERPGNKPFHDWMSEADFQDFADQWFAASMGRAVVVNTFGSPRDIPHHRKLMVTFSNGQALKIRFDQGMGYWRIVFARAYRDFDFNDDVAFQLGNMAKACVEGQVVNSEESWATDVLVQVIVP

SEQ ID NO: 27044 - protein, 1099 aa, Salmonella enterica subsp. enterica serovar Weltevreden
MSQSEYTSILKCTPWLAKFLTRRGLKQPDHRPLYEYHATSEEYDELKWLLRSIGVPDGYKSDKGYAACFTLFCSEWYRRDYEREYGWAWEPIYKTIGISASSSEMGKIIPKGLDGYWGRPVRFYDTERRNFLGSLFSEGGLPFRLLKESNSRFQSMFSLILNQYDQAKYSNISTFALVHAAVEKSSLPVVFKEDTSVELISRMAEQLVSLVQIYDLSNHTEPVKELERVHPKWRDSFPVPLDDDTGTSFLNGLLRTASTESKPRLQKNKTTLCQFLWSENHPEAVQALISLPEELSFSIDIEPSTTRFELAIYEDGNEIASLGPAYATLSNSQAKIKVRKREIKFYRRNPTVSLFIVARAGGMFVGSNLLEGSEVAVGDVPLVFVSDKNEWLLQGQASCSVRGSHVLIVLPKDGCLASEHEDCDSGFSALGCRALTIKGRQDIIIEGDETYRIKTGRDQIIHAGFSFQGKRLNWTSYPDELFLGVPGITQHSENLSTHHYKRFFNGTFIDNCDVQEKMGAQFISVRNENNETLLRKKIGILPNDFSLEIKNGQQANEGSVIITTQHPCLYSLKEKTLEVGRKRLPGSTEIMMKAEGIPPASISLQITPNLTANPIVIWLPFPARGCLAFDKDEKPLPKNLTINDLLGARAYLFGKNGEPTRYQLELRLRSRSGMQALYEWHYSAGECPVELTLYSLREHIDNLLSLEEGIDQTVDMRIKGGGSSFTWQIRRYKYSLDYDRGRQILLANSISNRTGQIPSPVIMLLSEPERKVVPLTSRMSEGVPVGEFELSSIIQKNGPWLVLPKPGEEASFRPCFIAGEPVIQSDATAIQSLQKATQLFNPRSDVNTIMLVLEQMASDPAHSGWQFLRNLYDQFGYLPLATFEVWRALVQHPQALAMSLFKFEMSIDYLSRIESEFPVFWEFLPITEVKRSATRFRAFLAHKGAPEEMQIRLLDRMYQQLGTTFPTYASEVQLWLSQGKLPPVFPELTMKDIILEWYQELLREHGESRWPEFGGPGLLRWYMSQQNPVIDISPDASYRYSVTLLPVFAAAVASGKTTFDSVFENKPGAVFFLRQVRDFDSRWFNAIFQYCLLRNVTEK

SEQ ID NO: 27045 - protein, 2106 aa, Salmonella enterica subsp. enterica serovar Weltevreden; identical to SEQ ID NO: 27043

SEQ ID NO: 27046 - protein, 944 aa, Salmonella enterica subsp. enterica serovar Weltevreden
MFSLILNQYDQAKYSNISTFALVHAAVEKSSLPVVFKEDTSVELISRMAEQLVSLVQIYDLSNHTEPVKELERVHPKWRDSFPVPLDDDTGTSFLNGLLRTASTESKPRLQKNKTTLCQFLWSENHPEAVQALISLPEELSFSIDIEPSTTRFELAIYEDGNEIASLGPAYATLSNSQAKIKVRKREIKFYRRNPTVSLFIVARAGGMFVGSNLLEGSEVAVGDVPLVFVSDKNEWLLQGQASCSVRGSHVLIVLPKDGCLASEHEDCDSGFSALGCRALTIKGRQDIIIEGDETYRIKTGRDQIIHAGFSFQGKRLNWTSYPDELFLGVPGITQHSENLSTHHYKRFFNGTFIDNCDVQEKMGAQFISVRNENNETLLRKKIGILPNDFSLEIKNGQQANEGSVIITTQHPCLYSLKEKTLEVGRKRLPGSTEIMMKAEGIPPASISLQITPNLTANPIVIWLPFPARGCLAFDKDEKPLPKNLTINDLLGARAYLFGKNGEPTRYQLELRLRSRSGMQALYEWHYSAGECPVELTLYSLREHIDNLLSLEEGIDQTVDMRIKGGGSSFTWQIRRYKYSLDYDRGRQILLANSISNRTGQIPSPVIMLLSEPERKVVPLTSRMSEGVPVGEFELSSIIQKNGPWLVLPKPGEEASFRPCFIAGEPVIQSDATAIQSLQKATQLFNPRSDVNTIMLVLEQMASDPAHSGWQFLRNLYDQFGYLPLATFEVWRALVQHPQALAMSLFKFEMSIDYLSRIESEFPVFWEFLPITEVKRSATRFRAFLAHKGAPEEMQIRLLDRMYQQLGTTFPTYASEVQLWLSQGKLPPVFPELTMKDIILEWYQELLREHGESRWPEFGGPGLLRWYMSQQNPVIDISPDASYRYSVTLLPVFAAAVASGKTTFDSVFENKPGAVFFLRQVRDFDSRWFNAIFQYCLLRNVTEK

SEQ ID NO: 27047 - protein, 2106 aa, Salmonella enterica subsp. enterica serovar Weltevreden; identical to SEQ ID NO: 27043

SEQ ID NO: 27048 - protein, 944 aa, Salmonella enterica subsp. enterica serovar Weltevreden; identical to SEQ ID NO: 27046

SEQ ID NO: 27049 - protein, 2106 aa, Salmonella enterica subsp. enterica serovar Weltevreden; identical to SEQ ID NO: 27043

SEQ ID NO: 27050 - protein, 1099 aa, Salmonella enterica subsp. enterica serovar Weltevreden; identical to SEQ ID NO: 27044

SEQ ID NO: 27051 - protein, 2106 aa, Salmonella enterica; identical to SEQ ID NO: 27043
  subsp. enterica serovar Weltevreden str. 2007-60-3289-1

SEQ ID NO: 27052 - protein, 944 aa, Salmonella enterica; identical to SEQ ID NO: 27046
  subsp. enterica serovar Weltevreden str. 2007-60-3289-1

SEQ ID NO: 27053 - protein, 2106 aa, Salmonella enterica; identical to SEQ ID NO: 27043
  subsp. enterica serovar Weltevreden str. HI_N05-537

SEQ ID NO: 27054 - protein, 285 aa, Salmonella enterica
  subsp. enterica serovar Weltevreden str. HI_N05-537
MCHSFLIVYYWNDTEFLTLPKATQLFNPRSDVNTIMLVLEQMASDPAHSGWQFLRNLYDQFGYLPLATFEVWRALVQHPQALAMSLFKFEMSIDYLSRIESEFPVFWEFLPITEVKRSATRFRAFLAHKGAPEEMQIRLLDRMYQQLGTTFPTYASEVQLWLSQGKLPPVFPELTMKDIILEWYQELLREHGESRWPEFGGPGLLRWYMSQQNPVIDISPDASYRYSVTLLPVFAAAVASGKTTFDSVFENKPGAVFFLRQVRDFDSRWFNAIFQYCLLRNVTEK

SEQ ID NO: 27055 - protein, 2106 aa, Salmonella enterica subsp. enterica serovar Worthington
MTTRYFSSLIEQSLSRSTEATLSIMGVTNPNLREHLTQQMAADCGKEGSFLASPVFEQTFGWKESNSTMKDLATKQTLLSKEVVDSLDSEENGRYRFGSDWKPFTHQLASWQSLLEKKHSVVVTSGTGSGKTECFMVPVLEDLYRELQVKNKKPLIGVRALFLYPLNALINSQRERLDAWTRSFGSGIRYCLYNGNTEELHALVKSEQANRPNEVLSREKMREEPAPILVTNGTMLEYMMVRQVDAPIIQKSKAEKSLRWIVLDEAHTYVGSQAAELALQLRRVMTAFGVTPDDVRFVATSATMAGSDAEKQLKKFLSELSGVPQERIDVLGGSRVIPELEPCKQYSLSLDEIEHIPDSESEGISPERYSALTHSPEARCLREMLVSQPRPMKLDTLTQRLNELTKHQYTQQDVLRWIDLCSGTLPNAKDPAFLKVRAHIFQRNTQGIWACVDKNCAAKKNTALEKNWSFGNVYVNQRQNCECGSPVFELAFCNECNEPHLLARDKKGKLVQWDNKGGDEFSLQDEISDDFETSGEKVQKDFVFQSPQIIAAECNTEAGYIMQRLDRQTRSIGVVNPDSIPLAINDIEQICSASNCGYKGGKGKQPFRRALLGGPFYVTNIVPTVLEYCQDFTSDEGKDGVGPLSLPGRGRRLITFTDSRQGTARMAVRMQQEAERSRLRGSVVEILGWHQRKQPTSAPNDQADVMKLVARVTQYREEAREYREWGMPEEAKLSEAQAERLEQAIQTATGGKAATILVCRTWTEMVNELKEKADIQGPILQYNHYLKPEIFTENGGPLKLAEMLLFREFMRRPKRTNSLETQGLVQVGYQGLEKAHSVPAHWQAKGLTLDDWRDFLKVTLDFYVRESNYIQLDDDLRNWIGSRFSSKFVRNPDSKEPDDNQVKRWPQIRHGNVTQRLVKLLILGAKFNTVNTVTIDIVNAWLKEAWLQLTGSLAVLKPDGNRFYLPKEHLTFSLVQKARICPVTNKLLATTFKGLTPYLPMHIQFERLTSAQYDAFLAQEVTLPAIWEHDRSQDDYVDGLTKVRDWVSLDPQVLSLRSQNLWTDINDRVVEGGFYYRTAEHSAQQSSERLQSYERMFKNGQLNVLNCSTTMEMGVDIGGISAVVMNNVPPHPANYLQRAGRAGRSKESRAISYTLCKGNPHDQQVFANPLWPFETVIPAPMVAMNSERLVQRHVNSLLLSEYLCHVVGETEKERTSLNSQWFFGEELDQSVCNRFKAWLERPTLSIDNALERLVKGTALHGVTAEKLRDKTQEAIAVLQTRWLGIFRDLVKQESESQPNTPYRRRLELEKKRHCGEYLLRDLAARTFLPGYGFPTDVVTFDNFTMEDYIREKTHKGRDKNDREDNVSRYKGLPSRNLSVAIREYAPGAEIILDGRVFRSAGVSLHWHNLNADTNEAQRLDSAWRCHKCGTLGYEEGIGGPGDLFCTNSACGERITLDNRRQVLQPAGFVTDAHTPVTNNIETMKFIPVVPAWVFVKAERVPLPNPLMGFMASGADGHVFQQSMGEGGHGYALCLSCGRAESMLSATDAPKSMEAHYPPRPGKSDRDSQNQRIICPGSTALNKNVTLGALARTDVFELILRRPQNGEYIPDNSDEGRIVAMTLVVALRRALASVLGVSAAELGYAVRPVRLENEQSVLAVQLYDIISGGAGFASSAPLHIEAVLKGMVKQLGCRHCDTACSECLLDSQTRHDHDQLDRKAAQAWLGEDFSHYIGLPEAEKFSLADAQYCPGSIEDAIRRAINDGARKLTLWMNGPLNEWDLYTRQFRAAIQNYRLKDEVEVTLVVPGHIEDPELLQEIAQFAAIGVQLCQSELNTDTPVVAQVAFNDRLMTLISRSPEATIPGPNWHLNSQMVIRSHAFEPITLSKAELLSDAAGNRGLVNDIEIHKQLNGPVSQFGQRFWGVLTGAQEDIQTLLKENQVTRIHYSDRYLQNPVALALLGGLLKPLKSILAQDAQVTIDTLFKSKERPGNKPFHDWMSEADFQDFADQWFAASMGRAVVVNTFGSPRDIPHHRKLMVTFSNGQALKIRFDQGMGYWRIVFARAYRDFDFNDDVAFQLGNMAKACVEGQVVNSEESWATDVLVQVIVP

SEQ ID NO: 27056 - protein, 1099 aa, Salmonella enterica subsp. enterica serovar Worthington; identical to SEQ ID NO: 26758

SEQ ID NO: 27057 - protein, 2106 aa, Salmonella enterica subsp. enterica serovar Worthington; identical to SEQ ID NO: 27055

SEQ ID NO: 27058 - protein, 1099 aa, Salmonella enterica subsp. enterica serovar Worthington; identical to SEQ ID NO: 26758

SEQ ID NO: 27059 - protein, 2106 aa, Salmonella enterica subsp. enterica serovar Worthington; identical to SEQ ID NO: 27055

SEQ ID NO: 27060 - protein, 1099 aa, Salmonella enterica subsp. enterica serovar Worthington; identical to SEQ ID NO: 26758

SEQ ID NO: 27061 - protein, 2106 aa, Salmonella enterica subsp. enterica serovar Worthington; identical to SEQ ID NO: 27055

SEQ ID NO: 27062 - protein, 1099 aa, Salmonella enterica subsp. enterica serovar Worthington; identical to SEQ ID NO: 26758

SEQ ID NO: 27063 - protein, 2106 aa, Salmonella enterica subsp. enterica serovar Worthington; identical to SEQ ID NO: 27055

SEQ ID NO: 27064 - protein, 1099 aa, Salmonella enterica subsp. enterica serovar Worthington; identical to SEQ ID NO: 26758

SEQ ID NO: 27065 - protein, 2106 aa, Salmonella enterica subsp. enterica serovar Worthington; identical to SEQ ID NO: 27055

SEQ ID NO: 27066 - protein, 1099 aa, Salmonella enterica subsp. enterica serovar Worthington; identical to SEQ ID NO: 26758

SEQ ID NO: 27067 - protein, 2106 aa, Salmonella enterica; identical to SEQ ID NO: 27055
  subsp. enterica serovar Worthington str. ATCC 9607

SEQ ID NO: 27068 - protein, 1099 aa, Salmonella enterica; identical to SEQ ID NO: 26758
  subsp. enterica serovar Worthington str. ATCC 9607

SEQ ID NO: 27069 - protein, 2106 aa, Serratia marcescens
MTTRYFSSLIEQSLSRSTEATLSIMGVTNPHLREHLAQQMAAECGKEGTFLASPVFEQTFGWKESNFTMRDLATKQTLLSKEVVDSLDNKENGRYRFDSTWKPFTHQLASWQALLDKKHSVVVTSGTGSGKTECFMVPVLEDLYRELRDNEKKSLIGVRALFLYPLNALINSQRERLDAWTRGFGTGIRYCLYNGNTAELHASVKSEQANRPNEVLSREKMREEPAPVLVTNGTMLEYMMVRQVDAPIIQKSKAEKSLRWIVLDEAHTYVGSQAAELALQLRRVMTAFGVTPDDVRFVATSATIAGSDAEKQLKKFLSELSGVPHERIDVLGGNRVIPDLAPCQHLSLSLDELEHIPDSDGAGISLERYTALTHSPQARHLREMLVSQPKPMKLDTLTRRLNELTKHQYTQQDILRWLDLCTGTLPNAQEPAFLKVRAHIFQRNTQGIWACVDKHCSAKHNTALEKGWPFGNVYVSQRQNCECGSPVYELAFCNECNEPHLLARDKKGKLVQWDNKGGDEFSLQDEAPDDFDFSSEKVQKEQVFQPPHIIAAECNTEMGYIVQRLDRQTRSIGVVNPDSIPLAMNDIEQVCSVSNCGYRGGKGKQPFRRALLGGPFYVTNIVPTVLEYCQDFISDEGKEGVGPLSLPGRGRRLITFTDSRQGTARMAVRMQQEAERSRLRGSVVDILSWHQRKQSTHAPNAQADVTKLTEMAAQAREEAKNLHDWGMPEEAIRREEQAERLEHAIQQATGGKVDTVLMSLSWPEMVKELKDKADIKGPILQYNHYLKPEIFTENGGPLKLAEMLLFREFMRRPKRTNSLETQGLVQVGYQGLEKAHSLPAHWQDKGLTLDDWRDFLKVTLDFYVRESNFTQLDEDLKNWIGSRFSSKFVRNPDSKEPDDNQVKRWPQIRHGNITQRLVKLLILGAKFSSVNTVTIDIVNAWLKEAWLQLTGSLAVLKSDGNRFYLPKEHLTFSLVQKAYICPVTNKLLATAFRGLTPYLPMHIQFERLTSTQYDTFVAQAVTLPEIWQHDRSQDDYVDGLRKVRDWLGQDPLVAQLRSQNLWTDINDRVVEGGFYYRTAEHSAQQSSERLQSYERMFKNGQLNVLNCSTTMEMGVDIGGISAVVMNNVPPHPANYLQRAGRAGRSKESRAISYTLCKGNPHDRQVFANPLWPFETVIPAPMVAMNSERLVQRHVNSLLLSDYLCHVIGETEKERTSLNSQWFFGEELEQSVCNRFKVWLKRQTLSIDAALVRLVKGTALHGIAAEKLRDKTCDAIAALQKRWLGIYRDLVKQESESQPNTPYRKRLELEKKRHCGEYLLRDLAARTFLPGYGFPTDVVTFDNFTMEDYIREKTYKVRDKSDREDNVSRYKGLPSRNLSVAIREYAPGAEIILDGRVFRSAGVSLHWHNLNADTNEAQRLDSAWRCHKCGTLGYEEGIGGSGDLFCTNDTCGERITPENRRQVLQPAGFVTDAHDPVTNNIETMKFIPVVPAWVFVKAERVPLPNPLMGFMASGADGNVFQQSMGEGGHGYALCLSCGRAESMLNLTDAPKSMEAHYPPRPGKADRDSQNQRIICPGSTALNKNVTLGALARTDVFELIVRRPQDGEYIADNTEEGRIVAMTLAVALRRSLASVLGVSAAELGYAVRPVRLENEQSVLAVQLYDIISGGAGFASSAPLHIEAVLKGMVKQLGCHHCDTACSECLLDSQTRHDHDLLDRKAALAWLGADFSHYIGLPDEEKFSLADAQYCPGSIEDTLRRAINDGGRKLTLWMSGPLNEWDLYARQFRTAIQNYRLKDDVEVVLVIPQNIDDPEILLELAQFTAIGVQLCQSELDTDAPLVAQVTFDDRLMTLISRSHEATIPGPNWHLNSQMVIRSHLQAPIALYKTELPSEDTGSKGLVNDIEIHKQLNGPVSQFGQRFWNLLTESQDDIQRLLTECRVTRIHYSDRYLQNPVALALLGGLLKTLKPMLTQEAEVTIDTLFRSKERPGNKPFHDWMSEADFQDFADQWFAASMGRAVEIQAFNSGRDIPHHRKLMVSFDNGQALKIRFDQGMGYWRINFARAWRNFNFNDDVSFQLGNMAQACAEGLVVNSEESWATDVLVQVIAP

SEQ ID NO: 27070 - protein, 1099 aa, Serratia marcescens
MSRSEYIYLIKCTSWLAKFLSRRGLKQPDRRPLYEYHATSDEYDELKQLLRAIGLPDGYRSDKGYAASFTLFCSEWYRRDYERECGWAWEPIYKTIGISASSSEMGKIIPKGLDGYWGRPVRFYDTERRNFLGSLFSEGGLPFRLLKESNSRFQSMFSLILNQYDQAQSSNISTFALVHAAVEKSSLPVVFKEDTSVELISRMAEQLVSLVQIYDLSNHTEPVKELDRVHPKWRDSFPVPLDDDTGTSFLNGLLRAASTESKPRLQKNRTTLCQFLWSENHPEALQSLISLPEELSFSIDSEPSTTCFELAIYEDGNEIASLGPAYATLSNSQAKMRVRKREIKFFRKKPAASLFIVARAGGMLVGTRLLEGSEVAVGDVPLVFVFDKSEWLLQGQASCSVRGSHVLIVLPKDGCLASELEDYETDFSALGCRALIVKGRLDILIEGSETYRIKTGREQIIQTGFSFQGKRLNWTSYPDELFLGVPGISQNSENLLTHHYKRFFNGTFIDNCDVQEKMGAQFVSVRNENNETLLRKKIGILPNDFGLKTKNGEKANEGSIIITTKHPCLYSLKEKSLEIDRKRLPGSTEIMMKTEGIPPASILLQITPNLAANPIVISLPFPARGCLVFDKDDKPLSKNLTINDLLGARAYLFGKNGEPTRYQLELRLRSCSGMQAWYEWCYSAGEIPVELTLYSLREHIDNLLSLEKGIDQTVDMRIEGGGSSFTWQIRRYKYSLEYDREMQLLLTNSVSNRTGQVPSPVIMLLSEPERKAIPLVSRMSEGVPVGEFELNSTIQNNGPWLVVPKKGEEASFRPCYIAGEPVIQSDTTAIQSLQKATQLFNPRADVNTITLVLEQMASDPAHSGWQFLRNLYDQFGYLPMATFEVWRALVQHPQALAMSLFKFEMSIDYLSRIESEFPVFWEFLPITEVKHAAMRFRAFLTHRGAPEEMQIKLLGRMFQQLGTAFPTYASEVQIWLEQGRLPPDFPTQMIKGIIHEWYQELLREHGESRWPEFGGPGLFRWYTSQQDPVIEISPDTSYRYSVTLLPIFAAAVACGKTTFDSVFENKPGAVFFLRQVRDFDSRWFNAIFQYCLLRNVAEK

SEQ ID NO: 27071 - protein, 1441 aa, Serratia marcescens
MAVRMQQEAERSRLRGSVVDILSWHQRQKVVNKPNEQANVKEMIDMAEQGKIRIKNLLQWGMPDAAKQAEAELALLEQAIQQATGGKVDTVLMSLSWPEMVKELKDKADIKGPILQYNHYLKPEIFTENGGPLKLAEMLLFREFMRRPKRTNSLETQGLVQVGYQGLEKAHSLPAHWQDKGLTLDDWRDFLKITLDFYVRESNFTQLDEDLKNWIGSRFSSKFVRNPDSKEPDDNQVKRWPQIRHGNVTQRLVKLLILGAKFSSVNTVTIDIVNAWLKEAWLQLTGSLAVLKSDGNRFYLPKEHLTFSLVKKAYICPVTNKLLATAFRDLTPYLPMHIQFERLTSAQYDAFVAQAVTLPEIWQHDRSQDDYVDGLRQVRDWLGQDPLVAQLRSQNLWTDINDRVVEGGFYYRTAEHSAQQSSERLQSYERMFKNGQLNVLNCSTTMEMGVDIGGISAVVMNNVPPHPANYLQRAGRAGRSKESRAISYTLCKGNPHDRQVFTNPLWPFETVIPAPMVAMNSERLVQRHVNSLLLSDYLCHVIGETEKERTSLNSQWFFGEEFEQSVCNRFKAWLERPTLSIDAALVRLVKGTALHGVAAEKLRDKTCDAIAALQKRWLGIYRDLVKQESESQPNTPYRKRLELEKKRHCGEYLLRDLAARTFLPGYGFPTDVVTFDNFTMEDYIREKTYKVRNKSDREDNVSRYKGLPSRNLSVAIREYAPGAEIILDGRVFRSAGVSLHWHNINADTNEAQRLDSAWRCHKCGTLGYEEGIGGSGDLFCTNDACGERITPENRRQVLQPAGFVTDAHAPVTNNIETMKFIPVVPAWVFVKAERVPLPNPLMGFMASGADGNVFQQSMGEGGHGYALCLSCGRAESMLNLTDAPKSMETHYPPRPGKADRDSQNQRIICPGSTALNKNVTLGALARTDVFELIVRRPQDGEYIADNTEEGRIVAMTLAVALRRSLASVLGVSAAELGYAVRPVRLENEQSVLAVQLYDIISGGAGFASSAPLHIEAVLKGMVKQLGCHHCDTACSECLLDSQTRHDHDLLDRKAALAWLGADFSHYIGLPDEEKFSLADAQYCPGSIEDTLRRAINDGGRKLTLWMSGPLNEWDLYARQFRTAIQNYRLKDDVEVVLVIPRNIDDPEILLELAQFTAIGVQLCQSELDTDTPLVAQVAFDDRLMTLISRSHEATIPGPNWHLNSQMVIRSHLQGPIALYKTELPSEDAGSKGLVNDIEIHKQLNGPVSQFGQRFWNLLTESQDDIQRLLTKCRVTRIHYSDRYLQNPVALALLGGLLKTLKPMLTQEAEVTIDTLFRSKERPGNKPFHDWMSEADFQDFADQWFAASMGRAVEIQAFNSGRDIPHHRKLMVSFDNGQALKIRFDQGMGYWRINFARAWRNFNFNDDVSFQLGNMAQACAEGLVVNSEESWATDVLVQVIAP

SEQ ID NO: 27072 - protein, 1099 aa, Serratia marcescens
MSRSEYIYLIKCTSWLAKFLSRRGLKQPDRRPLYEYHATSDEYDELKRLLRAIGLPDGYRSDKGYAASFTLFCSEWYRRDYERECGWAWEPIYKTIGISASSSEMGKIIPKGLDGYWGRPVRFYDTERRNFLGSLFSEGGLPFRLLKESNSRFQSMFSLILNQYDQAQSSNISTFALVHAAVEKSSLPVVFKEDTSVELISRMAEQLVSLVQIYDLSNHTEPVKELDRVHPKWRDSFPVPLDDDTGTSFLNGLLRAASTESKPRLQKNRTTLCQFLWSENHPEALQSLISLPEELSFSIDSEPSTTRFELAIYEDGNEIASLGPAYATLSNSQAKMRVRKREIKFFRKKPAASLFIVARAGGMLVGTRLLEGSEVAVGDVPLVFVFDKSEWLLQGQASCSVRGSHVLIVLPKDGCLASELEDCETDFSALGCRALIVKGRLDILIEGGETYRIKTRREQIIQTGFSFQGKRLNWTSYPDELFLGVPGISQNSENLLTHHYKLFFNGTFIDNCDVQEKMGAQFISVRNENNETLLRKKIGILPNDFGLETKNGEQANEGSIIITTKHPCLYSLKEKSLEIDRKRLPGSTEIIMKTEGIPPASILLQITPNLAANPIVISLPFPARGCLVFDKDDKPLPKNLTINDLLGARAYLFGKNGEPTRYQLELRLRSRSGMQAWYEWRYSAGESPVELTLYSLREHIDNLLSLEKGIDQTVDMRIEGGGSSFTWQIRRYKYSLEYDREMQLLLANSVSNRTGQIPSPVIMLLSEPERKAIPLVSRMSEGVPVGEFELSSTIQNNGPWLVVPKQGAEASFRPCYIAGEPVIQSETTAIQSLQKATQLFNPRADVNTITLVLEQMASDPAHSGWQFLRNLYDQFGYLPLATFEVWRALVQHPQALAMSLFKFEMSIDYLSRIESEFPVFWEFFPITEVKHAAMRFRAFLTHKGAPEEMQIKLLGRMFQQLGTAFPTYASEVQTWFDQGRLPPAFPTQMIKGIIHEWYQELLREHGESRWPEFGGPGLFRWYTSQQDPVIEISPDTSYRYSVTLLPIFAAAVACGKTTFDSVFENKPGAVFFLRQVRDFDSRWFNAIFQYCLLRNVAEK

SEQ ID NO: 27073 - protein, 1441 aa, Serratia marcescens; identical to SEQ ID NO: 27071

SEQ ID NO: 27074 - protein, 1099 aa, Serratia marcescens; identical to SEQ ID NO: 27072

SEQ ID NO: 27075 - protein, 2106 aa, Serratia marcescens BIDMC 80; identical to SEQ ID NO: 27069

SEQ ID NO: 27076 - protein, 1099 aa, Serratia marcescens BIDMC 80
MSRSEYIYLIKCTSWLAKFLSRRGLKQPDRRPLYEYHATSDEYDELKQLLRAIGLPDGYRSDKGYAASFTLFCSEWYRRDYERECGWAWEPIYKTIGISASSSEMGKIIPKGLDGYWGRPVRFYDTERRNFLGSLFSEGGLPFRLLKESNSRFQSMFSLILNQYDQAQSSNISTFALVHAAVEKSSLPVVFKEDTSVELISRMAEQLVSLVQIYDLSNHTEPVKELDRVHPKWRDSFPVPLDDDTGTSFLNGLLRAASTESKPRLQKNRTTLCQFLWSENHPEALQSLISLPEELSFSIDSEPSTTRFELAIYEDGNEIASLGPAYATLSNSQAKMRVRKREIKFFRKKPAASLFIVARAGGMLVGTRLLEGSEVAVGDVPLVFVFDKSEWLLQGQASCSVRGSHVLIVLPKDGCLASELEDYETDFSALGCRALIVKGRLDILIEGSETYRIKTGREQIIQTGFSFQGKRLNWTSYPDELFLGVPGISQNSENLLTHHYKRFFNGTFIDNCDVQEKMGAQFVSVRNENNETLLRKKIGILPNDFGLKTKNGEKANEGSIIITTKHPCLYSLKEKSLEIDRKRLPGSTEIMMKTEGIPPASILLQITPNLAANPIVISLPFPARGCLVFDKDDKPLSKNLTINDLLGARAYLFGKNGEPTRYQLELRLRSCSGMQAWYEWCYSAGEIPVELTLYSLREHIDNLLSLEKGIDQTVDMRIEGGGSSFTWQIRRYKYSLEYDREMQLLLTNSVSNRTGQVPSPVIMLLSEPERKAIPLVSRMSEGVPVGEFELNSTIQNNGPWLVVPKKGEEASFRPCYIAGEPVIQSDTTAIQSLQKATQLFNPRADVNTITLVLEQMASDPAHSGWQFLRNLYDQFGYLPMATFEVWRALVQHPQALAMSLFKFEMSIDYLSRIESEFPVFWEFLPITEVKHAAMRFRAFLTHRGAPEEMQIKLLGRMFQQLGTAFPTYASEVQIWLEQGRLPPDFPTQMIKGIIHEWYQELLREHGESRWPEFGGPGLFRWYTSQQDPVIEISPDTSYRYSVTLLPIFAAAVACGKTTFDSVFENKPGAVFFLRQVRDFDSRWFNAIFQYCLLRNVAEK

SEQ ID NO: 27077 - protein, 2084 aa, Serratia odorifera DSM 4582
MGVTNPQLRKHLAQQMGADCGKAGSFLASPVFEQTFGWEESNYTMKMLATEKTLLSKEVVDSLDSEKNGRYRFGANWKPFTHQLASWESLLEKKHSVVVTSGTGSGKTECFMVPVLEDLYRELRDCGNKPLVGVRALFLYPLNALINSQRERLDAWTRGFGTGVRYCLYNGNTEELHASVKSEQANRPNEVLSREKMREEPAPILVTNGTMLEYMMVRQVDAPIIQQSKAQKSLRWIVLDEAHTYVGSQAAELALQLRRVMTAFGVTPDDVRFVATSATIAGNDAEKQLKKFLSELSGIPQERIDVLGGNRVIPELEACKNYPFTLDELEHIPDSDSDKEGISLERYSALTHSPEARYLREMLVSQPRPVKLDVMKKRLNELTKNHYTQQEILRWIDLCTGTSPNAQDPAFLKVRAHIFQRNTQGIWACADKNCTAKHNTALEKNWPFGYVYVNQRQNCQCGSPVFELSFCNECNEPHLLAKDKKGKLVQWDNKGGDEFSLHDDVPDDFETSGEKVQKEHAFQAPQIIAPECNTEAGYIIQRLDRNTRSIGVVREDSIPLAINESEQICSASNCGYKGGKGQSPFRRALLGGPFYVTNIVPTVLEYCQDFASDEGKEGVGPLSLPGRGRRLITFTDSRQGTARMAVRMQQEAERSRLRGSVVDILSWHQRKQAVNTPNALADVTKLVEMAKQARDEAKNLRDWDMPEEAILSEEKAERIEQAIQKATGGKVNTVLTSLTWQEMINDLKDKADIQGSILQYNHYLKPEIFTENSGPLKLSDMLLFREFMRRPKRTNSLETQGLVQVGYQGLEKVHKTPVHWQEQDLTLEDWRDFLKVTLDFYVRESNFIQLDLELKNWIGSRFSSKFVRNPESKDPDDNQVKRWPQIRHGNVTHRLVKLLILGAKFSTVNTVTIDIVNAWLKEAWLQLTGPLAVLKPDGNRFYLPKKHLTFSLVQKASICPVTNKLLDTTFKGLTPYLPRHIPFERLTNTQYSAYMAQEVMLPEVWEHDHSQLDYAEGLAQVREWVSQDPLVAHLRSQNVWTDINDRVVEGGFYYRTAEHSAQQSADRLQSYEKMFKNGQLNVLNCSTTMEMGVDIGGISAVVMNNVPPHPANYLQRAGRAGRSKESRATSYTLCKGNPHDQQVFANPLWPFETVIPAPMVAMNSERLVQRHVNSLLLSEYLCHVVGETKKEKTNLNSEWFFGEEFGQSVCNSFKIWLERPTLTIDDALERLVKGTALHGARPELLREKTFHAITNLQKRWLGIFQDLVKQEKESQPNTPYRKRLELEKKRHCDEYLLRDLAARTFLPGYGFPTDVVNFDNFTMEDYIREKTYKSRNKSDREDNVSRYKGLPSRNLSVAIREYAPGAEIILDGRVFRSAGVSLHWHNLNADTNEVQRLDRAWRCQKCGTLGYEEGIGSSIELFCTNGDCGERITRDNTRQVLQPAGFVTDAYDSVTNNIETMKFIPVVPAWVFVKAERLPLPNPEMGFMASGANGHVFQQSMGEGGHGYALCLSCGRAESMISEKDAPKSMEAHYPPRPGKADRDSQNQRIICPGSTALNTKVTLGALARTDVFELILRRPQDGEYIPDSSEEGRIVAMTLAVALRRALAGVLGVSAAELGYAVRPVRLESEESVLAVQLYDVISGGAGFASSAPLHIEAILQGMVKQLGCTHCDTACSDCLLDSQTRHDHDHLDRKAALAWLGDDFSHYIGLPDEVKFSLPDAQYCPGTIEDAVRRAINEGADKLTLWMNGPLNEWDLYARQFRAAIHNYRLKDNVAVEIVIPASIDDPEVLHELAQFAAIGVRLCHAEQEVSFPIVAQIAFADRVITLASRSQQATVPGPHWHQNDELVVRSQCYRPTALREFALPATTANYTELVKDIQIHKELNGPFSQFGQRFWDVLFDDHEKVQNLMKTNRITHIHYTDRYLQNPVALALLSALLKPLKTLMTKDAEVVIDTLFKNKDRPGNRPSHDWMSEADFQDFADQWFAASMGKAADITVFDYPRDIPHHRKLMVNFDNGQVLKIRFDQGMGYWRIDFPYVWRSFDFNDDVTSQLHKMAKACMEGKVINGEENWSTDVVVEVMEP

SEQ ID NO: 27078 - protein, 482 aa, Serratia odorifera DSM 4582
MIKAEGVPPTSVVLQVTPNLAGNPIDIILPFPTKGCLVLDVNGQHLRKNITINDLLGTRAFLFGKNGEPARFRLELRLMSRARLQAWYEWRYTAGERPVELNLYSLREHIENLLSLETGIDQIVEMRIDGAGSVLTWQIRRYKYSLNYDYERQVLFSSSVNTRSGQTPSPVIMLLSEPERKPVSLTSRMSEGVPVGEFELSSVIQKNGPWLVVPRKGEEAAFRPCFIRSEPPLQTEVHAIQSMQKATQLFNPRSDVNTITLVLDQMASSPSHSGWQFLRSLYEQYGYLPLATFEVWRALVQHPQALAMSLFKFEMSVEYLSRIENEFPIFWECLPILEIKDAADRFRAFLAHKGAPEEMQKRLLNKMYQQLGTIFPAYANEVQKWLSLGIQPRPIPHPTMRDIIQEWYQDLLREHSESRWPEYGGAQLCHWIMSQKDSVIDISPDTEYRYSVVWLPVFAAAVASGKTTFESVFGHEPGSLFS

SEQ ID NO: 27079 - protein, 2114 aa, Serratia sp. Ag1
MTTGYFSSLIEQSLSRSTEATLSIMGVTNPQLRKHLARQMGADCGQSGSFLASPVFQQMFGWKESNDTMRSLTEGKALLSKAVVDSLDDQNNGRYRFGADWRPFTHQLASWQALLEQKHSVVVTSGTGSGKTECFMVPVLEDLYRELHENGNNPLVGVRALFLYPLNALINSQRERLDAWTRGFGTGIRYCLYNGNTENLHASVKSEQAKRPNEVLSREKMREEPAPILVTNGTMLEYMMVRQIDAPIIQQSKAQKSLRWIVLDEAHTYVGSQAAELALQLRRVMTAFGVTPDDVRFVATSATIAGSDAEKQLKKFLSDLSGIPQERIDVLDGSRVIPELEPCKHVYHPREEIEQLPDLDIEDKHGNKIKGVSPERFSALTHSPEARYLREMLVSQPNPMKLDEMTQRLNSLTKQHYSQQDVLRWLDVCSGTQPNTKDPAFLKVRAHIFQRATQGVWACVDKECRLKHGTPLEKGWPFGYVYVNQRQNCDCGSPVYELAFCNECNEPHLLARDKNSKLIQWDNKGSDEFSLQDEVPVERDATEEKVEKESRFQPPLIIAAENTREAGYTLQRLDRQTRCIGVVNNDSIPLVINDIEQVCGASGCGYRGMSGKQPFRRALFGGPFYVANIVPTVLEYCQDFVSEERKEDVGPDSLPGRGRRLITFTDSRQGTARMAVRMQQEAERSRLRGSVVEILSWHQRTRTSTSPNANADLGKLAALAKQAREQAEEYRSWGMPEQAKLVEVQAEQLEQVFQAATGGKAATTLISRTWTEMVNEIKEKADIRGPILKYNHYLTPEVFNKNGGPLKLSEMLLFREFMRRPKRTNSLETQGLVQIGYQGLEKTYQAPVHWQEKGLTLDDWRDFLKVTLDFYLRENSFMQLDDELKNWIGSRFSSKFVRNPELKDPEDNQNKRWPQIRNGNISHRLAKLLMLGAGFKTANSVTIDIINTWLKEAWNQLTGPLAILKPDGNRFYLPKEHLTFSLITDAWICPVTNKILDTAFKGLTPYLPTHISFEHLTQAQYDAFVAQKVAMPEIWQLDRSQEDYAAGLAKIRDWVSKEPLIAQLRSENVWTDINDRVVEGGFYYRTAEHSAQQSSERLQSYEKMFKNGQLNVLNCSTTMEMGVDIGGITAVVMNNVPPHPANYLQRAGRAGRSNESRAISYTLCKGNPHDQQVFANPLWPFETMIPAPMVAMNSVRLVQRHVNALLLSDFLCHVIGETDKEKTSLDSLWFFGEADGHSKCERFKVWLERPELDIDAALERLVKGTALHGARPDLLRDKTINAIDSLQQRWLSVYRDLVAQERESQPQTPYRKRIELEKKRHCGEYLLRDLAARTFLPGYGFPTDVVTFDNFTMEDYIREKSQKSRDKKDREDNVSRYKGLPSRNLGVAIREYAPGAEIILDGRVFRSAGVSLHWHNINADTNEAQRLDCAWRCHKCGTIGYEEGMSSSGVLCCTNSACGEKIILDNRRRVLQPTGFVTDAHAPVTNNIETMKFIPVVPAWVFVKAEPVPLPNPIMGYMASGADGHVFQQSLGEGGHGYALCLSCGRAGSMLNANDAPKSMEAHYPPRPGKADRDSQNQRLICPGSTALMKNITLGALARTDVFEMVLRRPQNGEYLPDNTEEGRIVAITLAVALRQALAGVLGISAAELGYAVRPVRLDDGQSALAIQLYDVISGGAGFASSAPLHIEAILLGMVKQLGCRHCDSACSECLLDSQTRHDHDSLDRKVALAWLGDDFTYYIGLPDEETFSLPDARYCPGNIGDAVRRAINQGAEKLTLWLNGPLNEWDLYARQFRAAIQNYRVKDNVAVDLVIPAGVDDPELSHELSQFTVLGVRLCHAEQDLELPIVAQITFSDQVMTLASRSQQATIPGPCWHLNDELVVRSLGYKSVALREFVLPGKSANSVERVKDIQIHKQLNGPLSQFGQRFWDVLFNDHEEAQSLMKNKKIARVHYTDRYLQNPVALALLGALIKPLKPLLTDNAELALDTLFKPKERRGNRPSHDWMSEADFQDFADQWFAALMGRAVDLTVFGSSRHIPHHRKLTVTFEDGQTLKIRFDQGMGYWRIDFPSVWRHFDFADDVTFQLGKMAQACQEGKVLNSEESWATDVLVEVMES

SEQ ID NO: 27080 - protein, 1095 aa, Serratia sp. Ag1
MGQSECISWLKCTSWLSNFLNRRGLRLPDGRPLYQYHATNDEYNNLTQLLRAVGQSQSNVDDKGYAACFVLFCSEWYRRDYERNCGWTWDPIYKTLGISLTATELRHIIPKGMESYWIRPIRFYESERRNFLGTLFSEGGLPFRLLKESDNHFQTLFSRILNQYEQAQLAGFSVLSLVRTVLEKSTLPIVFSEDTSVELISHIAEKLSSLVLLYNLSNHTEPVRQLDKVHPKWRDEFPIPLDDETGTHFLNGLLCTASVETKSRLQKNKRTVCQFYWSENYPDQIRAIVSLPEELSFPIISAPSTTRFELAIYEDGDEVASLGPAYATLENAHARVRLRKSESRFARREPSASLSLVARAGGMIVGTIKLGDSEIAVGEVPLTFVADEGCWLLQGQASCSVRNSDVLIVLPREKTTLSGYEASPSTVSILGFKTLYVKGCQEVTISGDEIYRIRTGREQSNLGGFDFYGNRVTWNCHPDETFLGVPKVTAKNLDIEDIQFKRYLNGILLDECQVQEMMGVQYISVRNTNNETLLRRKIGILPADFTVEINGREEANEGSIVISTQHPCMSVLKNRTLEVARKRTAGRTEILLKAEGMPPAFVSLQIRPNLVADPVEIVLPFPAKGCLVFDANGNPLDKNITLHDLLGSRAYLFGKNGEPTRFSLELHLRSISGLQAWHEWRYTAGEQPVELNLYSLREHIENLLSLETGIDQVVEMRIKGAGSAISWQIRRYRYSLRYDYERELLISQSANYRARQIPSPVIMLLSEPERKATSLSSRMSEGVSVGEYELGSIVNKNGPWLVVPKMGEEMAFRPCFIRGEPSLPAEGSSIRSLQKATQLFNPQEEINTITLVLDQMANDPAHSGWQFMRSLYDQFGYLPLATFEVWRALVQHPQALAMSLFKFEMLTEYLNRIENEFPILWEFFPILEIKAAAGRFQLFLSQKGAPEETQAALVKSMFQRLGIVFPTYADEIEIWLSVGQLPPPIPEFLVHEWYLDLRREHSEDHWPEYGCKRLHSWMMSQKDPVIDIYPEANYHCSVAWLPVFAAAVASGKTSFETVFDRKPGAVFFLRQVRDFDSRWFKAIFQCSLLRYVSEK

SEQ ID NO: 27081 - protein, 2114 aa, Serratia sp. Ag2; identical to SEQ ID NO: 27079

SEQ ID NO: 27082 - protein, 1095 aa, Serratia sp. Ag2; identical to SEQ ID NO: 27080

SEQ ID NO: 27083 - protein, 2120 aa, Shewanella sp. ANA-3
MSKKSISLTNLYTAISSVSVDAVLNQLNFRHDSLRAYLRSVLSSQMRHNDGFLAEPVIEATFGWHSSERSLNDLTKQGELSARLVKCMDGAFAPDTEKQKSEDSKMGKSRLGYATDIDEDYTWPENRAPYTHQLEAWNLLSQDTPRSTVVTSGTGSGKTECFLVPLLNDLAKQVESHDEVLVGVQAIMLYPLNALINSQQERLSAWTRGFEGKIRYALYTGETKHTAPPKATRVFKTHKPEKVEYRDDIRNAPPPILVTNSTILEYMLVRPVDREILTKSQGKLRWIILDEAHTLVGTQAAEISLLLRRTMIAFNVKPEHVRFIATSATIGDSKDWIRTEKLLKEFLSGLAGVSPEQVSVVRGTRYIPKIPDDTDIEGKISIPDLEKLNSADAYQKLCQIPLMRILRQRLIQSPMTVSEIAKTVYTEREQLEALHAQNAMKLIDIATNAYPDGNPSLEPFFPVRAHIFHRAQRGLWACVNPNCCHKTGSELEQGWPFGRVFVSERQKCLDGCSSPVYELTHCAVCKEPSLAASLVIDSHGNRVLLSREHDDLDEYSDEIEDNQEIDVILEHKTRNNVQIFSSQSSDLERYKSFGSSVEAYLDLSTRRVKTRSENTLAVRYTTADRDSYLRCACCDATEAVASSTFKRALLGAPFLMGNLVPELLRHIPRKNDDSLFGARLITFTDSRQGTARFSAKLQLDSERKWCRSKIYREIAMRSSDSELYNDPQIATFNKILDSNPEAATKDFILSQIKIRLEELKKVSFKLNWVAAVELLANTDEIRLMAGDLDVEDYMLPGEYSNRDQRLENTKHLAELFLLREFARRPKNANNLETLGLVKIVYPALDSITEEDLRVGCREWGTLGLNLDDWKSYLKIILDFYVRENTLIDIHSYQVNWMGGKLFARLLQGPEFEGKSEEEKKAIWAFPSVNKGNQHKLVRMLELFSKRSAKDNPELFNGILRFAWRTLINKEILQHYKDGNKEWREGYHLKLSNSASFELITNASVCPITNRWLDTSFRGISPYLTSKTEIEDCLVKNTNCKIPHPAPDLLQSNSSQSLRNWIRHNEFILNMKKQGIWRDITDAALLPPVMLRSAEHSAQQYTDNLKLFEKAFKKDFLNVLNCSTTMEMGVDIGSLVMVAMNNAPPSTANYLQRAGRAGRRGESTSIVFTFCKSTPHGERIFANPKWPFETPIPVPKVALESVTIVHRHINAFLLSRYLNTKFSKENLPTLKSGKFFTSDTGTAIYERFMSWLSSEAVDDKYISQCLRMMIVGSGLAGQAEASLVHKTLQTIEEASSHWRRRWDSLCAEIQKVSEDDTGAKRRLIKQKESMEKDSLLSELTSRGFLPGYGFPVNVVELVTNNKMEKAKEAHSYPSRGLATAIREFSPGSDIVLNGAVYRSMGLQLSWKVPQSQYDLSKVQKLRNAVSCQECGFCQLDIISNQELKSCPDCGSNRLKTMEYIVPDGFKVDYKTPLHNDYTQPLYAPYTEPLISITDTTWQALCRHELGRFKVSDAAELFYYNNGNGGGYALCWSCGRMEPLAVNSSEGRTFLDLKSQVRLLTREKHPRLSGTSIDGNADCIKSDWSIKVSSSSLQDGLLQIPFVLGFSSVTSMFELQIRDPKTHEWIFDRKLLFSFGAALRQVYCARKGISTSELGISVHQRKTASSESESVCSLFIFDTAEQGAGYASSIPEVLAELFKDVYEYASECPSACDAYCHACLLDYDTQHHVEYLDRKWLVQFFEETKFHLLFEVEPSRACFGERSIPELSSIDQLLSIKGRSSLGIDLFVSASDWDLAEVSVLSKLHDLKGIPIRLLLGNAAIQTLTPNLAWQLRSKIPSQVEISSYELPKEISAGSFPLLRMKFTDGDYWYATDDQRKISCNAQWGSSEGASLVAAKPMAVDLKTSPFNLEDLALKSELTSNIALIDDITTKLNVPFNRFGSSIFALFEEIIPRFKNVFDQGIENVTYTDRYLISPISLGLIISIFAHVKAIMGIRDFEIITCHPSAAGDRKPYCIADNFSNIDEVNDFIDSVCSTYGINVYPEFASKNDIDHGRCLTFTLKNGEVVRFLFDQGMGYWATRRPYSRIKFDFESVGAFDINSWCFKVESSGGNSYIVVHKGRSC

SEQ ID NO: 27084 - protein, 1180 aa, Shewanella sp. ANA-3
MAVVEQLKLWTASVLQSRQHVPFGSPLWAYKITDSELEDLQTVLQRLFSTTNTNLLFNKHLSVLSRPLVLYIATWLQRKTKSRPTWEPVTDSICLDYNTSSRALILDCIRAGLKEFGIKIHHTQNYRYLDTLYCHGGFPRADLLGISHSHLMGYFEDVLNNYATFLHSLTVDEIAEGKLSSLPETLQQKSFSKLASSLISYLFELRDSFHLYETSDPLAFLDMKNPNWRNNLPFLVIDEEASRLINTLLKKTSKVVRRSQNPVRLKRYLRQNADEFNLFSEVHVNHTIHPEDLNKVLGVNSLPNFFELITITGDGHRSRAASFSYKTGAAPRWIVSEIVRPIVGLLAAGELKYQLYSDGELIGSNTYRHGESFDDRAPWIFDADEQKFNYLGQGSFRDRLASVLVVSDCEPAKCSPSSQVRLLGKVSFCERNVYKITGHVKIPSTFGHFHIRTDASQLNLDCVNVKGKKLVDVISDKPVYIGKPNLVIDESKPGAFLNKEEYFWVSTNGTRIPYFSNTVTSGTGAVVRVLEGEIVWVHECVYLHDEFLAELIHNGKGEFEVKFRGLENAHVGLVPGQSAILTAEPELIAGFKFCDIRLTDLLVDSVEFSISWSDAPDNTIRLRLPIALNAVSLLTKTGDVYRECDLGCLTADDLMDCTFKFQPDTFETRVKVDLLADDKVDMSVSQEMNLSASGTSKTLPARAVANLVRRLFRNGSTPEHVVRLSFFAKNEILENRIPLVYRFKYIPKIRGQFVYLPKTLLLIKHLDQLKLKLTPIWDLNRDTPDLEFLVEDGDFVKAKLPEIDEYGGWLLWGPGQTNFKPTLIEFDVPVVRKKIDNLGAFGQALKSALQCSQGITDFNEPLKQDSIQYAVKYLKQEGNKRTINFSLLDRILEKMENDIDHEGWSYLNDLIDLVEDIEPANFHVLKRLLSRPSCLTLMLLRDTSRFHKVWELADYLPFQWILIPISAWIKAIDKVKRKNASSLELIKKTAPNIYAEVERGLFRDLTAKGLYFNTLVDIALVNFTPSKKIWADTKDPRGSSSIGNKFLIAKSKLFERHQHKLMSISQSKKRDLELIECLDRCWPVSSLPSDLRGFFRAMGAIEQSEVVKRAYKLTIELPVKVAFYNLDVFLQPLPPREFHALSFSLSQLQQFDREWLQEAMSLATGAAYSAFCNSEFTVVG

SEQ ID NO: 27085 - protein, 2106 aa, Shimwellia blattae DSM 4481 = NBRC 105725
MTTRYFSSLIEQSLSRSTEATLSIMGVTNPQLREHLAQQMGADCGKSGSFLASPVFQQMFGWKASNKTMRSLTEGKALLSKAVVDSLDDQNNGRYRFGADWKPFTHQLASWKALLEKKHSVVVTSGTGSGKTECFMVPVLEDLYRELHENGNNPLIGVRALFLYPLNALINSQRERLDAWTRGFGSGIRYCLYNGNTENLHAAVKSEQVKRPNEVLSREKMREEPAPILVTNGTMLEYMMVRQIDAPIIQQSKSQKSLRWIVLDEAHTYVGSQAAELALQLRRVMTAFGVTPDDVRFVATSATIAGSDAEKQLKKFLSELSGIPQERIDVLDGSRVIPELEPCKHVFIPLEEIEQIPDTDMKGVSPERFDALTHSPEAYYLRDMLVTQPNPMKLDDMTQRLNSLTKQHYSQQDVLRWIDVCSGTQPNTKDPAFLKVRAHIFQRNTQGVWACVDKECRLKHGTPLEKGWPFGYVYVNKRQNCDCGSPVYELAFCNECNEPHLLARDKKGKLVQWENKGGDEFSLQDDVHIENDAAEEKVDKESRFQPPLIIAAEKTSEAGYTLQRLDRQTRRIGVINNDSIPLVINDIEQVCSASSCGYRGASGKQPFRRALLGGPFYVTNIVPTVLEYCQDFISEEGKEGVGPDSLPGRGRRLITFTDSRQGTARMAVRMQQEAERSRLRGSVVEILSWHQRTQTSATPNANADLEKLATRAKQARHEAKEYRSWGMPEQAKLAEAQAEQLEQAIQAATGGKAATILVSRTWIEMVNELKEKADIRGPILQYNHYLKPEIFNENGGPLKLSEMLLFREFMRRPKRTNSLETQGLVQVGYQGLEKIHKMPVHWQEKGLTLDDWKDFLKVTLDLYVRESNFTQLDDELKNWIGSRFSSKFVRNPDTKDPEDNQNRRWPQIRNGNISHRLVKLLMLGAGFKTVNTATMDIINTWLKEAWTQLTGPLAVLKPDGNRFYLPKEHMTFSLITDAWICPVTNKILDTAFKGLTPYLPTHISFEHLTKTQYDAFVAQKVTMPEIWKLDRSQEDYAPGLAKVRDWVSKEPLIAQLRSENVWTDINDRVVEGGFYYRTAEHSAQQSSERLQSYEKMFKNGQLNVLNCSTTMEMGVDIGGITAVVMNNVPPHPANYLQRAGRAGRSQESRAISYTLCKGNPHDQQVFANPLWPFETMIPAPMVAMNSARLVQRHVNALLLSDFLCHVIGETDKEKTSLDSLWFFGEDDGQSKCERFKVWLERPVLDIDAALERLVKGTALHGARPDLLRDKTIHAITFMQQRWLSVYRDLVAQERESQPQTPYRKRIELEKKRHCGEYLLRDLAARTFLPGYGFPTDVVTFDNFTMEDYIREKSQKNRDKKDREDNVSRYKGLPSRNLGVAIREYAPGAEIILDGRVFRSAGVSLHWHNINADTNEAQRLDCAWRCHKCGTIGYEEGLSSSGTLFCTNSACGEKIIMDNRRQVLQPAGFVTDAHAPVTNNIETMKFIPVVPAWVFVKAEPVSLPNPIMGYMASGADGHVFQQSLGEGGHGYALCLSCGRAESMLNANDAPKSMEAHYPPRPGKADRDSQNQRLICPGSTALMKNVTLGALARTDVFEMVLRKPQNGEYLPDSTEEGRIVAMTLAVALRQALAGVLGISAAELGYAVRPVRLADGQSVLAVQLYDVISGGAGFASSAPMHIEAILRGMVKQLGCHHCDTACSECLLDSQTRHDHDLLDRKAAQAWLGDDFSYYIGLPDEETFSLPDARYCPGAIGDTLRRAINEGAEKLTLWVNGPLNEWDLYARQFRAAIQNYRIKDNVAVDLVIPAGVDDPELLHELSQFTALGVRLCHSEQTLELPIVAQIAFADRVMTLASRSQQATTPGPGWHLNDKLVVRSLGYKTVKLNEFVLPGKAANAVERVKDIEIHKQLNGPLSQFGQRFWDALFNSHEEAQSLMKNQQITHVHYTDRYLQNPVALALLGAILKPLKTKLTDDAELALDTLFKSKERSGNRPSHDWMSEADFQDFADQWFTAAMGRAVELTVFDSPRDIPHHRKLTVAFENGQTLKIRFDQGMGYWRIDFPYAWRNFDFTDDVTYQLVKLAQACQEGKVLNSEESWATDVLVEVMTS

SEQ ID NO: 27086 - protein, 263 aa, Shimwellia blattae DSM 4481 = NBRC 105725
MQKATQLFNPQSEVNTITLVLEQMANDPAHSGWQFMRCLYDQFGYLPLATFEVWRALVQHPRALAMSLFKFEMSAEYLSRIENEFPILWEFFPIFEIKTAADRFKLFLSQKGAPEETQNLLVKSLYQRLGLVFPTYADEIEKWLSYGQFPPPIPEFFIREWYQELLREHSEARWPEYGSKRLHSWMTSQKNPVISINPDAEYRYSVAWLPVFAAAVASGNTSFEAVFDRKPGAVFFLRQVRDFDSRWFKAIFQCSLLRYFAQK

SEQ ID NO: 27087 - protein, 2106 aa, Shimwellia blattae DSM 4481 = NBRC 105725; identical to SEQ ID NO: 27085

SEQ ID NO: 27088 - protein, 269 aa, Shimwellia blattae DSM 4481 = NBRC 105725
QSSIRSLQKATQLFNPQSEVNTITLVLEQMANDPAHSGWQFMRCLYDQFGYLPLATFEVWRALVQHPRALAMSLFKFEMSAEYLSRIENEFPILWEFFPIFEIKTAADRFKLFLSQKGAPEETQNLLVKSLYQRLGLVFPTYADEIEKWLSYGQFPPPIPEFFIREWYQELLREHSEARWPEYGSKRLHSWMTSQKNPVISINPDAEYRYSVAWLPVFAAAVASGNTSFEAVFDRKPGAVFFLRQVRDFDSRWFKAIFQCSLLRYFAQK

SEQ ID NO: 27089 - protein, 2042 aa, Sinorhizobium fredii NGR234
MKPFETLADIRRRSVDAVVAQLGTNNEALNQQLRSMLGSERTGDGSLIQDPVIEGAHPFITAAESMAEVPPDVLRPQLVSILDGLDEEDEYRFPKSRKPFRHQLQAWTKLAQPGTPQSVLVTSGTGSGKTECFLFPILSDLIRQTEGNSATLEGVQAIMLYPLNALIESQRARLSAWTSPLKGRVRYCLYNGDLPQPALPESERKASPERQIDRHQLRSSPAPILVTNITMLEYMLARAEDQPIIEKSNGKLRWIVLDEAHSLVGAAAAETALLIRRVLLAFNTAPENVHFVATSATIGDDRDTDDKLRQFLAEVAGIPDDQVHVIKGDRTLPHRPNAKADMQIDPSAATPAELYDYFGGKEQVWEFIKTLKEKPQPLTALAKVARSVGIETEDFMSLLAAAEKSDPETGEPERLAPMRVHSFERAIPGIWGCVNPDCVAAPSGWPFGKLFPSKFENCDTCGAPVVELISCTECGEPMLEAEEDRSDGKLRPSRRGLERDEFQYEAERDGELDAEGDEDDDEEDGDASLAHKYMAKQTILFAATPSKSSRLISLSTKDWSVLAGPTTDSVNLRYEEKSVAEGVCPCCGVNALRGIDNLLRPVRFGAPFMVTAAAPILLEAVDPKPNSERTLPSSGRGLISFTDSRQGTARMSAKFQAESERNFVRSFIYHAVQGALAADEDTPEVANVRTVIAQIEPLVGTNPGLQLVLDGQREQLAKLTSESVIGVNWNALIDRLARRPEVEFWMKEVWEPRDPDRFGDAHKLAEFLLLRELFRRPRRANSLETLALACLKFPSVERIASMPPAFTRRGKTINDWRYFLTAIINHFIRAKSAVDVDRRTMRWIAPQIKLRPLLGPGRSSGGDKRYVIWPKVPRNLSSLSTPQTLLIMGLKLDIADPSDRDDMQDCLQMAWDQLQQVLNADRDNPALDFSKSVVAPVTDGFRCPITRKAIEIAPFGLTPYVRINSAVSNATPLRMPEIPFQLIAPDDPASAKSKISDWLNTDGRVADLKKAGIWINISERIALFVDYARSAEHSAQQESQRLRQYETDFKDGRINILNCSTTMEMGVDIGSVSTVMMTNVPPSIANYRQRVGRAGRRRQPFSMAFTFCRDRPLDREAFGNPLAYLDRAMSPPKVALNSRPIVQRHVNAYLLRQYMLARGGDTLKLTIGSLMGCPIKLLEGRVENAPVSQFLQWLEDPSTIRATTADLKTLVARSVLEQDSTLVEDCRKAMQEVEEVFVHEWEGLRQLARDEGENMKEAGRARMSLELQRLCGEFLLSALADRGFLPGHGFPTNVVTFIPHRSKKPKQDEPSMDGRRHARLSGPQRSLDLAIRDYAPGSEVVLDGLVHRSAGVLLNWKRPATEEKVREVQSIRRHWCCSQCGAAETTLQDVRVCRECGAQVLSVEYLRPSGFAVDFWKKEHADTDRITYVAPEEPVVSIAEEPWIALPIPSLGRFRGSGEGTVYYSNAGPTRNGYAVCLHCGRAEPELDPAGNSDEARSFSPLDGHRPLRRKAADGDIICEGVEKKWKIKRNLALGYEITTDVFELQPSTRISKAAATALVIAMREALARSLGVEADEMGYSVHRSKNELGGDCNSLLVFDKNAGGAGFSIAMGYNIAKVLKDAEEILDCSSPGCVDGCAACVLTSDAPFEDGELDRTSALAFVRGHLSFGAAVEVRDRFSDDTVLSIAITDEVDRELKRRNNPLLRIYIPEDADLGQIPSWSVMQDLSTWSYRGYRLAVVVPPKTVARSDQASKLVLQTLGHRLSVDDRFAIHIGEAPICSNGASVLATVSGNGHTMAWATHSASSRYPGIAWGQPAEGSIFRGTIQDTASTNPISPSELLPQSTAKVLLIEKNLDRSMSLFGTGMAGLIRTNLANLGFEADAAISRIEYKDPYVRSPLVSKLLIDTAAALFKSSTSPVLKITTAPPKAPVSPPKHISNDWPDGHLVSSVQAEYGRLKNIDVQVSLGDCGHGRFMELSFTDGRAATVIFDQGFGAWTPTVRDSRTLHDFTQTPYAQASSMQKSNPMLARKGVWPTYVVLRAG

SEQ ID NO: 27090 - protein, 1083 aa, Sinorhizobium fredii NGR234
MPSAASTPSDPASSWTTAFLSKRNLKAPNGQPFHRYRMTDEEFSEAGVVLRGLAARRKLIPDQRTACGVFAAFCAEWFRREATSTFRKWDALAPDIFPAIHGNQKREMAENGLRFWRRPLLKINGANEYLLSLALEGGVPVKVIADEGAGWLRDYLRHLLRFALAGHEVAAVRGYAHDESYRIKLSYRNDAFVDLCAELAAEVAKWRTVVESEAIAGIDPVSFLDAKYPTWKDSIPVYLPTGADSAARVLLTGLIAEKIEAFSSHGIGCERFLSLEGGVWQPALRIQATGDIPMGRLPGVSTATRWRATPAGILADYLPSQLALFEPPSDDQQSWRVRPLADLSRMIVGFPLSATVSVNITANNSVQAFDWPNGQRATSDVLVFDEVESSETPTLLRLVKTGSSSLPSKKLFVLVPAAWTIEGSDEAVGRIWRVADRKLIEVTGTCYLSEGGVTEGGRYRVQAGSEQRDETIELTSRSSPGISTAGDFDVMEAPVRLVVTRNGAPRPIERDELFVRQSGGPWRALPGGEIPDVGMVELSWRDPKSNIQIEKRRIAVVPAGASVKGLLTTPTTGRISLAELPGWTLALSNVANAVSRNDAGNILIEFSGKPNYRLPALLEPPEGKPIPILVPVAARDSVIVNGDGEVVDAGQQMDLASLRGSRAISSHKSVLVISRKGSKSQDISVEVDGEFAISTLKSAIEQIMASVEHQDVKLDMHFVGDSRQPIRLARYRWDRPRQERGAVIFSTVGVAVCRPVLAPEVERMLDHFQPDRFSLPEDVYGPCLVYLRDGPDILTRPLLLIGAAEVPAFPSGSLRTALCLRNYSELQTAIAERLGKLWCDPNAIEDLAYIRTLVGNLDGLPPTAFEALKNLPHHPKTLVRLLLGAADDKSRVAVWGLQGQLPFIWLGIPLECWKCAFDFERSTIENALAQVPGSDEFRLEILVRYFRDKLASLVDIEPSLAAVFSALDFPLAPRTKPLENIIEDFIKDQRSRETEDSSHVVRAAPLARRVSELGLAVPNGISHRFSLGDFDALYAPILLAASARGLAIIDPDLEVPLRAALHENGAFVSEAYPHFFNFFRTKQ

SEQ ID NO: 27091 - protein, 2099 aa, Sorangium cellulosum So ce56
MTPTHDPRLFTSLTRELTLRAARAAVSQLGLASEPLLRHLQATLQRRAGEPGSFLAEPVFEATFGWQEDPRTMAALSGALLHPHVVRALDQAQESRFPATAHPYVHQVNAWSLLCGPDPRSVIVSTGTGSGKTECFLVPILHDLARETAATGRLSGVRALFLYPLNALINSQRDRLRAWCKELPGPVRFCLYNGYTRDQVPRQEEQKHPEEVLSRKTLRSDPPPILVTNATMLEYMLVRGADASIIEASRGLLRWVVLDEAHTYVGSQAAEIALLLRRVLHAFGCRAEDVRFVATSATIGDGDEARHELKRYLADLAGVSPERVEVIPGRRATPTLPEALEQRDEALGPIEALEGIQDPRARFERIASAPGARRVRAALAERQGAMSLREIATSATGRDAVIDAEAMHQTLRILDLCASAARRAEEHQKDPAVDPEIFLPLRCHVFHRTLAGLWACSSPVCPGRLGPLDSAAWKFGKVFDARREECDALHRDGETRCKSAVFELVVCRGCGADYLWVSRRRESGGMYTLVPAKRPGDENGDDGLLSDLEDRESEGDESRAVRPGGRLGPCLIGHWEPPENVEPDAFQRSFRYDPSTGEVDPDSGGVRCVMSGDSANLRCARCGERQQSPGELFRPVLLGAPFFLSTAIPTVLEAVPPTKDIDLPFQGRRVITFSDSRQGTARFAARTQLEAELNYARSHIYHLLWREAKQPSAEEIETARTAIEALADAAISRPALKGTLAAKRDELERLESQSRRPIGRVPWRYAVQSLLQEDAVRLWMPRQLRDRYLPAQLTPEQLAELCIYREFVRRPRRQNSLETMGLAALHYSFLDNITDADVPPEWRRRELSLRAWRDFLKITVDYLVRGRTAVLVNNDYLRWMGAPVRPKNLAVPDAEPIDPRRTVLWPAIRGTNRPPRLARMLMIALRLDEDDAEARGEVNALLDAAWRAVVRELTRIEGGYYKLDLSKVDIVSVPSAWICPVTRRLLDTTLDAISPYQTERWAQSDPCEQVEMPRLPFPFGRDALGRAYGPEDARAWLEEDPRVIALRERGFWSERCDRIAAFAPYFQVAEHSAQQAPGRLRRLEEDFKQGAINLMSCSTTMEMGVDIGGITAVAMNNAPPSPANYLQRAGRAGRRREPAAITLTLCQNAPHGQAIFQNPLWPFRTTIHVPRVSLESERIVQRHINALALTRYLSRLGAEQVDLEASWFFDEVGDSAAHADAFAGWARGTAAEDAWLIDGIKAIIRRSDLEGVDPRALLAESADAVLAMAERWRAEHHALRRMLEEVGGEPTEKTQNPAQRAIWNQLKRYRGEYLLRELAEQAFLPAYGFPVGVVPFVNTTKELLDAEAKERAQAKADGTKEDRLGRRRGYATRELPLAIREYAPGARVVMNGVVYESSGVTLNWHIEPGDRQIPELQALRWAWRCKGCGAAGSRQLMPERCPCGSADLTRVQYLQPAGFAVDLFSRPDNDLSSRAYLVPLDPWISAGSGPWLALPRPEVGRFRYTGEGQVIYRHGGLHQKGYAVCLRCGRAASYDGENIPADLKEHWRLRGGKSKDGEALCDGNRKDWAIKTGLWLGGSEITNVFELELFNPASRVPIHDEIATTSIAVALRHALAEMLGVEDREIGWAVTPSKPVGAPRRCTIALYDTASGGAGYVARAAESLCELLKRAQELLRCSQGCDKACHGCLLAYDTQHDADRLDRRKALEVLTDELLDAFRLPDELKIFGESTTLEYQPLLDAVVREAQRIDVQRIQLHLGDDVKEWDLFSWPLYRHILRWTSTSKQVVLIVPRKAIAALEWDESGTWASIMEGTGATLRIVDQLPPASSSPRIAVEIAGSSWSSSWAVTSETALDPGEAWGLAGDGARCVIGRATVALAAAPGAALTPAQVRKPRPGTYVEVKINNELDGPVGDFGHRFWALLERRFPELMERLDAAEPLASVEYGERYLKSPLATRLLYEVLKALQRRPGGIRPATLVSVDATSSFRPNRPPTKVDHDWRDPATRNTMMEATLRHLGINLRFTAGTDIHRVAHYRQMLLRWPEATLCLRLDQGLSFCQADPPPPFPFEKACDEQQKALLATKYSVQKRDAMPAVVYVNS

SEQ ID NO: 27092 - protein, 1152 aa, Sorangium cellulosum So ce56
MDRRPPAATRTAAAALRRAIAARSAVALDSRSPLYTYRCCDEDFTALEQLLCECAPARTLGDEEAACFCLYVAEWWRRRYTGGPWAWEPILRDAGHGGKPHAWREDVIHRGLRQWQRPLLRVGDRTGYIVTLACEGGLPLSLIQRQGAHLRRYFRALLRDARIFRDTPLRELAERNAYHLPASYRQPSVYELAAQLVKGVEKLQALAVGAADPVAHLDAHHPDWHNYIPLNAGNALAAALVRGLMDDIAAVEKEPQPIIAAETLLTASNGGLTITRTLRMPRIVRTHDVAVALERSWDTLPRTFELCVEEADGVLTPTALVSRASEGEQGAMHVEPLVGAFERTGSAARDVFRIIAVRRRDILAAAEVEGGAALGEVPWVFVRAGEDHGQEGRWRLAGTGAVALRTDAALLVLPPDAHARPDPGGDLSPRGRVHDVGWDAYEIRGRVRIDIGDGTRCVVSLAQSRDDAPEYHTRGSRLGHLLSPGDVWRGLPRLMERQAPDQPVRPISAAHLEWRPRSVGASWRRMDERCLGDVEVRYAPDGEQRFRARWTVLPATAEIRLIPGTNGHGELVLHGFGDCRVGAVPLSAAQQRGGNGELKLRFESSGPAPTSVRLYIDFGGHRSTAVDVPYPRREARFLARSGQDLPDEATIWVEQLVGVRAQVLDAQAGGRFYVEGVLQARDADPTKPLTVKEELLEVGPGRHELDLRALAGSIKALLSASQELDAKAKLTLQAHGGRQLAQRRLLVAHYDGALDRSAEELRLEPRSLARLGTTVESLRLEARPLEDPVAPAVQVPRIEAGRWRFVPPPDARGPWLITGWEGRLSRLRPLRVTLGDRPPVGARTPSAARTLSLREITYLSERSARLVAFRELIDQLARDPDASDWSALDALLDTLGVLPAATFEVMPRITEAPEAVALALLRCPSAVALESRWRGLETLPFPVWLVPVRVWIRATRRFHKSYHRACGGKDLDPMDMFAQTLRPFVDKAPVLAPVLGVVVDAMTLTFRGIPAPRDRPLWLASNPGGQRVLRERLEQCRQALLQEHAGSDSRSDPVWPTGNLPYAVASSALTRLRLWPETDGIAERKDVLSAPALAACATVDDTFRFSSHQQFELSRLRWFDPTWFDEAHALIASILLADTLSRNSGYLDDPYA

SEQ ID NO: 27093 - protein, 1312 aa, Sphingobium chinhatense IP26
MDVHRRLQAGLAEAVVSRAGIRHEGLNDFLRQNLAGTDPSKGALLSEQLFQAAPGYVSSGKRPDELTSLLHPRTIDAITKTPDAELRFDYPAYAHQLRTWELLRNADPQSVLVSSGTGSGKTECFLVPLLDDLVRASEAEGQLTGVRALMLYPLNALIASQEKRLTAWTKPLTGDVRFALYNGLMGTARKSNRDKAEHDVPHQVLYRETLRANPPPILVTNQTMLEYMTIRREDRKILDASRGKLRWIVIDEAHSYIGSAAAELSLLLRRVMNAFDVTPDQVRFVATSATIGSAEDAEAVASLQRFLSDIAGVQLERTHVVIGKPQPVDLSKVLTASDDPAARVVAEMLEKKPQTISSLSSVTTSAEKILLDLSAHNAKEIRPVLPMRALSFTRAIPGLWTCINPGCTGGTRPDGWPFGPVLFDQKDSCPHCQSLVFEIQSCPDCGEPFLPADDLGDRVLPRRSDQDTDEFRENSYRDRDHDEDEEEERQPEGIGHPRLIAINAQSQSTLVGFDVVSGELTDDTSQFSLTQLNEGRCPACLSNKRHGRPAMLSFRFGTPFLTQNAAPILLEGVSPHQAEHALPFDGRQLISFSDSRQGTARFAANIETNGERGFVRGFIYHAVQKAAQGSDLPEEKLQELIQKRAKLASLVDEMPSFKDDIAKIDAELNGVGTAGIAWKDLVSALASEPTIGMMAKVWDLDRSERYHDNREALARFMMLRELARRPRNANAMETLGLARLRFPDIERIGKEKLPEAVAAKGYSIEDWRDFLYFMVDYLRSYFALDVDDGDARWMPGRARPRNVIGPDQPPGSKRDVLWPSVNTKGGQPTAVLLLATALGLVISEPRDRHEINQLLRTAWEHMAPLLSGVGGTFSLRLEKTAEIEAVTQTWQCPLTRRVLPRLVFGRSPNLVTTGTGRFDGKVVAEVEFPKLPHTRPLNSEAKQRLADWLADDEQVRSLRSQRLWTDIHDQAALATPYLRAEEHSAQQPPHRLRDFEEQFKQGDINLLACSTTMEMGVDIGSIEAVLMTNVPPSIANYNQRAGRAGRRGQGFSTSLTIARNTPLDLETFADPASYLARKLASPRVSLDSDRIALRHANAYLLAQWFREVDGEFARTKTGDFFGCRADLRPFEGLPPVDAFCEWVQLPTTAANTDAGLKRLLKGTGLEFDTAIREHTAAMFKQEAANFRRTWERLKDDADALEGPAKKAIEFQARRLCKEFLLKELANRSLIPGSGFPTAVVPFDTLCAETQKAQERLRSDGEGIRNRRYECPTRNADIAIREYAPGAEVVVDGLVWKSAGVTLNWLSPIDSGQ

SEQ ID NO: 27094 - protein, 1038 aa, Sphingobium chinhatense IP26
MPRPADLPLYRYKLAAGAFERIAKKLSSSLASDMLRPFLAPAFVLWAADWFRRSYQGGKPKWEDIGSALNVHLNWSEWIRLADQGFEAWKIPPLIRASDKSNQRLANLARQGGFPAAAIESGAGWPRKYLTRAVGELLGSDVQDIGTAIATCERNEYLLPTIWRSQEMYAICGELALKIVELRAFVDKEVPADGRPYSARLDQSHEEWRDELPMTLDGAAAGLIDTLLEAKKLSSSGSIRVGRMMSQHGEDWRECLDFHLDGRWDDKDQVLSPGDHIRVFLQPSDGLADRISGRLAYLEHEDANRWIARPMRSEAAIEFPFDLPVTTEFHARGDRLARSFMLPGGKPVSGGLRVFEPRATDALRTTFALIGQGSGAYKAEPVFIDVPEDWSVRGKDGNAEIEPEDFAFAPRRCLYRCAGTIIAQKSNGDSFLVRTGQSADRKDRVSIVADAVSGVQTPDGEQLFKHPLHAQVSDGLSHRVASRGEVRWRIAGQRSWSEDLATAGPGLCEFAWLDGVTGHVRDRLTAFVLPTDFALTQRSNGTHSDIELSGWDGAAVLGDEAPSSEHSWRIRIDPPRLALLTLRLAAAQTPAFDLKVPLQSKEWLTTWYGDLLPRDAVLGLADLRDTVARAPSTSILMGDVAHHADAALDANWRIDRELGLSALRTDIAALMRPLGIDAQVRLDFHNGSNDHWYVTEFGNILEREPSGGLRPKTAIVGEDVRVCGRSLGAPEKELEFGSYDGLQSGLGGQLIHLPHLKGDWLVYLREGSRVLTRPKFVSGDPDPEVPQHQLGRAMAQPFLKAQEDLQSLVTDIAQDPTTAEAGQTIQVVMKLALSLNGLPPQTFEIFSKLVHAGALAPLLLYRCEEQHLSTILELFDGLCSSWILLPYGAWDSAFQAQGLYLVTRLDDPKWALTRLTERQNEIAARAPQLAPLICRDFSPSTWEDVRSHFTDHTSEGISTDAGGFNPFRPAFRELLPQENFLESLMRVFDAPFVAALAAMGRITLDKVQILTVKDVERRHPTYFAKAYGYALTELKNDR

SEQ ID NO: 27095 - protein, 1989 aa, Sphingobium chungbukense
MSANDPSQPAHLSPMAVHRRLQAGLAEAVVSRAGIRHEGLNAFLRQSLAGTDPAKGALVSEQLFQAAPGYVSSGKSPNQLSALLHPQTIEAITQTPDAALRFDYPAYAHQLKTWELLSEIDPQSVLVSSGTGSGKTECFLVPMLDDLVRASEAEGQLTGVRALMLYPLNALIASQEKRLTAWTKPLRGDVRFALYNGLMGTARKSSRDKAEHEIPHQVLYRETLRANPPPILVTNQTMLEYMTIRREDRPILDASRGKLRWIVIDEAHSYIGSAAAELSLLLRRVMNAFDVTPDQVRFVATSATIGSADDAEAVASLQRFLSDIAGVPLERTHVVIGKPQPVDLSKVLTASDDPAARQVAELLEKEPQTISALSSVTTAAEKIVLALSAHNANEAKPVLPMRAHSFTRAIPGLWTCINPGCSGEVKPAGWPIGSLLFEQRDSCPHCHSLVYEVQSCADCGEPYLPADDMGDRLLPRRSAQDTDEFRENSYRDQDHDDADSDGEEQQAEPIGHPRLIAINPQTSSTLVGFDVASGEFLDGTGHFHLTQLNEGRCPACLGNKRQGRPAMLPFRFGTPFLTQKAAPILLEGVSPHQADHALPFDGRQLISFSDSRQGTARFAANIETNGERGFVRGFIYHAVQKAAQRTALSEEAREDLLKKRAKLASFVEEMPSFRDDIAKIDAELNGAGGSGIPWKDLVSALASEPTIGMMAKVWDLDRSERFHDNREALARFMLLREMARRPRNANAMETLGLARLRFPDIERIGKDKLPEIVAAKGYGIEDWRDFLYFLIDYLRGQFAVDIDDGDARWMPGRARPRSIIGPDQPPGAKRDLVWPSVNTKGRQTDSVLLLATALTLELSSAKDRHDINELLRTAWHHLTPLLAGVGGTFSLRLEKAAEIEAVTKAWQCPLTRRVLPRLVFGRSPNLVSSGIGRFDGKMVTEVEFPKLPQSRPLSSQAKQQLTAWLAENEAVTTLRGAHLWTDIHDQAALATPYLRAEEHSAQQPPHRLRDFEEQFKQGDINLLACSTTMEMGVDIGSIEAVLMTNVPPSIANYNQRAGRAGRRGQGFSTSLTIARNAPLDLETFADPASYLARKLASPRVSLDSDRIAQRHANAYLLAQWFREVDGEFARTKTGDFFGCRADLQSFEGLPPVDAFCEWIRLPTTAASTDAGLKRLLKSTGLEFDTEIREHTAVMFEQETANFQRTWQRLKLDADALEGPAKKATEFQARRLCKEFLLKELANRSLIPGSGFPTSVVPFDTLCAETQKAQERHRSEEEGTRDRRYECPTRNADIAIREYAPGAEVVVDGLVWKSAGVTLNWLSPIDSGQREPQNLRWAWWCEQCGGAGSDHQMPDCCDHCGDPNVKTEQFLEPAGFRVDWNAQPHADTDQAVYIEPKSPKVSVGDALWQPLLQPESGRIRASHDGYIYHHSRGPNDKGYEICLECGRAGEAGTDALKDHWPLTPRDKKLIDRCPGNDQGYAITRALALGHEVLTDVVEVQLLGLASDGAAWALGAALRESLARWLGIEPRELGISVTARDGQLGRKSPSIYLFDEASGGAGYAPRLLDDIHHVFDRASYVLDCPKECEMGCSACVLAPDLYKQQGRLDRRAALSSVRAFLEKNSDLPEEDRAVVDAKAISDAANTILLRARSGDSVTAFLPEAFDLAELSSIKMRSFFSSASARGVPVTLVLSGKSFKNLAEVERRFLRDAAVRNDFQLGLGQSESGPFGNCRIAELISLGGATAFFSRDANALQPGERWGVGETHAVVAGSINPPTPFVLIAADDLERQVASGDKVEVMLGFGQCPVGQFGKRFGAKLKQHMEAAGIWRPGQLLRISYSDRYLNAPLPMLLFLRTCEALAAELKGGETVEVDVVVQPLKRDRVPYRIFNDWDHEGDREDVAQVLGERLGLDVALEVTDSAIHGRKLEFEYGDGSRALVLLDQGFGYWRIVGNPPRHDFRAAPATQAGDLFRSTAAVSGTGESYFAVAKR

SEQ ID NO: 27096 - protein, 1099 aa, Sphingobium chungbukense
MDSSTLKERDFKAEIAAARRNPEQLRKIADEIHTLGGPRILMIRAIQLAREAASGLHPLGRIGAELALPRPADLPLYRYKLAAGTFERIAQKLSSSLASDMLRPLLAPAFVLWAADWFRRSYQGGMQRWSDIEAVLGVQLPQSEWRALADRGFHAWGIAPLVTTYGNQRLANLARHGGFPAAAIASGASWPRRFLERTVGELLGADQPDIGTAVTICERNDYLLPSIWRSQEMHAICGELALKIVELRAFADKEAPADGRPYSARLDQAYEDWRDELPMTLDSAATGLIDTLLEARKLTGTGSIRIGRLMRQIDGDWRECLDFHLDGRWDDKDRILSPGEHIRVFLQPTGALADRASGRLAYLEHEAGNSWIARAMRSEAAIEFPLDLPVTAEFHARGERLCRSFMVPGGKPVTNGLRVFEQRAGDSEQATFALIGQGSGGYRAELVFIDVPHDWSIRGKDTATEIEAEDFAFALGRRLYRCAGQIVAETAHGDRFLIRTGQSADRKDKLSIIATALAGVQASDGERLFKHPFHAEVEDGMSRRVATRGEVRWRLSGERSWRDDLAAAGPGPCEFAWLDSTTHHVRDRLTAIVLPADFAVSQRTHGSQAEIVLDGWASTATLGGEPRSQEHSWTVRINPPKRALLPLRLTPGTGPAFELQVPLRSKEWLTTWNGELLRRDTILGLADLRDTVARVPATAILMGEVVGHGGAALEAHWTIDGELGLSALRTDVAALMRPLGIDAKVRLDFHNGSNDHWYVTEFGNTLEWEPGGGLRPKTAILGEDARVCGRFLGAPEKEADFGSYTGLLSGLGGQLLQLPRLRGPWLVYLRDGARVLTRPKFIAGDLVHDAPQHRLGRAMAQPLELAREDLQILVDEIARDPATDEANKTIQAVMKLALSLNGLPPQTFEIFGKLESAGALAPLLLYRCEEQYLSPILEVFDGLCSSWTLLPCSSWETAFQAQGLYLVSRLDDPQWALTRITDRQNEIAARAPVLAPLLCRGYAPEGWNDIRSHFTSHTSESISMDAGGFNPFRPAFSDLLPRESFIESLMRVFDAPFAAALAAKGRITLDKEQVLTVKDVERRHPTYFAKAYGYGLSEL

SEQ ID NO: 27097 - protein, 1558 aa, Sphingobium japonicum BiD32
MATPSRSLRMTANNMPQPARLSPMDVHRRLRAGLAEAVVSRAGIRHEGLNAFLRHNLASTDPSKGALLSEQLFQAAPGYVSSGKSPDELASLLHPRTIQAITQTPDKELRFDYPAYAHQLSTWELLSSADPQSVLVSSGTGSGKTECFLVPLLDDLVRASEAEGQLTGVRALMLYPLNALIASQEKRLTAWTKPLTGDVRFGLYNGLMGTARKSSRDKAEHEIPHQVLYRETLRANPPPILVTNQTMLEYMTIRREDRQILDASRGKLRWIVIDEAHSYIGSAAAELSLLLRRVMNAFDVTPDQVRFVATSATIGSADDAEAVASLQRFLSDIAGVPLDRTHVVIGKPQPVDLSKVLTASDDPAARVVAEMLEEKPQTISSLSSVTTSAEKILLDLSAHNANEARPVLPMRAHSFTRAIPGLWTCISSDCTGGTRPEGWPFGPVLFDQKDSCPHCQSLVFEIQSCPDCGEPFLPADDLGDRVLPRRSDQDTDEFRENSYRDRDHEDEDDEEEERQPDGIGHPRLIAINVQSQSTPVGFDVISGELNDGAGQFQLTQLNEGRCPTCLSNKRHGRPAMLSFRFGTPFLTQNAAPILLEGVSPHHAEHALPFDGRQLISFSDSRQGTARFAANIETNGERGFVRGFIYHAVQKAAQGSDLPEEKRQELIQKRAKLASLVDEMPSFKDDIAKIDAELNGVGAAGIAWKELVSALASEPTIGMMAKVWDLDRSERYHDNREALARFMMLRELARRPRNANAMETLGLARLCFPDIERIGKEKLPEAVAAKGYSIEDWRDFLYFMVDYLRGQFALDVDDADARWMPGRARPRNVIGPDQPPGAKRDLIWPSVNTKGRQPDSVLLLATALGLDISEPRDRHEINQLLRTAWEHMAPLLTGVGGTYSLRLEKAAEIEAVTKAWQCPLTRRVLPRLVFGRSPNLVTTGTGRFDGKVVAEVEFPKLPHTRPLNSETKQRLVNWLGDNELVRSLRGLHLWTHLHDQAALATPYLRAEEHSAQQPPHRLRDFEEQFKQGDINLLACSTTMEMGVDIGSIEAVLMTNVPPSIANYNQRAGRAGRRGQGFSTSLTLARNTPLDLETFADPASYLARKLASPRVSLDSDRIALRHANAYLLAQWFREVDGEFARTKTGDFFGCRADLRPFEGLPPVDAFCEWVRLPTTAANTDAGLKRLLKGTGLEFDTAIREHTAVMFEQEAASFRRTWQRLKDDADALEGPAKKAIEFQARRLCKEFLLKELANRSLIPGSGFPTAVVPFDTLCAETQKAQDRHRSDEEGTRDRRYECPTRNADIAIREYAPGAEVVVDGLVWKSAGVTLNWLSPIDSGQREPQNLRWAWWCDQCGGAGSDHQMPERCDHCGDPNVKTEQFLEPAGFRVDWNAQPHADTDQAVYIEPKSPKVSVGAALWQPLLQPESGRIRASHDGYIYHHSRGPNDKGYEICLECGRAGEAGTDALKDHWPLTPRDKKAIDRCPGNDQGYAITRPLALGHEVLTDVVEIQVPGLENDGAAWALGAALRESLARWLGIEPRELGIAVAARDGQLGRKTPSC

SEQ ID NO: 27098 - protein, 1098 aa, Sphingobium japonicum BiD32
MQERDFKAEIEAARNDPAQLRKIADAIQATGGSRLLVIRAIQLARAADTGPHPLGKASAELGLPRPTGLPLYRYKLAPGMFERMEKKLSSGLPSDWQRPSLAPAFVLWAADWFRRSYQGGVQRWSDIETVLGLRLSQGEWRDLADQGFRAWGIEPFITAHGNQRLSNLARQGGFPAAAMASGASWPRKFLERAVGELLGSDAQDIGTAVATCERNEYLLPTIWRSQEMYAICGELALKIVELRAFADKEVPADGRPYSARLDQAYEDWRDELPMTLDGAAAGLIDTLLEAKKLSSSGSIRVGRLISQHGEEWRECLDFHLDGRWDDKDQLLSPGNHVRVFLQPSDGLADRISGRLAYLEHEDANRWIARPMRSEAAIEFPFDLPVTAEFHARGDRLARSFMLPGGKPVSSGLRVFERRSTNAQHTAFALIGQGSGAYKAEPVLIDVPQDWSVRGKDGNAEIELEDFAFAPGRRLYRCAGTIMAQKSNGDSFLVRTGQSADRKDRLSIVANSVSGVHSPDGDQLFKHPLHAQVSDGLSHRVASRGEVRWRFAGQRSWSEDLAAAGPGLCEFAWLDGSTGHVRDRLTAFVLPAAFELTQRSNGTYADIELSGWDWDAVLGEETPSSQHSWRIRIDPPRRALLTLRLAPAQASAFDLKVPLQSKEWLTTWGGDLLPRDAVLGLADLRDTVARVPSTSILMGEVAHHAGAALDADWRIDGELGLSALRTDIAALMRPLGIDAQVRLDFHNGSNDHWYVTEFGNTLEWEPNGGLRPRTAIVGEDVRVCGRSLGAPEKELEFGSYDGLQSGLGGQLIHLPRLNGDWLVYLREGSRVLTRPKFVSGDPDHEVPQHRLGRAMAQPFVQAQEDLQSLVGEIAHDPTTAEASQTIQVVMKLALSLNGLPPQTFEIFSKLVHAGALAPLLLYRCEEQHLSTILELFDGLCSSWTLLPYGAWDAAFQAQGYYLVTRLDDPQWALTRLTERQNEIAARAPQLAPLICRDFSPATWEDVRSHFTDHTSEGISTDAGGFNPFRPSFHDLLPKENFLESLMRVFDAPFVAALAAMGRITLDKGQILTVKDVERRHPAYFAKAYGYALTELKNDR

SEQ ID NO: 27099 - protein, 1987 aa, Sphingobium lucknowense F2
MTADDVSQPTRLSPMDVHRRLQAGLAEAVVSRAGIRHEGLNDFLRQNLAGTDPSKGALLSEQLFQAAPGYVSSGKRPDELTSLLHPRTIDAITKTPDAELRFDYPAYAHQLRTWELLRNADPQSVLVSSGTGSGKTECFLVPLLDDLVRASEAEGQLTGVRALMLYPLNALIASQEKRLTAWTKPLTGDVRFALYNGLMGTARKSNRDKAEHDVPHQVLYRETLRANPPPILVTNQTMLEYMTIRREDRKILDASRGKLRWIVIDEAHSYIGSAAAELSLLLRRVMNAFDVTPDQVRFVATSATIGSAEDAEAVASLQRFLSDIAGVQLERTHVVIGKPQPVDLSKVLTASDDPAARVVAEMLEKKPQTISSLSSVTTSAEKILLDLSAHNAKEIRPVLPMRALSFTRAIPGLWTCINPGCTGGTRPDGWPFGPVLFDQKDSCPHCQSLVFEIQSCPDCGEPFLPADDLGDRVLPRRSDQDTDEFRENSYRDRDHDEDEEEERQPEGIGHPRLIAINAQSQSTLVGFDVVSGELTDDTSQFSLTQLNEGRCPACLSNKRHGRPAMLSFRFGTPFLTQNAAPILLEGVSPHQAEHALPFDGRQLISFSDSRQGTARFAANIETNGERGFVRGFIYHAVQKAAQGSDLPEEKLQELIQKRAKLASLVDEMPSFKDDIAKIDAELNGVGTAGIAWKDLVSALASEPTIGMMAKVWDLDRSERYHDNREALARFMMLRELARRPRNANAMETLGLARLRFPDIERIGKEKLPEAVAAKGYSIEDWRDFLYFMVDYLRSYFALDVDDGDARWMPGRARPRNVIGPDQPPGSKRDVLWPSVNTKGGQPTAVLLLATALGLVISEPRDRHEINQLLRTAWEHMAPLLSGVGGTFSLRLEKTAEIEAVTQTWQCPLTRRVLPRLVFGRSPNLVTTGTGRFDGKVVAEVEFPKLPHTRPLNSEAKQRLADWLADDEQVRSLRSQRLWTDIHDQAALATPYLRAEEHSAQQPPHRLRDFEEQFKQGDINLLACSTTMEMGVDIGSIEAVLMTNVPPSIANYNQRAGRAGRRGQGFSTSLTIARNTPLDLETFADPASYLARKLASPRVSLDSDRIALRHANAYLLAQWFREVDGEFARTKTGDFFGCRADLRPFEGLPPVDAFCEWVQLPTTAANTDAGLKRLLKGTGLEFDTAIREHTAAMFKQEAANFRRTWERLKDDADALEGPAKKAIEFQARRLCKEFLLKELANRSLIPGSGFPTAVVPFDTLCAETQKAQERLRSDGEGIRNRRYECPTRNADIAIREYAPGAEVVVDGLVWKSAGVTLNWLSPIDSGQREPQNLRWAWWCDQCGGAGSDHQMPECCGHCGDPNVKTEQFLEPAGFRVDWNAHPHADTDQAVYIEPKSPKVSVGDALWQPLLQPTSGRIRASHDGYIYHHSRGPNDKGYEICLECGRAGEAGTDALKDHWPLTPRDKKAIDRCPGNDQGYAITRALALGHEVLTDVVEVQLSGLEGDGAAWALGAALRESLARWLGIEPRELGISVAARDGQLGRKTPSVYLFDEASGGAGYAPRLLDDIYHVFERASHVLDCPKECEMGCSACVLAPDLYKQQGRLDRNAALIAVRAFLETNAELPEEDRAIADAKAVNDAANTILLRARSGDSVTVFLPDAFDLAELSSIKMRSFFSSASARGVPMTLVLSRKSFDSLAEVERRFLRDTAVRNDFRLALGDAAGGRFGNHRIAELVSQDGAKGFFSRDENAAQPGERWGVGETHAVVAGSINPPTPFTLIAADDLERQVAPGDKVEVMLGFGQCPVGQFGKRFGAKLKQHMEAAGIWHPGQLVRISYSDRYLNAPLPMLLFLRTCEALAAELKAGDTVEVDVVVQPLKKDRVQYRIFNDWDHEGDREDVAQFLGEKLGLNVALKVSDSAIHGRKLELGYADGSKAIILLDQGFGYWRIVGNPPRHDFGAAPAAQASDLSRSNAAVSGTGESYFAVARR

SEQ ID NO: 27100 - protein, 1064 aa, Sphingobium lucknowense F2
MIRAIQLAREAASGPHPLGRIGAELALPRPADLPLYRYKLAAGAFERIAKKLSSSLASDMLRPFLAPAFVLWAADWFRRSYQGGKPKWEDIGSALNVHLNWSEWIRLADQGFEAWKIPPLIRASDKSNQRLANLARQGGFPAAAIESGAGWPRKYLTRAVGELLGSDVQDIGTAIATCERNEYLLPTIWRSQEMYAICGELALKIVELRAFVDKEVPADGRPYSARLDQSHEEWRDELPMTLDGAAAGLIDTLLEAKKLSSSGSIRVGRMMSQHGEDWRECLDFHLDGRWDDKDQVLSPGDHIRVFLQPSDGLADRISGRLAYLEHEDANRWIARPMRSEAAIEFPFDLPVTTEFHARGDRLARSFMLPGGKPVSGGLRVFEPRATDALRTTFALIGQGSGAYKAEPVFIDVPEDWSVRGKDGNAEIEPEDFAFAPRRCLYRCAGTIIAQKSNGDSFLVRTGQSADRKDRVSIVADAVSGVQTPDGEQLFKHPLHAQVSDGLSHRVASRGEVRWRIAGQRSWSEDLATAGPGLCEFAWLDGVTGHVRDRLTAFVLPTDFALTQRSNGTHSDIELSGWDGAAVLGDEAPSSEHSWRIRIDPPRLALLTLRLAAAQTPAFDLKVPLQSKEWLTTWYGDLLPRDAVLGLADLRDTVARAPSTSILMGDVAHHADAALDANWRIDRELGLSALRTDIAALMRPLGIDAQVRLDFHNGSNDHWYVTEFGNILEREPSGGLRPKTAIVGEDVRVCGRSLGAPEKELEFGSYDGLQSGLGGQLIHLPHLKGDWLVYLREGSRVLTRPKFVSGDPDPEVPQHQLGRAMAQPFLKAQEDLQSLVTDIAQDPTTAEAGQTIQVVMKLALSLNGLPPQTFEIFSKLVHAGALAPLLLYRCEEQHLSTILELFDGLCSSWILLPYGAWDSAFQAQGLYLVTRLDDPKWALTRLTERQNEIAARAPQLAPLICRDFSPSTWEDVRSHFTDHTSEGISTDAGGFNPFRPAFRELLPQENFLESLMRVFDAPFVAALAAMGRITLDKVQILTVKDVERRHPTYFAKAYGYALTELKNDR

SEQ ID NO: 27101 - protein, 1999 aa, Sphingomonas sp. Leaf25
MADADPIRPTTGPLRTFELIRDRAVEAVLGQSRLSHPGLAAEIRRQFGSTDVAAGALVREPVIEGAAPFVTDGRTFADCAGRPLHPRVIDAIASDRAGVYRFPPDAQPYRHQLEAWEHLSAADRRSVLVSSGTGSGKTECFLMPVLSDLAAEAETSGRLSGVRAIALYPLNALIASQQERLSAWTAPFGGDIRFGLYNGLTPERLARSEIAPPEQAMDRLTLRSDPPPILVTNVTMLEYMIVRQIDRPLIEASRGKLRWIILDEAHSYIGSAAAEIALLIRRVLLTFGVRAEEVRFVATSATIGDGTDVTDELRRFLRDLSGADDDRVRVVLGERETVTLPPPAGVTVGGVLDLADRAALTRHPAVQAFVRSAEAGPVTLEQSATLLRPAGHPVEQIIEAIVASDAQRDPLLPLRIHGFMRAVPGLWSCIHPDCSGAPVDWPYGRVLAHGIDACPSCASPVLEIKTCRECGEPCLTGEDAGGQVRAVTTAPTIDEFAATLDREHAEDEDGDSLDAESDYDAAKVAIALRPLPGNRQAHIDPATGRRTDQAEEETRPYPVRSPDLCGHCGAQDANGPIMRPLRFGAPFLIGNAAPVLLEGVPPRASASGVAYPPPAEGRQLLSFTDSRQGTARFAANLQTNAERSYVRGYIYHAVQGSMAGGGGDDGKADALRAEIATLEPHAIAVPTIAALLETKRAGLAALARPSLDGVAWTELRTGLAARPEVKEWMQRIWKDRDERYRDPSALAEFLLLRELARRPRRANTVETMGLAWLRFAAIERSKQVPEALLTRGFGLSDWHGLLHSIVNLVARGRFAIHAAWSDMHWLHSRTPLTELLEPGREPQASREIRWPMVSKSAGRSNLALILSKQLGLDPADSRGRTQLNAVLEGAWNALLPLFSDPTRPGLALDFAKAHVAPVVEAWQCPVTGRVLPTTVLGLTPYGHREHLRTAALPPRPITFPALPVTFPRAESVETVRAWLDGDPQIAVLRGAGIWSSLHDRAALLAPYLRAAEHSAQQPPDRLRRFEGDFKRGEINVLNCSTTMEMGVDIGSVSAVMMTNVPPALANYRQRVGRAGRRRQGFAASLTYTRDSALDREAFRDPVLYLGRSTRAPRIKLDSRRIVQRHVNALLLARWFAGAGGEAMKTEVGAFFGLPAAIGAVPIDDAPVVVCRAWLMAPSTAEALGTEVDALTAGTVLAGDRTLFAAAETMVGAAFDAVKVEWEAIQGQAQGLTREAQLSLGFQLRRLVNDNLLKELGYRGVLPSHGFPTGVVPFVNDDRPPADAPVDDNSRRRRSFPTRTLDIAIRDYAPGAEVVVDGLVYRSAGVTLNWLRPVDDTKAVEEQNLRYFWSCAACGAGDVAAVVPPKCLECSVDLDERRRLRFLSPAGFTADAAEKPHADTDEITYVEPEPEQIIARGALWSSMADPAAGRLRASPDGLVFYSSRGPGKNGYVLCLECGRAAPAGSDGDTHPLKDHKPLRYTRKGTDGRCPGNDKGFKITPPIALGHEATTDVVELQPIGLEIAGAAWAAVSALRSALCRQLGIETSELGIAIRRVRAPLGQITHSLFLFDRASGGAGFAQQAVPLYDSLLADAATRLDCPEGCARGCSACVLAPDMYRQAEVIERRPALEWARAAYAALRQVPDEDRAGPDAALVRSVADSLIKEVDRGARSITIWAGSASDPAAFGTARFALLMQRLRDRGVKVATVVEPAWLDGLDVAQRLALRDAALKLGLSLKRGTAPVYPNGASAIAQAGSRSWVSRDAEASAIGAGWGEGQAAPIVSIVADPAPLSAAIDLASLLPASGTRHFEVEAQLDGFLADFGRRFAVMLLPAIREAGGTGRLVRIAYTDRYLSAPLTVRLLTEALAGLRDELASGSAVIPVHITTRPLKIEDRSRYRPHHDWRQEEDRAAVLHGLLENAGFRDNLEVGEADHGRTISLTFDDDRMVRVILDQGFGPWRAPAFAKWDHFGDDKVTQTRKISQFNAMLSAQGPSYAVVTRS

SEQ ID NO: 27102 - protein, 1002 aa, Sphingomonas sp. Leaf25
MELAHGYAPGLFVLWASEWFRRRYEGNGHRWRDLADALSIPEDQGLFRQLTGEGLRLWRRPLRQSGGTAYLGSLAREGGFPAAAVRDGGSGWASVALAAIIAPLLTEPESDAQEARARALAAAQINRLPQLFRDEDFFDLCADLACAIVALRREADEPAAAARIPTAAWLSINIPDWQARLPLNTSDRAAAAMLERLLHVAPLQGGGVSVTRFLERIGDHWVESAALTLDGTLDTIACDRVDQAYGRLRVFGAGELARHLPGELAMLEAPSEGERLWTARATRRARQRHAIPFATPIELDLRAGDQRVDRITLAGGKPRRGALIVTAIEAGSPEAPTLLRVVGSGSGQYRAETLVVQAPADWMVLAVGDEIATEIGMGVAGVAGYTRLWRVTRGAFFTDPLGDRFRILCGQPADQPNRIELIGQHASWAETGGDIDLYVGSPLARIGAGGGLFVRAIGSGTWVPAPQPLPIGHYDLGWRRDKILLDRRRIAILPATSQLRRSGPPNHCRYELSGFGDCALVPDEGAPVHVVDPVIWRHRPGSSAIHWFAARLRWPDAPELIVRIEHPTAAAVARWTGRHLPNQAQFTLADLPELVAVSETPVKLMAELTERGRVVAEMVWAFEGELPMSSIGSDLKSLLLPASIDAEVRLSMLDGLGSMWRVRQFPHDLKIDCDTAYVPRGLVTEGAVIAGRALADASREHVFGTYSLLTDSNHRPAALPPLGGNWLVYVLDGEQVLTRPRFVAGSEPVMPTGRLGDVMRLPQGPVLNAALDELLATAARDDAEGAAVIDELLALVTSLGGLPPATFHILELLAKAPAVLVRMAFQADAEQRGAVMALSDALPFAWATIPLACWQEAQGAAFARAIGQLSMLGAEAPHFAKQVVDQAVACLIDREPLLAAVLTSGSAHDLAMIAQAFLNRAVDRVPPAAGDRYRRQLGVLPRYFLKFDPRFLDTLDAPCAAAAAVAGLWTPGAADIRHIKTVARSFPTYFADAYAASLQEYS

SEQ ID NO: 27103 - protein, 2084 aa, Thiohalorhabdus denitrificans
MNAAKRFYGNAVNRLAKGSSQAVLGLRGFRSEPLRDHLRAEFQQAPGHGNALLADPVFEAAYGWEPSGRTMADLRGNLLHGEAIKALANPVQKDLTEDFSFPEARQPFTHQLQAWQALRDTENGRRSVLVTSGTGSGKTECFLVPILDDLTRELAENQNGGQEGVRAVFLYPLNALIKSQKERLQAWSEPFEGKIRFCLYNGDTPDQAKSPWQCEVPDRRTLRDSPPQILVTNPTMLEYMLVRAEDQPIVAKSQGRLRWIVIDEAHTYLGSQAAELTLLLRRTMHAFGCAPGDVHIVATSATLGNDDEASWRELEQFLADLAGVDTTQVTVIAGKRETPETLRARPDAGDTPPSPSSLETEDARSLYQTVCQEPALVRLRDSLVERPRTLTQLTHVLFGEQGATNQQATLELLDACSRARNEQGRPFLPLRGHLFHRTLPGLWVCADAHCSEKAGTPLEKEDWPFGAVYLERREHCRCGMPAFELVQCMGCGAEYLLAQERAGRGDGEYYLRPVEDQNPEDEFQQDLEPLESETENQSETPEWEAGRGLLRLITPEDHATQIQVGLGQDGQLDWSGNQSRIVNLRAPDDNGLSCGNCGDHQGTGPAERQFRPVRVGAPFLLTSTTPTLLSLLPESGETNTAQPLEGRRLVTFTDSRQGTARSVIKAQQQIERDYVGSLIYHSLAASRETQPDTETITKTKDQIAALEQAVGSNPNLKQLLDEQRARLEQLKTPSAPELGWEEMAGKLISAQDFSTWMSQDLRELSFRNLSERDVADLCLYREFFLRPKRQYSLEGLGFAQLRYPALESTTVPAVLQQKQVPHAEWVNLLRLALDTFVRSGAPSVEIPANVRRWLGYPGKPSLLIAPDSGDRKTHPDQRYWPSSGSRNARRNRLIRLLSHAFGLDLDEESHARFLDEVLTAMWKALTGTGVLSPTEGGFQLNLKKAARIRGVETAWLCPVTRRLLPVTFMGFTPYLPDLPAPDSLAECREVPMPQLPFPFWQGADQTDPESWLESDASVTHLRVLGGWTDLSDRIARFSRYYRAAEHSAQLSGAELTRREREFKEGRINLLSCSTTMEMGVDIGGLSAVAMNNVPPHPANFLQRAGRAGRRGESAALSFTLCKATPHGEAVFRNPLWPFNAELATPRVDLRSIPIVQRHINALALATFLSANGPDSVPRLRTGWFYEASGEEDQRSTPAERFIYWCRAPESWPTDLPRGLKSLTRGSQLEGITVQELMDRTAEAMQAVSSEWLNEIRGLLAQYRELATKDGQSKPEIALNMRLDRWRREYLLRQLANQAFLPGYGFPTGVVPLVTTTAEELNRDRASNPQGEREDNRQRRAGYPTRDLAVAMRDYAPGTDTVLNGRVYRSSGVTLNWQLPVEAEGAPEIQDLRWIWQCAVCGANGVKLARPDTCPACGSEAAKLQTDRFLQPAGFAVDFRSTPHNDVSVPQYIPVREPLIAMHGAEWMMLPNAPLGRFRTTPSGTLFHRSDGINANGYALCLRCGRADSMTVDGDRPSSLDGHKRLQGGKLNDQERVCPGNEESWAILDKVLLGATYATEIFELQLQDAFGNPVKDRAAAYTLGVALRRAFCNRVGIEEGELGATAAASRDQHENRTQSLYLYDTASGGAGYASQVPGVLPELLRTVKSEVLSCPNDCDSACQACLLTYETQFQVDHLNRHKASEVLTEEFLAALQLPEELRLFGERSHLEIEPLALAVEREWQRRPFTQIRLFLGGSANEWEPLHWRFLDTLRRLKTADVEVTLVLDRGCLEELEQSQLDELFAIAAETDAYLYSLPAEPPISGDSRLPLAVEIADSNHVKRWATSDPKALVPAPFWGSGDTGARFIQSPWQGDTLTELKTANAIQPEALRPQPSPGVTELEITHQLDGSLEGFGRRAWTLITEQVPDLASLLWGEAELSYVAYSDRYLRSPIQVVLMERLIAGLKDYPGGLGAGTEIHVLTTKLGKPHFQEPRAWSHDWQDRQDRDDVARAVLTDNPGTVWWEVKDLHSVPHARILILEWTDGTKWEIRLDQGVGYWREDSAQVGSFPFMASISRQVTILGEANFQVRPQHAHHPTFWYALKK

SEQ ID NO: 27104 - protein, 499 aa, Thiohalorhabdus denitrificans
MFQLEGHRAEAGELVALDRLYALYLILQHPSGTERFFLEAELVRGGHTLGEQGFSATLPPMEGGRMETNLGPWVDQVNHLLATTDHPNAFVRLMICSQWGQELTRVHVAQYDMGIYPDREEETIELAYADIQRLGEDWSSRISVSMLPLWEPGREPRSLFPTDDTPGIWPIPEDLEPGPWWVIARDGDWARFRPLLWTVTNGHREDMDAETGGLSAAVRETDSDRRIYQIDEALQRLGAEPEHEDWELLLEYVALATEFSPKALDPLRRLVLHPTTLAMALLRADQERFDRLMLFPTQMSFAWGLLPVGAWHQAASRYFTQLGESLVGIDGAEDILWQTFTGFRERATKVRPYFDSLCDWLGESLFPGRGPANNSLKLTRQMPADFIDHHVATEIEALQGRHDADERWPTGAEVMEAADGGLLSERFRFADVTGIQRPVKCAPFVAASFALNHHGDQTPGLVYELRLIRGFDHEWFDRAYSIGLTFGLAKGREEMRKTS

SEQ ID NO: 27105 - protein, 2113 aa, Variovorax sp. Root411
MRLARPKSVDTYAMQLSYFSSLLPELSTRAARATLSKLGFSNAPLRRHLLDEFAQGYGDSGCFLGDPVFEATFRWQQAHVTMAELSKTLLHPDLVAAMDKPWGESAKDYRFPREARPYTHQLEAWQALLGTAPKSVVVTSGTGSGKTECFMVPVLSRLASLRAEEGAVQGVRALFLYPLNALIQSQRERLRAWTGPFGGDVRFCLYNGMTPEEEKAEKAKNAPNEVHDRATLRDRPPAILVTNPTMLEYMLVRAQDAAILEKSKGKLEWIVLDEAHNYIGSQAAELALLLRRVLHAFGTDADKIRFVATSATMGAGDVEAKRNLQEFLARLAGVHSDRVVVVEGEREVPALLEKLAPSSSDTPPTSISRMESAQERYDALAANPVARALRELFVPAASGRSYQPLSELKSRLRADSAKSDNETALAWVDALTSGVNGTGRDASPFLPLRAHIFHNTLNGLWACSSGACVKRSGTKLDDPEWPFGMVFTDDRRRCECGAPVFPLVSCNDCNETYLEAEINSRAGRRWLLPPLPSEVDEFLLDRDPEERENEAEMDDADVGGPPTSVLRSPVLIVNVDTRGAPARLNPSSAELLDKQDEPALSIRVQDQVTVEGRLILKCPCCDGDASRLEQFRTPRIGAPFLLGNIIPTLLEFCPEGDNPLDVPMRGRRMITFTDSRQGTARIAAQLQQDSERNGLRAAVYRRIASSNAGAEESRAQIEADILALKPALGQVKGTPAEASIAKLIAQHEQTLLELSAGKPVLFNDMVGWLSTQAPDVSRWIYGFYAESDQEFKRADGKEQLARVLMCREFARRPKRQNSLETMGLVSVAYPKLSNVRTLKPAVQLAGLSLVEWKDFLKISLDFVVRQSMCLMLPSAWKRWGGNRVFAKQMLPAGSTERPNSQLTKWPRVLPGERQNKLVRILAFVLKVDPATESGRDRIDSLLIAAWEDLTLTTNLLQLGGGQGRALDIADMAFRTITDAWVCPVTRRVLDCTLRGVTPYLPQKQLHEAVALCRPVQLPVCDVAALDYANDQARVEAAREWVNAQASLTDLRVEGIWSSINDRVVEGAGYFRAAEHSAQQGGSRLQVYEAQFKRGAINLMSCSTTMEMGVDIGGLNTVAMNNVPPHPANYLQRAGRAGRRGETRSVALTVCKNNPHDQHVFLNTAWPFETKLKSPGISLSSPVLVQRHVNSMVLAQFLRQQDRKGKLDKLTLDWWMLPRGSSRQERFTAWCECFDAAKQAELDQGLRELSRRTVFEGRKSTGALVAETGRAAGEHAHAWSLEYDAIVQQLNELSKKDEEDRVPMRALTVQKTRLLDEYLLRELATSGFLPGYGFPTDITTFETLNKDSVELQKHRDGGGREDNKFHRRELPSRDTVTALREYAPGATVVIDGLVYESAGITLNWHAPASLDQVNELQNIRQAWRCKHCGASGTSVLASHLRYCTECGSDLAAGEQTGMQYLEPAGFSVDLYAETHNDITLQKYVPVEAPWIAASGDWMPLVNPALGSFRASAQASVFHHSSGLYGSGYAVCLECGRTAPMGDAQDETATPFVFRQPHKRLRGRRGQGDDWMCGGSDSAFKIKKGVRFGREYTTDVLELCLFDAEGHALIDEPVAYTLAVALRRTIAARLGIAESELGCDTKLLRDGQGRKVRAVQIFDMRAAGYSSLVAPELPALLRGAREVLVCERSCDCACQSCLLTFDTRFKAESLNRQAALEFITPKWTDALALPEELMLFGSLSQSEYQPVREAVSRELNRSNAKRLFVYVGGEIAEWDFPSSPLRRMLHWLSAKSDVELVLVVTTVGFEGLSAENASVLSSLEQLCGVRLVCGNGIALRAPGACLATVEFADGTCRSWATQRLDASLPAAGWGESGEGGVISSLTQAPRLNVDPLVLPTISAGALDSVGITNELDGTGAGFGSRFWGKMKSHLPLTKTITAITYEDRYLATPISCALLVEAISGLKAMYEPLGGWANPVVQIMTMQIEQGHVARRRNHWAGDWEDSDTRGAAVEAAFEYCGIEGRVWSKRRSDTVHGRCLTIDFEDGSVSTVWLDQGFSYWTVAQAAARSAAASFDANGPATSLGEQLAEIKTSVQGHALPTRLFFEHRAEKTGVVAA

SEQ ID NO: 27106 - protein, 1187 aa, Variovorax sp. Root411
MAGDEKTAADGGESILQDFTGWVREFLARRGLERPNGQMLFSYRAAKEEYLALRAMFAERITALQGDPWVFKQRAESACFVLYAAEWWRREYAGGAWRWLHILESIAQSPVNLDVLERSAAVEWGLRAWGHLPSGAGKRYLGAIVANGGLPLQLVAKGDGAISRLLIRGTRQAQQFGWDAARLEAFFQAYELELVQHLRDEDIYRLLAMVVTTVLDLRRQYNLAGSADPVGHLDRMRPDWRQAFPMAVDDKSAEPLLVGLVKEAAREMSTAAAYPVIATRTLRESAQNGAFQLVLSLQMPATIALESLAAACDISADSIPQSFSMEAIGSGKLALGEARQLLGAQSQVMLSARTQRVVGQDAAQEHMLVLRSTGEALHEAVGIPGADGLDDFQPWVFAIRQSENVLMGVGSCRVAEERALLAVSAEAQVIADSEDSQATVVGEMQDVQPARRIYEISGSVSIQLDSSRFFVRTKQVAGVAEQLLWRGTRAPYSAGPFPVYQGVPHLCRLTADGLLAPVHPKDIHWVMPMRQGTQVDSPKGHRGPIDAWLVEGGMRVRRFRMALVAQDARVRFRSGDSPREGSVEFKGWGFSQLDTSAELTKRVEVLPDVARWELASETKPPAQIGASVVWPHSTLALRLELPFPSSGGRFLTSNGAQVTKGALLPLKCLPELRAQVFSRNPEAPKRYTLMLELAGTVGGSVVSEHAISLDKQGFGELRLLELESSVRGIMCQSSSLDARLNIRIYQAGSVIAEMRLVRYDAELETKGASMTLSEQCLASHGVQVIEQIVLEAVPLLTSDAGSKLSQSMSDGVPVGSWPVAQLAADRGPWLVYPAVESSLQLRPSLYAGFAIGTQNATSIARLCPLGQAMSSEEASERAIEIEAVVSAMSCDLDHRSWGLVRHHYQQLSHLPLSTLDYWRAIGRDPRACIAAVLKLAGGTQLMDRMRDELGLIWALTPKAVLSEVLALLTKTWARQFNVEEHNSLVHTIVKGEFPQLGLGDTVLQSLVDVVWFESGIEHSQELTSRVARMAATSPSALLQKIWVGEDCLVQRFLLRQHVDDRVWPCTGLANDLIHIIQANEPAYASRLSAEFGKRLVWMPTAGQSGPHSKNLKEDVANAPLLAGLLAQLCTKPQQWRTPEIMSRLLRIRSFDPAWFDESCRIGTLIALSLTAPQASHHRRAPRPAEVG

SEQ ID NO: 27107 - protein, 2066 aa, Vibrio alginolyticus
MQYFESLVDQLTKRAARATLGQFGLRSKPLREFLWQSFSQPPGKDGAFLADPVFEATFGWKPHTESMRDLSGGLLNRAIVKAMANPPKELEEDYLFDSSWYPYSHQYEAWSHLLETSPKSVIVSSGTGSGKTECFLVPILNDIVDRNSKPDGVEALFLYPLNALINSQRERLTAWTHQLGDQVKFSLFNGDTPESVSAEERKKHPNEQLSRRELRESPAQILVTNSTMLEYMLVRQKDANILNRSQGKLRWIVLDEAHTYIGSQAAELSLLLRRVMHGFGVTPDQVRFVATSATIGGADSDDDLKVFLADVAGVDMTQVHLVKGKREIKPLMELEQIKAMSLDHVASIENEQQRYDVLQNIPPLRTLRQRLSATDNRMTLNEISKLLSATEEPLSEQVTLQWLDICASTKNANGDAFIPFRLHLFHRVAGGLWACSNADCSSKVGTPLESVDWRFGMVYMSRRDKCSCGSPVFEMVSCNGCGTSLLAATEIIDSETSHAQLHLTKPDSSIDDFALDLIGEEDLTNEDDEEVSNEYDRFGLISPLSFEETGEYWINNQREVKAAKMPGSHLIHRVEGYRKSDGALSLRCPCCQHTKIKNFEFYRHFINGAPFMLSTVIPTLLEYCQDGKKEQLKGPWNGRRMITFTDSRQGTARFSAKAQQDSERQFLRSTIYHLILDKAIRESGASSASSPELEQYQAMLKMAIENGNEGMVEFVEGKISELVGSSSKPVTVNWLEVEDFLAEQKEVQLWIKKFYEHFDDRMDMVANPKLLARLLLLREFNSRPKRQNTLETMGLVCMEYPVLDKKANSAPSEWLRHFDSADEARAEWVNFLTVAVNFHVRSVKAVRVTDEQINWIGAKYSPAFLVGQDEPTHIWNVEAWPKIRRNGSRQPRLARLVATALNMELDDANSRADINEILRQAWMALQSSVLTPSGDGYRLELEQQVSFSLLADKHQCPHTQKIIDKPLLGVTPYLNVSGDRNEHLCKSISTPSYPFPFGRDPDSGETVELTKVRDWQEQPELMNVRKENAWSDIADRVVERTPYFRVAEHSAQLKASQLREYEKEFKAGRINVLSCSTTMEMGVDIGGISVVAMNNAPPNPANYLQRAGRAGRRGESKSIALTLCKSTPHGEHIFSNTRWAFDTEIKVPNVSLSSDYIVRRHVNSLLLATFLNRVLKSENSLKLNCGNFFKSDHGSAASQAEQFVDWCVNGALELVQEGLDTLLRRTSLDATSRIEILDASATHMKQIVERWVAEHQLLKDQSNSLEDNPNSLSTAQAAVESQIQRLEGEFLLSELARKGFLPGYGFPTDVVSLNTDHVKVIERRKRNIKMKQDQISDKTSRKDNLYSAKGFPSRDLSVAIRDYAPGNDVVIDGRVYQSKGVLLNWHSPASVDQVKEIQALRWAWRCDKCGASNTSSLRPDKCECCGNEFDLTDGNTKEHIHPYIQPASFAVDIRDEPHNDISRLNHVPFNDPWVTVDSSEWREVSVNPGASYRSSHNGHVYYYSAGPVNKGYALCLECGRMEAMPESEDKSPKDVLMGHTRLRGGKGHLTSSSEVLCGGNDREFTAKGPLKLGHSTYTDVFELLLFNELGKPLVDRSIARSVAVLMRNQLAEKLGINNDEIGCTTKPVNYEGREVQAIVLFDNAAGGAGFSIQASDYVVELLKGAKKIASSCHCDKACHRCLVDYSTQHVLDLLDRRKVTAYLNNGFFNNLSLPSGYELFDHHNRRELRPLMIAIEKTLAKDDDSDIYVELPISQLSDLGGWLLYQAFSRWVAERKVNLILAEAKVKELSLEQKVTLSWYQNHPNVKLLSKSLNGQSDYVVLASVTNKSYCYQWGIREDDHETLVTGVGSLGTLVDFDITRLNQSSDVEKIVIDSELDGKASEFGFKFWSHVFKCSPALMALMENQVIESVTYSDRYLAATLPFSLCFNALKFIGEHYKSCQIEINTGELARGYRPATVQDNFYDDYSRDKVVSLALESTAANISFKTAPKYKLPHSRTLVLSFDNGRQVTLWLDQGFGYWYADKRLSENHLPHNLYDEEHAKIIVEGQSQLSSGNFPTDIFVSFS

SEQ ID NO: 27108 - protein, 1121 aa, Vibrio alginolyticus
MQTYKHILTSFLNQRELNKPNAQPLYSYKVTAEEFESLKQSLIASVVSNGIHTYSNKPIREWSGCFVLYAAEWWRTSFQGGVWAWEPVLESLGLPANAISPTQRSEIVVKGLSFWGRKVLSNTKGRMLLGTVAVEGGLPQTLIQDPHSKLAHYFEQVIQDYGQFANSRLSAASIAKAHAHYIAASYRDETVYSIVAQVAESIYSLVDKHGLEEQSDPLHYLNTVDANWSQSLPLNMEPEAARTLLGNALGLAVEVQRRLPNSIKVLRSLRKSYSHYASMLDEFALGTEEVYQWKTQVDITLKSRLNVQFLQQLFGSVNLPERINLFAVGQKSLLLAKAIKRGTDSEHYLLDVYTTSLPEDWVDCDIQLKATDDLGNSWYAPVLGGAGLDVNEPWVFTQHNDEWLFKDAGNVTCEESNALVSVPEPLSHLELGSVGIIKNRILYEANTQTSSEFYFGEYCVSLQQEDTHSLEYNLVGQSVSYQTNPSKCFIGLPSLVAIDEAGRQTPIANTQLRWRNTMLEQWQTMSTVPFGKVDIALFENNKPVKRFTVGLLPDDFVIDFQPSHSVQIGQIGFYSENQLPSIALEDNELIDILPSSVLSHAQEDQNEAKRSLDMLSSQAHPPAQINVRLWWQDQAKSLSMTLPFPAKGICLIGTLGEVVRNADAILVDRLNRYELFSYGVNDSLEVEFKLQARDIHGALSKSAYVKRSLPKGDALSAGLSLATFKEDIDSLFALSTSLDAIVKVSVLDNAHTIFNFNVNAYGNTLTPNRELCTVEIDNGHFIGALSMVPLDNPTFAPITLVKNDEQWHFPDEDAAPGAWLIYADEAEQGVRPLMWSKDLELLSSPGNRLEEAAAIGSRKDRLDKFSVVCGQLAVEFNAPEWAYIKGLLAFDSVPLTTFDLWRGAITKPEFMLAMLLSANKKEAERIWQFSKQFPFLWHSLKARDAIAVINAFYASRIEEYGTDFSGIICDQIESKLDDLVTRYHGLQSLKNLLMYKIDSSRDKPSLNPAAYNQQLFDLRNALNNQYDESHWPCAFADHILNNVINSVNEQLSGVCFTTKNLYRNNVMNAPVLLALSTCGSASLRVTPEVVHAMRQYKSFDPDYFEQAFALTHQMIFGLVNS

SEQ ID NO: 27109 - protein, 1452 aa, Vibrio campbellii HY01
MLSTVIPTLLEFCQDGKKEQLKGPWHGRRMITFTDSRQGTARFAAKSQQDAERQFLRAALFHLVADRTLKSGALTPEQEADLKKYKSRLAMFIEDGDDDMVEIMEEKIAALCGGGDVSIPWADVEHELAKEKELQYWIKDSYQRFDDKMTMVKDPVLLARLLLLREFNSRPKRQNTLETLGLIRMEYPALKDKGNTAPSEWVALFDDRDRAQSEWVNFLTLCLNFHVRANKAISLTEEQLRWIGAKFSPGLISAPDDDSPFRNVQSWPQVRKGAVQPRLVRLLATAFNLDITETQDKTRLNIILQDAWNVLQRYVLAGSGDGYRLELEHQVSFSLLAEKWQCPHTQKIIDTPLAKITPYLNVKGERDEQVCRLLEAPVYPYPYGRQIEDGSPVALNVVRDWQEQSDIANLRKENAWSDISDRIIERTPYFRVAEHSAQLPAPLLRDYEDKFKKGAINVLSCSTTMEMGVDIGGISVVAMNNAPPNPANYLQRAGRAGRRGETKSVALTLCKTTPHGEYIFSHTRWAFDTPIHVPNVSLSSEYIVRRHINALLLSVFLRQKNISDNSLRLSCGNFFLSLHEQCASQAELFINWCMTDALDHMSDGLETLLRRTSLEATSKMSLVQESAQQMKTILCSWQKEHQLLCEQSEAVKADTNRLSIAQAAVETQIQRLEGEYLLSELARKGFLPGYGFPTDVVSLNNDNAESINRRKALIQAAKEAKSAKNDTLEHRIDNLYSARDYPSRDLSVAIRDYAPGSEVVLDGRVYQSAGVILNWHSPASADQVSEIQSLMWAWRCQQCGASGTERQMPKVCSCCEAQLASDSYHRFIEPGSFAVDIRHKPHNDISRLVHVPFQDPWVTVEQDKWEEMSVNPSALFRSSHNGHVYYHSAGLSNTGYALCLECGRMEAMPDSPDVTPYQVLENHTRLRGGKGEIERESEHFCGGNERDFAIKGPIKLGHSTRTDVFELLLFHADGTVLNNRTIARSISVLLRNELAAKLGINSDEVGCTTKPVNYQEHEAQAIVLYDCAAGGAGFAIKTPEFLIALLQAVKKKAVDCHCDKACHRCLVDYSTQHALELLNRWKVIEFLDNDFFARLSLPDEFKLFDRDNRRELRPLMTAIEQSLAHTIDPELCLYMQRDTLDDLSKWPLIDALYSWARERTVKVVLLSTESSALTTPEQISLSWLANHPNIDLLQRDDAIKRDMTLCAEILSGNKAQSWGYRDEYEAQLVTGFGSRPMLSAIKLDALTHPERIGTVNIHHELNHSVKAFGALFWSKVLKASDLLLKKMQTHQIVEVEYCDRYLAAPLPFSLCLSVVGALLAHYKDCKASIITGGLKDGGYLPESAQDNWSSNDARDKVVNRCIEKTQLDITFETKPKYQLPHARTMTFTFDDGAKVTLWLDQGFGYWWVNKYLPENQFPADLTVDEQAECIVQGPWRLKSGDWPTVLFFSIDE

SEQ ID NO: 27110 - protein, 1125 aa, Vibrio campbellii HY01
MKTFRHCIADILSSRDLERVSGAPLYSYKLTDGEYSSLQTSLIDSLRKSHIESYIPKSMSSEWAGAFVMYAAEWWRKEFNGGHWSWEPIFKSLNIQDTDLAANQRNTLIEAGFRFWRRPVLCNGQGRMFLGTVAVEGGLPLQLITDPNNKLSHYFEQVIKDFGKYALSKPNAVAIAQAHDHCIVPSFRTDAVYSVVGKIAEAIFQLTDQYGLDEQHDPLRFLDAVAPDWSTSLPLNIDHDVAKGLLNRALGQAIAVQRRLPHSLRLIRRLTQTYNPHAFVDDEFQQTEQSWTYQLAISLRPRLSAQYIQQLFGMQVLPERFSLFAMGKKPLLLAKAFKPKNNTERYLLDVMTCELPDDWFDCEIQLMARGDEGQSWYAPLLGGSALDAEEPWVFADNNGEWTFVGAGDVNCESSSAVIALSSELADVSLSPVSCVMGSVTTPHAQSLYLFNETGRYSFGNYVVQLGETSEPNREYVWQGEELPYQTVPTKCFIGKPALLALSSLGGQQRIASERLRWHDGAKQQWCSFETLPLGQSEVAYIEGGRVKKRFRLASLPNDIAIEFLPGSQINRGQIVISSSRPPMVAVAQPTVGHLDYDVSRACDAVTIDLFCAQEQPPAVLDIDLWWQEKPKAISLTLPFPSKGICLLDESQQLVPCHSELLVDKINGYELHGYGVDGEIELQFLLKAQDVRGAFSRSAFFSAVLPSVDALASGLSLSSFRTEIQSLFALSSSLDAKVQLTVSHHGQALYTCALSAYECALMPDRESNSVALAQAIDDKGTPELYTIPLDRPDHPPLALMPASMTDGMSMQWLFPQEEIEAGAWLIYSDNPQFGLRPLMWSKDLECLSAPSNGFEMAAGIGRRAERLEAFASVALEMAYDFNRPEWKYARTLLAFDHVPLTTFDLWRGVLRQPEFMLALLLNANKKEIDQVWKMDKQFPLLWYALKATSAVKVTEAFYYYLLERLGEDMADVAQLRIQKKLAELVSYFPGLAPLAKLLQFKLGMVEQKPSLEPPAYMQHMFDCRNALSQRQSDVSWPTVFADHIFQSVMKNINAQWVQLCLTTKHGFKNNVMNAPVLLALATSNQAELTMTPEVVHAMREYRRFDPEYFDDSFALTQKMIIGLLAI

SEQ ID NO: 27111 - protein, 2145 aa, Vibrio caribbeanicus
MSTKAINFKSLYKDLSSVTSQAVINRLQLKSAPLRKFLQSEFQVKYGKGNDFFAQPVFEATFGWSSEGCENDLNGLVTQGKLEQTFVNNLSQPPMPFPDSSEEKEEYRLKGISEDRWAEDIQEDYTWPLDRPPYKHQLEAWDHLSSDKVKSVVVTSGTGSGKTECFLVPLLNDLAKQSNRAVEPLEGTQAIFLYPLNALINSQKERLSAWTRGFEGKVRFALYNGETPTQAPSKTISNASLSKNTASELVTNRKDIWSSPPPILVTNATMLEYMLIRQQDEDILAKSQGKLKWIVLDEAHTYVGSQAAEIALLLRRVMHAYNVKPEDVRFVATSATIGDKNKQDETNRDLQRFLAKVAGVLPEQVAVVNGHRAIPHINSTGMESSFSLKKAREMSSGELYDYMSSFPVLREMRESLTREPHTLEEIARILESSKSERISQVELTKALDIIDLAVTAYPQGDDSQQAFLPVRAHIFHRSQRGLWACSDPSCCHKANTELQEGWKFGMVYTSERTHCEGDCGAPVFELTHCKDCGTPSLAAAKTTAKGGIKLLEPRETDLLDDYVDEIDEYDQLSEESIDTEFEANVQIFAREDALGNTHDQLGCTHVSIDPKTNRISEGFESGHLDIFYNQNDRDDGLRCAHCHGVENVPNTQFKRALLGSPFLMGSLVPAMLRHIPGDNSDDLKGKRLITFTDSRQGTARFSAKMQLDSERNWTRSQVYKTAVLEARELDLPQNVRDLQTTIQVMKDSKVPDAVIAPMEQNYLEQLKKIPSKKVSWSELKERLSTLPEIQLLSGAELDLLEGKALEKYDERIPGEYRKRSELLSDASNLADLFLKREFSRRGKNANNLESMGLISLHYPVIAQLTEEDLTSSEWRSLGFNLEDLRHYLKICMDFYIRENTLVEIDRSVINWMGAKINPRLLKESSYEYKDEFEKRALFRFPVVNNGLQHRLVRLLELGSGRIAKDEKELFNSVLLFVWGLLTKRTQLLTLSERQEMSTGNEISGYNLKFDEKVEFAPIEKAWLCPITNRWLDTTFRGLSPYTTGSSTLDDVKCDEPFEISHPDAEILNSSPAGIRNWLTDEDVLNAHRDHGRWSDINDRVIAGVPLVRAAEHSAQQSSDKLKRLEKAFKKDYLNVLSCSTTMEMGVDIGSLSMVAMNNVPPSTSNYLQRAGRAGRRRESTALALTFCKATPHGERVFSEPKWPFATPIRVPKVSLDSGTIVQRHINAFLLASFLKIEKSRSNNLLKMQVGAFFLGDGGLNPFNAFRNWLAGPARSDANVLAGIDSLKFDSVFAGHLNSILMESALNAIESSHTKWMRRYDSLNTQIEATSDTNSPASKKLARQLKRLERDYLLSELANTSYLPGYGFPTGVVQLITDNRSEKNSKDDGKSDHRNSYPSRGLEVALREYAPGAEIVRDGAVYQSQGLQLNWKMPFSGNDIKQEQLIEYQWECEHCGNIGFESVSSERENIRCTDCDSDRLTWSEFIVPSGFVVDFNKPLHNNYVSPNYSGYREPKVALSDAQWQPLSNTGVGRYRVSEYGSIFHYNDGEGGGYAMCWCCGRAEPLSVEKTPKGNVRLSKEPHILNTHKRLQGFKVKGEVMCEGVKDGWGIKVSEISQSEREISMPFIMGYPQSTAMFELQLKNPTSGNWISDETLLYTLGVALRQMYSDEKGITTQELGVVTKLKRTESFEEVVSLYIFDSATQGAGFSSSMPEVLSRLLDGLMKYLKQCPNDCETACHACLLDYDTQHNVKVLNRNYLIKQLEDNKILEGLALATDRCFFGDSSVVELSSASQVLSRFGHSCNHVSVFLSTPEWHFGEWSIREKITTLATKGIPCTVYLSKELAESINSDLAWEIARTMPVGIINFQELDKPIELASGGQPVMSLKVDSESHWYATDEMGQLGANEHWGSGEDLCLVTAVKELEINSTKFNLEELAQASNLNENSFILSDVTSLQGSITSFGVSFVDLLVDNIPSLNETLHNNIESIHYSDQYVVSPISVVLINHVLAAFNKRYGHFSSEINTVAPRKYVTGQRVSSSVGDNFLEANDVLDFIYDSSRALGAEVYGDIVDKSELSHSRIMRIDLKDGREIKLLFDHGMGYWSRSRDYPQKFDFKNVGCEASSINDWNFGLRDSGKETFIAIKIEE

SEQ ID NO: 27112 - protein, 1169 aa, Vibrio caribbeanicus
MIIENVQNPVASMQSWFNQFESRRAKPKKGMPLWALKVTDEELQQMNQLLRALFRAKDPSVVFNQHSCAGYGKKFDQIFTLYLATWIQRNFTGGKERWPVVLRSIDISHDNRLNTYIYDSVKAGLKYWGIELYSTSSANQYFATLYCQGGFPRSGLVGLSSGPVPEYLDKVISQYALFHHTSEINDIANKQLELLPETLKQVAFARLATVLVTKLMEYRDRYHLHGESDPVIALNVRYPQWRDELPFLLCDEEAYELISRLVRKTSAIIRREQNPVRIKRYLREDMGHWDLVAETYVNHTIHPQDLSRVLSLENLPKFFDLYTQTNTGERVRTASFNLKGYANQRWQVITKFAHFYNADAASNIGYELWSDGRKFNSHTYYRGEELNKALPWIFSTEGEKSQYLGQGKVQVKQASAIIVHAGLVEPATSQSKVEKVGRIASLDRDVYRVVGKVKVELDYDFIEVVTGADEAQDVTCWLEGKRNREAISHQHVFEGKPTGMMRFGVNKSQLIPSDELFWKSVDSDSLVPLNSDAFTYGLGSVIWFNSGQVMWQMKCAILPASSDFNVIHYGKGEIELKAVGFKNTDLGFVENEKNWLRDVEVIEEMFLAEVQIPASMPDTFHPVLGWNNSSKNTLTFEFDSLQSGVCLLGSKGNTLNARGNKITLDDLYASSLKVKLGQESRSISVSAALLQHKTIKASITDIIQIPESKVTVGSGDLARMAQALFTQSDDTRDRVSFRFYSGRELLESRVPAIEQFKYPVASLKDDRSMLRIYGAHDHRNPESIQLYTAPIWDLSREHTPLVKSLGERGELLFAMPEINEPGPWFVYAQNDRKIQPRAVLVAQNETGIKEYNYSRLQLSIRDLLFNPETRSFDYSEMDAALKELMFDLQHDDWHTVQSFVEQLSIANPTTFHIFKRLAANPNVFASLLLKQENLEEFESVWSISLDMPFEWLSVPLNQWIDAIRLTTKSTMESLVMMKDQLPVDQFEQIQKTMLKSRLQNLSDKGEYFAAVVDAALFALYDIKSSWMDLPIYASEEKPSYIADFHKQKSEYFSRQEGRLLTQIQNKHNDIRLKDLLDTRLSRDFLDAELKGFTQHYSVDKSKATRLAIPLELPVKVALHNAGIYPAADINEEELRLVNFALNRLSQFDRVWTQESMAIALKSAVKLRAQ

SEQ ID NO: 27113 - protein, 2068 aa, Vibrio cholerae
MQYFESLVDQLTKRAARATLGQFGLRSKPLREFLWQSFSQAPGKEGAFLADPVFEATFGWKPHTETMADLAGGLLDKAIVHAMANPPKELREDYQFEKHWAPYSHQHEAWSHLLQHSPKSVMVSSGTGSGKTECFLVPILNDIVTRESQPDGVEALFLYPLNALINSQRERLTAWTHQLGSQVKFCLFNGDTPEAVSAEERKLHPNEQLSRKELRENPAQILVTNSTMLEYMLVRQKDASILKRSQGKLRWIVLDEAHTYIGSQAAELSLLLRRVMHGFGVTPDQVRFVATSATIGGEDSDGELKAFLADVAGVDISQVHLVKGQREIKPLKALEQVKAMDLVHVNAIEDELQRYDYLSALPPLRTLRQHLSTTDNRMTLSAISKLLSATDEPLSEAETLKWMDICAGTKDVNGEAFIPFRLHIFHRVASGLWACSNKDCKAKAGTPLESLDWRFGMVSMSRRESCSCGSPMFEMVSCNGCGTSLLATNVKTAADSGDTFLHLTKPDSAIDDFALDIAGEDDDVSSYEDEEEGEQYDRFGLISPLPGDKTGEYWLDNQRKATTAKSEGGFLIHRVEGYRNSLGALSLRCPCCQQTKVKNFEFFRYFKNGAPFMLSTVIPTLLEYCQDGKKEQKKGPWNGRRMITFTDSRQGTARFSAKSQQDAERQFLRSTLFHLILDKAIRESGSGSPESAELEKYKKMLDMAKMSEDEDMVEFVESKIASLVGASSKPVSVSWSDAEDFLADQKEVQLWIKKFYEHFDDRMEMVTHPKLLARLLLLREFNSRPKRQNTLETMGLVAMEYPLLAQKANTAPKEWLRFFDDVEKGRTEWVNFLTLAVNFHVRSLKAVRLTKEQLNWIGAKYQPTLLVAQGESTHIWNVESWPKVTRGGSIQPRLARLLSCAFNIDLDEAYNRAEVNEILRQAWNALQSSVLTPSGDGFRLELEQQVSFSLLKEKHQCPHTQKIIDKPLLGITPYLNASGEREEQLCRRLLTPDYPYPFGRDPKTGESVELAKTREWQEQDALIDIRKENAWSDIADRVIERTPYFRVAEHSAQLKASQLRQYEKDFKEGRINVLSCSTTMEMGVDIGGISVVAMNNAPPNPANYLQRAGRAGRRGESKSIALTLCKSTPHGEHIFSNTRWAFDTQIKVPNVSLSSEYIVRRHVNSLLLSTFLNKVVSSENNLKLNCGTFFKAGHELTASYAEQFIDWCWEEAQEMVQSGLDTLLLRTALEANSRVEVLNTAAKHLETIMSRWTAEHQLLLEQSKSLADNPNVLSTAQAAVESQIQRLEGEFLLSDLARKGFLPGYGFPTDVVSLNTDHAKEIERRKRKIKEKLDNVDDNTSRKDNLYSAGGFPSRDLSVAIRDYAPGNDVVIDGRVYQSAGVLLNWHSPASADQVKEIQALRWAWRCDQCGASNTSTLRPERCECCGNEFLFGDEKSKDLIHPYIQPASFAVDIRSEPHNDISRLNHVPFNDPWVTVDGKEWQHVSVNPSAAYRSSHNGHIYYYSGGPTNVGYALCLECGRMEAMPEQGNKSSKEVLANHYRLRGGKGPLATAGELYCGGNEREFTIKGPLKLGHSTFTDVFELILFNDLGHPLVDRTIARSISVLIRNQLAEKLGINSDEIGCTTKPVNFEGREVQAVVLFDNAAGGAGFAIQASEHLVELLQGAKKVAAHCSCDKACHRCLVDYSTQHVLELLDRRKVASYLSIDFFRNLALPDEYQIFASNNRRELRPLTTAIEKALSKLSEAELYLTLPKKQLDELGDWTLYHAFNRWVEDRRVNVVLAENGDDELTIQQKVLLNWYLNHPNVNLYSVRTPPLSNGVLLASVVDDTKAYQWGYFSNDTDTLICGTDSFIKPTLFDSTRLNFEGGSLKKVVVHEELNGAVKDFGFKFWSYVFKHSPELMALMKSQQLQSATYSDRYLAAPLPLSLCFSALKFLGEHYKGCTTQVVTGELHRSAKPMTVQDNFEDEYSRDKVFRLIADATEANMSFRSRPKYELPHARVLELVFDSGTKVTLWLDQGFGYWYADKYLPENQLERDVSEEELADIISAGHSIIRSGKFSTDIFVSLS

SEQ ID NO: 27114 - protein, 1118 aa, Vibrio cholerae
MQTYKNVIASILEVRKLTKPNGLPIYSYKITPDEFSQLRTALIASMKSHGVQFYASKPTREWAGCFVLFAAEWWRNSFQGGVWAWEQVLDSLGLGANDFSPLQRSEIVAKGLSFWGRKVLSNTKGRMFLGTVAVEGGLPQALLLDPNSKLSYYFEQVIQDYGQYANAQLSAVSIAMAHSHCIPSSFRDDAVYSIVAQVAEAIYQLVDKHALDEQEDPLHYLNTVEKAWQHDLPLNIDERTVHQLLGNALGMAVEAQRRLPNSIKILRSLRKSYSNYASMLDEEEAFEWRHQVSITLKNRLNENFLQQMFGTRSLPDRFHLFAVGQKTLLLAKAFKNGKVSEQYWLDVFTQSLPDTWFDAEIQLKATDDHGNEWFAPVIGGAGVDDDEPWVFTQHNDEWLLHGSGSVSCEETNALVSLPHGFSVECGDLIGYAGERTLVAIGSQDGEPTEHWFAGHCISLMQDDSHSLEYSLVGQTLVYQTNPSKCFLGMPELIAIDQRGNQSKVASSQLRWRNTLLEQWQSIDSVPFGKVDIALFENNKPKKRFTVGLLPSDFDIKHMSSDSVHIGQIAFTSKHTLPTIALGECQQLDVLPSSVLSKPLTVVGEQTRSLDLVSHAPHPPAHVSVSAWWVDRSKSLSMTLPFPSKGICLIGSSGEVIRSRDVVLADKLNHYELFGYGVKDALEVEFALQAIDVSGSLAKTAYVKRDLPTGNVLSSGFCMAAFKQDIESLLALSSSLDALVRVSVLESAQPIFTFNIQSYDASLIPDKDNNLISLKGEERELSLSMVPLDNPSFAPIPLQREQEHWVFPNEYAKPGAWLIFSDDVQRNVRPLMWSKELELLSSPENRFEAAAAIGVRNQRLEAFATACGQLATEFDAPEWPYIKALLAFDSVPLTTFDVWRSAVTKPEFMLAMLLAANKKECERIWLFSQQFPLLWQSVKVRKAIKVVEAFYASRLSMYGEDFADIIRSQIKTKLDALVSRYSGLDSLADLLMHKIDPSHPSKKINHAAYMQKIFDLRNDLSNRYDEAYWPCDFAAHIIASVTRRVDRQLANVCLTSNNVYRNNVMNAPVLLALSICGVAKLTINPEIVHALTQYRNFDAEYFEQAFSLTHQMIFCLTNP

SEQ ID NO: 27115 - protein, 2068 aa, Vibrio cholerae; identical to SEQ ID NO: 27113

SEQ ID NO: 27116 - protein, 1118 aa, Vibrio cholerae
MQTYKNVIASILEVRKLTKPNGLPIYSYKITPDEFSQLRTALIASMKSHGVQFYASKPTREWAGCFVLFAAEWWRNSFQGGVWAWEQVLDSLGLGANDFSPLQRSEIVAKGLSFWGRKVLSNTKGRMFLGTVAVEGGLPQALLLDPNSKLSYYFELVIQDYGQYANAQLSAVSIAMAHSHCIPSSFRDDAVYSIVAQVAEAIYQLVDKHALDEQEDPLHYLNTVEKAWQHDLPLNIDERTVHQLLGNALGMAVEAQRRLPNSIKILRSLRKSYSNYASMLDEEEAFEWRHQVSITLKNRLNENFLQQMFGTRSLPDRFHLFAVGQKTLLLAKAFKNGKVSEQYWLDVFTQSLPDTWFDAEIQLKATDDHGNEWFAPVIGGAGVDDDEPWVFTQHNDEWLLHGSGSVSCEETNALVSLPHGFSVECGDLIGYAGERTLVAIGSQDGEPTEHWFAGHCISLMQDDSHSLEYSLVGQTLVYQTNPSKCFLGMPELIAIDQRGNQSKVASSQLRWRNTLLEQWQSIDSVPFGKVDIALFENNKPKKRFTVGLLPSDFDIKHMSSDSVHIGQIAFTSKHTLPTIALGECQQLDVLPSSVLSKPLTVVGEQTRSLDLVSHAPHPPAHVSVSAWWVDRSKSLSMTLLFPSKGICLIGSSGEVIRSRDVVLADKLNHYELFGYGVKDALEVEFALQAIDVSGSLAKTAYVKRDLPTGNVLSSGFCMAAFKQDIESLLALSSSLDALVRVSVLESAQPIFTFNIQSYDASLIPDKDNNLISLKGEERELSLSMVPLDNPSFAPIPLQREQEHWVFPNEYAKPGAWLIFSDDVQRNVRPLMWSKELELLSSPENRFEAAAAIGVRNQRLEAFATACGQLATEFDAPEWPYIKALLAFDSVPLTTFDVWRSAVTKPEFMLAMLLAANKKKCERIWLFSQQFPLLWQSVKVRKAIKVVEAFYASCLSMYGEDFADIIRSQIKTKLDALVSRYSGLDSLADLLMHKIDPSHPSKKINHAAYMQKIFDLRNDLSNRYDEAYWPCDFAAHIIASVTRRVDRQLANVCLTSNNVYRNNVMNAPVLLALSTCGVAKLTINPEIVHALTQYRNFDAEYFEQAFSLTHQMIFCLTNP

SEQ ID NO: 27117 - protein, 2104 aa, Vibrio cholerae HE-45
MKGYFSTLKQQANNRAKESTLSVLGISNPSLRNHLSERFETVEPFVHGPVFEQTFAWEESKVQMNDLVSEGLLSKELVTALDDDINGRYAFKAEWFPFKHQLAAWRDLLNPEPKSRVITSGTGSGKTECFMVPVLEDLVREVKTEGQALKGVRALFLYPLNALINSQKERLNAWTQHFEGDIRFCLFNGNTPNDPSASQSQIQIKQPQEVLSRNLMRDNPAPILVTNGTMLEYMLVRQADAPIIEQSKGKLRWIVLDEAHTYVGSQAAELALQLRRVMQAFEVEPENVRFVATSATIAGSEAESQLRRYLAELAGVSEAQVDVIGGKRAVPKLPDYSLNNRDISLLESIDPEGELPENKKDIQDPYVSASRYRALCESEIAKRIRSAFTANGSSPLLFSELASSLSPINLTENELYRWLDICTGTKESYDRNAQPFLKLRAHYFQRTLNGLWACIDPNCSEKSDSLLNGAWQFGQVLSEQRQKCDCGAPVLELSFCSECNEPHLLGVDKGGILTQWTGKVSDEFSLLEEGDKYIDEERTDQQSTPKASDSMLILSATENQENMFFETIYDHDGKEASVKSGSIRLAKYLDEGEQCSKCGFSGRGQHAKALRRGLLGAPFYTTTAVPTVLEYCPDIEKDKDTGYGPLDAPGRGRRLITFTDSRQGTAKMSVQMQQEAERSRLRGLVFKELRKHVEEELAIDDELLDIVRPYIEESTVEDIEEFILIAGKRKPQVAQALTQYLSALEKGASRYSPKAISWKELADRISMDKDLQNSILTENKRLSPEVFDVTTGSLKLANMLLTRELARRPKFKNNLETQGLIRFVYPEVEKLSKAPEQWKEKGGLTLSDWKDYLKICLDFFVRENTYVNIDREWGRWIGMHFAPKTLIAPDSKEEEESRIKKWPQINKGRKIQQRLITLLRVATGIDIEKPEGEQLINGWLQDAWKTLTKLQILRDSTSDKQYSLDLREVSFALLTEGFICPVTNKVLDTTFRGLTPYIPANGNYADYQCTRVNLPPVWEFKGSDRGYDDSLQSIRSDIEKSQEIRSLREQNVWTDINDRTVEGGFYYATAEHSAQQSAERLADYEDKFKSGKKNVLNCSTTMEMGVDIGGITAVVMNNVPPHPANFLQRAGRAGRSKESRALSYTICKNNPHDTLVFNNPKWAFTTSIPAPHVEFSSEKLVQRHVNSYLLGRYLVDVIGPTDKEKINLNLEWFYLPDIGGKSVAECFSLWVMSLENSYLDGVKKLVKGTALSGVSPDILAKQTAKKILELSEKWVGEYKYIQTELNDTAPNGPYAHKLDNEKSRLCREYLLRDLATKAFLPGYGFPTDVVSIDTDNVADYIREKKFKKNKNKFEREDNVSINRGLPSRNLSVAIREYAPGSEIVIDGRVHRSAGISLNWQNVHVEGSRDAQKFDLAWRCPHCGQTGYESNLNKQANFESLTCSNVMCGKVIPINNECRKKVIQPTGFVTDYYIEPTNNITHHTYVPVQPAWVSAKGVPVPLPVSELGYMITDHQGKVFHYSSGMSGTGFALCMACGRAESMTSTEELPKALNHERTHKPPRPSKFAKDENDRHGYCDGSGRILESIHLGVHSQTDVFELVLRHPDTGEYIPDSDEGRVIATSLVVALRKALVKTLGISVNEVEYSVRPAVVGESQHAMVLQLFDSVSGGAGFATSTSHYITQVLRQMLRELECPKACDAFCPDCLLESDSRHDTDKLNRQIALKWLGDNFTRHLNIPPKYQRLLTEAEYCPLSIKEQLISVVAGQVSEVKFVLSSNIERWDTSVNLLKSRVYEMLSNSINVSFIVPDVDYPDDIKLFLKNINNIGASLYITKNETGPMVFQALTDVGCFSLANLEDSARTPGIDWLMSDDISVISTVEPELSVIPYTIEVEPKNLSQVGAIQIEAIEELNGTLTQLGERFKQLVCDSDSRVKELLSSNTIKSVHYSDRYLQSPSAVMLVSEAIKGLVCGHNDCDVSIDTCFDEKNGRPPAFISHDWDYKADFRQIFQAWLENATGRTTKINIVEDKKTIQHRRVLTIVFESDNTVQITLDQGFGYWWLELTHGLHRFDFERDCLDQVKRMLEVQKKASVKNSADWSTLITTSLL

SEQ ID NO: 27118 - protein, 1102 aa, Vibrio cholerae HE-45
MDLNIPPVEGRINTTSNSILPITIEEWLTRLLHRNELSLPNGQPLYQYHVTESEYIQLRSILRRIGKPQSSKNWCAAFSIFCSEWYRRFYMGGWTWFGIWESLGYELDANSRQNVVERGLKAYWGRPISQYQDERNSYLGSLFKEGGLPYGLLASEGSRFQAIFKRILKSYEDAKDFGYSPVELVTECMDSLPEAFKQETTVNLITRMTELLLRLTEDYDLDEQNNPAAYLDDNAGGWRELFPIPLDGNAGNEFLSGLLSSASQQHRNKKQADKRITCQQWLANTSECQFVTQIKLAKIVDMPFRREDTVTSRVELFIYEGSTPLAEVGVGHIHSDTGKCSVVLRSTSCRFNRVDPKQTLYLIVLQAGKLLHREEISNSEIMIGEVPVVLRCIDEKMMFVGTGSISTRAESLTVLCPPNAVVDESETKDVNIKTDYGYTVGTFSGTLKVSLNNGLEIDRYLITTSANNTHHDDVRIDGKILPFSTEKGQPVYLGLPKITTQDICSQVLVAGEPVGGGHKTSIFGLQSIKVKSNRGHTLFQKRLAILPKSFDIRLISSENADRGNIELHCMNRFTVKVLNAGVDVVARSTEYGKCLEIISALGMPPRELLLEITTNLMAAPVVVSVPFPSTGVLAYDKDNNKLPQLLTVTDLLGSRLMLFPRLGKQCSYKIELSSPNSSRQAYYLWEYKVQDQPLEISLYEFRHNVRELLATNGNLDDRVRLEISGACKTVQFQIGRYSSVTQFENSCIKFEGAIKDFGMIKPVLIDLTNPAVHPKPLTQRESQGVATGIFELSSSPANPSLIVPSPDSQVAFRARFVPGSKITENPNDVRSLQKAAAVCHVNPNAIDEVLVQMTMDFDHSGWTFLADLETKFGYLPLATFEIWKSVVKKQEVLAALAFRFDNPIPLMSRLQSEFNVMWELIPIVAWKRASQNFIQGIRDDGYPDRIVTGLISQKLDDISQVCPIFESDCRHLVLEKAIIPQENLRGLLQYFSAHSVSEVRNLHTSDRRWPTMFSNDVEKWCRDHYQDLVTFSIPDGKGFQKAVLYFPLCASALVLQKTTLSEIGICDEPANEFFIRQLIEFDRQWFVPMYKLLLCIMAGERK

SEQ ID NO: 27119 - protein, 2068 aa, Vibrio cholerae O1 str. EM-1676A
MQYFESLVDQLTKRAARATLGQFGLRSKPLREFLWQSFSQAPGKEGAFLADPVFEATFGWKPHTETMADLAGGLLDKAIVHAMANPPKELREDYQFEKHWAPYSHQHEAWSHLLQHSPKSVMVSSGTGSGKTECFLVPILNDIVTRESQPDGVEALFLYPLNALINSQRERLTAWTHQLGSQVKFCLFNGDTPEAVSAEERKLHPNEQLSRKELRENPAQILVTNSTMLEYMLVRQKDASILKRSQGKLRWIVLDEAHTYIGSQAAELSLLLRRVMHGFGVTPDQVRFVATSATIGGEDSDGELKAFLADVAGVDISQVHLVKGQREIKPLKALEQVKAMDLAHVNAIEDELQRYDYLSALPPLRTLRQHLSTTDNRMTLSAISKLLSATDEPLSEAETLKWMDICAGTKDVNGEAFIPFRLHIFHRVASGLWACSNKDCKAKAGTPLESLDWRFGMVSMSRRESCSCGSPMFEMVSCNGCGTSLLATNVKTAADSGDTFLHLTKPDSAIDDFALDIAGEDDDVSSYEDEEEGEQYDRFGLISPLPGDETGEYWLDNQRKATTAKSEGGFLIHRVEGYRNSLGALSLRCPCCQQTKVKNFEFFRYFKNGAPFMLSTVIPTLLEYCQDGKKEQKKGPWNGRRMITFTDSRQGTARFSAKSQQDAERQFLRSTLFHLILDKAIRESGAGSPESAELEKYKKMLDMAKMSEDEDMVEFVESKIASLVGASSKPVRVSWSDAEDFLADQKEVQLWIKKFYEHFDDRMEMVTHPKLLARLLLLREFNSRPKRQNTLETMGLVAMEYPLLAQKANTAPKEWLRFFDDVEKGRTEWVTFLTLAVNFNVRSLKAVRLTKEQLNWIGAKYQPTLLVAQGESTHIWNVESWPKVTRGGSIQPRLARLLSCAFNIDLDEAYNRAEVNEILRQAWNALQSSVLTPSGDGFRLELEQQVSFSLLKEKHQCPHTQKIIDKPLLGITPYLNASGEREEQLCRRLLTPDYPYPFGRDPKTGESVELAKTREWQEQDALIDIRKENAWSDIADRVIERTPYFRVAEHSAQLKASQLRQYEKDFKEGRINVLSCSTTMEMGVDIGGISVVAMNNAPPNPANYLQRAGRAGRRGESKSIALTLCKSTPHGEHIFSNTRWAFDTQIKVPNVSLSSEYIVRRHVNSLLLSTFLNKVVPSENNLKLNCGTFFKAGHELTASYAEQFIDWCREEAQEMVQSGLDTLLLRTALEANSRVEVLNTAAKHLETIMSRWTAEHQLLLEQSKSLADNPNVLSTAQAAVESQIQRLEGEFLLSDLARKGFLPGYGFPTDVVSLNTDHAKEIERRKRKIKEKLDNVDDNTSRKDNLYSSGGFPSRDLSVAIRDYAPGNDVVIDGRVYQSAGVLLNWHSPASADQVKEIQALRWAWRCDQCGASNTSTLRPERCECCGNEFLFGDEKSKDLIHPYIQPASFAVDIRSEPHNDISRLNHVPFNDPWVTVDGKEWQHVSVNPSAAYRSSHNGHIYYYSGGPTNVGYALCLECGRMEAMPEQGNKSPKEVLANHYRLRGGKGPLATAGELYCGGNEREFTIKGPLKLGHSTFTDVFELILFNDLGHPLVDRTIARSISVLIRNQLAEKLGINSDEIGCTTKPVNFEGREVQAVVLFDNAAGGAGFAIQASEHLVELLQGAKKVAAHCSCDKACHRCLVDYSTQHVLELLDRRKVASYLSIDFFRNLALPDEYQIFASNNRRELRPLTTAIEKALSKLSEAELYLTLPKKQLDELGDWTLYHAFNRWVEDRRVNVVLAENGDDELTIQQKVLLNWYLNHPNVNLYSVRTPPLSNGVLLASVVDDTKAYQWGYFSNDTDTLICGTDSFIKPTLFDSTRLNFEGGSLKKVVVHEELNGAVKDFGFKFWSYVFKHSPELMALMKSQQLQSATYSDRYLVAPLPLSLCFSALKFLGEHYKGCTTQVVTGELHRSAKPMTVQDNFEDEYSRDKVFRLIADATEANMSFRSRPKYELPHARVLELVFDSGTKVTLWLDQGFGYWYADKYLPENQLERDVSEEELADIISAGHSIIRSGKFSTDIFVSLS

SEQ ID NO: 27120 - protein, 1118 aa, Vibrio cholerae O1 str. EM-1676A
MQTYKNVIASILEVRKLTKPNGLPIYSYKITPDEFSQLRTALIASMKSHGVQFYASKPTREWAGCFVLFAAEWWRNSFQGGVWAWEQVLDSLGLGANDFSPLQRSEIVAKGLSFWGRKVLSNTKGRMFLGTVAVEGGLPQALLLDPNSKLSYYFEQVIQDYGQYANAQLSAVSIAMAHSHCIPSSFRDEAVYSIVAQVAEAIYQLVDKHALDEQEDPLHYLNTVEKAWQHDLPLNIDERTVHQLLGNALGMAVEAQRRLPNSIKILRSLRKSYSNYASMLDEEEAFEWQHQVSITLKNRLNENFLQQMFGTRSLPDRFHLFAVGQKTLLLAKAFKNGKVSEQYWLDVFTQSLPDTWFDAEIQLKATDDHGNEWFAPVIGGAGVDDDEPWVFTQHNDEWLLHGSGSVSCEETNALVSLPHGFSVECGDLIGYAGERTLVAIGSQDGEPTEHWFASHCISLMQDDSHSLEYSLVGQTLVYQTNPSKCFLGMPELIAIDQRGNQSKVASSQLRWRNTLLEQWQSIDSVPFGKVDIALFENNKPKKRFTVGLLPSDFDIKHMSSDSVHIGQIAFTSKHTLPTIALGECQQLDVLPSSVLSKPLTVVGEQTRSLDLVNHAAHPPAHVSVLAWWVDRSKSLSMTLPFPSKGICLIGSSGEVIRSRDVVLADKLNHYELFGYGVKDALEVEFALQAIDISGSLAKTAYVKRDLPTGNVLSSGFCMAGFKQDIESLLALSSSLDALVRVSVLESAQPIFTFNIQSYDASLIPDKDNNLISLKGEERELSLSMVPLDNPSFAPIPLQREQENWVFPNEYAKPGAWLIFSDDVQRNVRPLMWSKELELLSSPENRFEAAAAIGVRNQRLEAFATACGQLATEFDAPEWPYIKALLAFYSVPLTTFDVWRSAVTKPEFMLAMLLAANKKECERIWLFSQQFPLLWQSVKVRKAIKVVEAFYASRLSMYGEDFADIIRSQIKTKLDALVSRYSGLDSLADLLMHKIDPSHPSKKINHAAYMQKIFDLRNDLSNRYDEAYWPCDFAAHIIASVTRRVDRQLANVCLTSNNVYRNNVMNAPVLLALSTCGVAKLTINPEIVHALTQYRNFDAEYFEQAFSLTHQMIFGLTNP

SEQ ID NO: 27121 - protein, 2068 aa, Vibrio cholerae V51; identical to SEQ ID NO: 27113

SEQ ID NO: 27122 - protein, 1118 aa, Vibrio cholerae V51; identical to SEQ ID NO: 27116

SEQ ID NO: 27123 - protein, 2141 aa, Vibrio ezurae NBRC 102218
MSTKAINFKSLYKDLSSVTSQAVINRLQLKSAPLRRFLQGEFQVKYGKGNDFFAQPVFEATFGWASENRDNDLQGLANQGKLERAFVENLSHPPMPFPDSFEEKEEYRSKGIVEQRWAEDIQEDYTWPLDRPPYKHQLEAWDYLSSDEVKSVVVTSGTGSGKTECFLVPLLNDLAKQSKQSTATLEGTQAIFLYPLNALINSQKERLSAWTRGFEGKVRFALYNGETPTQAPSKNLSNASFSRNSAPEQVTNRKDIWSSPPPILVTNATMLEYMLIRQQDEEILAKSQGKLKWIVLDEAHTYVGSQAAEIALLLRRVMHAYGVEPQDVRFVATSATIGDKNKQEETNRDLQRFLAKVAGVLPEQVAVVNGHRSIPEINATGRESSFSIENAKGMSSGELFDYMSGFPMLREMRELLTREPHTLEEIALILEPSKSESISQSELAKALEIIDLAVTAYPNGDSSQQAFLPVRAHIFHRSQRGLWACSDSNCCNKANTELQDGWKFGMVYTSERTHCEGECGAPVFELTHCKDCGTPSLAAAKTTAQGGIKLLEPRETDLLDDYVDEIDEYEQTSDEKIDTEFEANVQIFAKEDALGNAHDQLGCTHVSIDPKTNRISEAFESEHLDIFYNQNDRDDGLRCAHCHGVENVPNTQFKRALLGSPFLMGSLVPAMLRHIPGNNSDDLKGKRLITFTDSRQGTARFSAKMQLDSERNWTRSQVYKTAVLEAGGLDLPEELKKIKDSIEVMRENKFPEDMIAPLEKNYLEQLKKIPSKKVSWSELKERLSTLPEIQLLSGAELDLLEGKALEKYDERIPGEYRLRSELLSDADNLADLFLKREFSRRGKNANNLESMGLISLHYPAIAKLTEEDVTSSEWRSLGFNLEDLKHYLKICMDFYIRENTLVDIDRSVINWMGAKLNPRLLKESSYEYKDDFEKKALFRFPVVNNGLQHRLVRLLELGSGRVAKDERELFNSVLSFIWGLLTKRTQLLTLAERQEMSTGNELSGYNLKFDEKIEFAPIGKAWLCPVTNRWLDTTFRGLSPYTTGSSTLDDVRCDEPFEITHPETEIVNSSPADIRNWLADEDVLNTHRDHGRWSDINDRVIAGVPLVRAAEHSAQQSSDKLKRLEKAFKKDYLNVLSCSTTMEMGVDIGSLSMVAMNNVPPSTSNYLQRAGRAGRRRESTALALTFCKATPHGERVFSEPKWPFATPIRVPKVSLDSGTIVQRHINAFLLASFLKIEKSRSNNLLKMQVGAFFLGDSGLNPFNAFINWLAGPAGNDESVLAGIDSLKFDSVFAGHLNSILMESALNAIESSHIKWMRRYESLNTQIVATSDSNSPASKKLARQLKRLERDYLLAELANTGYLPGYGFPTGVVQLITDNRSENNSRDDGKSQHRTSYPSRGLEVALREYAPGSEIVRDGAVYQSQGLQLNWKMPFSGNDIKQEQLIEYQWECEHCGNIGFESVSSERANIRCTDCDSDRLTWSEFIVPSGFVVDFNKPLHNNYVSPSYSGYREPKVALNDAQWQPLSSSGVGRYRVSEYGSIFHYNDGEGGGYALCWCCGRAEPLSVEKTPMGHVRLSKEPHILKTHKRLQGFKVKGEVMCDGVREGWGVKTSEISKSEKEISMPFIMGYPQSTAMFELQLKNPTSGSWISDETLLYTLGVALRQMYSDEKGITTQELGVVTKHKRTESFEEVVSLYIFDSATQGAGFASSIPEVLSRLLDGLMDYLRQCPNGCETACHACLLDYDTQHNVKVLNRNYLIKQLEENKVLEGLALAADRRFFGDSSVVELSSASQVLSRLGHSCNRVSVFLGSPEWHFGEWSIREKITTLATKGIPCTVYLSKELAESIDSDLAWEIARTMPIGSVDFQQLTEPVDLASGAFPVMALKVGTKVHWYATDEVSQLGANEYWGSGEEKCLVTATKDLVLNSTKFNLEALAQSSTLSESSYILSDVSSLRGNINSFGESFVELLASNIQSLDETLNNNISSIHYSDQYVVSPISAVLINQILAALGKRYGRFSSEINTVAPRTGQRASTSIGDNFLEANDVLDFIYDSSQTLGIEVYGDIVDKSELSHSRIMRIELKDGCEVKLLFDHGMGYWSRSRDYSQKFDFKDVTYEASSVDEWDFTLKDSGKETFIAVKLN

SEQ ID NO: 27124 - protein, 1169 aa, Vibrio ezurae NBRC 102218
MILDGVQSPVVTMQQWFNEFESKRPKPKKGMPLWALKVTDEELQQMNKLLRALFRAKEPSVVFNQHSCAGYGKKFDQIFTLYLATWIQRNFTGGKERWPVVLRSIDISHSNRLNTYIYDSVRAGLKYWGIDLYSTSSANQYFATLYCQGGFPRSGLVGLSSGPVPEYLDKVISQYALFHHTSEISDISHQQLQLLPETLKQPPFAKLATVLITKLMEYRDTYYLHGEPDPVIALDVRHPQWRDELPFLLCDEEAHELIGRLVRRTSTIIRREQNPVRIKRYLREDMGHWDLVAETYVNHTIHPQDLSRVLSLESLPKFFDLYTQTNTGERVRTASFNLKGYANKRWQVITKFTHFYNADAASNIGYELWSDGHKFNSDTYYRGEELNKALPWIFSSEGEKSQYLGQGNVQVKQSAALIVHSGTVEAANSRSKVEKAGTIASLGRDIYRVVGKAKVELDYGFIEVTTGAEEAQDVTCWLEGQRNHEAISHQHVFVGKPVGMMRFGVNKSQPIPSEELFWKSVDSDSLLPLNSEALSYGLGSIIWFNAGQVMWQMKCAILPASSDFNVIHHGRGEIELKAVGFNNTDLGFVENEKNWLRDVDVIEDIFFAEVQIPASMPDTFHPVLGWNNSLINTLTFEFDSQQSGVCLLGRNGNTLNARGNKITLDDLYASSLKVKLNQEDSSISVSAALMQHKRIKAGVTGVIQIPESKTTIGSGELARMAQALFTQSDDTRDRVSFKFYSGKELLESRVPPIEQFKYPVASLRENNAMLRIHGAHKHSNSESIELYTAPIWDLSREHIPLLKSEGDRGELFFELPEINEPGPWFVYSKDDRKIQPRAVLVPQQELEKTSYDYSRLQLSIKDLPFDPETRSFDYSEMDASLRELMFDLQHGDWQTVQSFVEQLAIANPTTFHIFKRLSANPDVFAALLLKQESPEEFESVWSISHDMPFEWLNVSLRQWVEAISLTTKSTMDSLLMMKDKLPADQFKQIQNTMLKSRLQNLSDKGEYYAAIVEASIFILYGIKPSWLDMPIYSSEQGPSHIADFHKQKSEYFSRHEGRFLTHIQNKHNDIRLKEILDSRLSRDLLDAELKGFTQHYSVEKSKAMRLAIPLELPVKVALNNAGVYPAADIDEEESKLINFALNRLSQFDRVWMQESMAIALKSAVKSRAQ

SEQ ID NO: 27125 - protein, 2065 aa, Vibrio harveyi
MEYFESIIEQLTKRAARATLGQFGLRSKPLREFLWQAFSKAPGQEGAFLGDPVFEATFGWKPHTETMQALSGKLLSSRVVHAMANPPKALKEDYQFESSWFPYAHQHEAWQHLLQDEPRSVIVSSGTGSGKTECFLVPILSDIAARNSKAEGVEALFLYPLNALINSQRDRLAAWTHELGSDVKFCLYNGETKEQVPVAKQKAEPNQQLSRKALRDDPAQILVTNATMLEYMLVRQKDDPILRKSQGKLRWIVLDEAHTYIGSQAAELALLLRRVMHGFGVTPDQVRFVATSATIGGKDSDNDLKAFLADVAGVDITQVHLVKGHREITTLEELTTPQAMNLQQVKAIDDEVMRYQALESIVPLRVLRQHLSSDDNRMSLSQICKLLSATDEPMEEKTVLKWLDVCASTKGSDGQAFIPFRLHLFHRVASGLWTCANPSCKAKAGSALDALDWRFGMVYMSRRERCGCGSPVFEMTSCNGCGTSLLLADESIDKETGESVLSLTKPDSSIDDFSLDIEVDDSDALLELDEEESETHARLCMMAEHDREETGQYWLNNEGVLKPSTHNGAFQVHRVEGYSKSDGTGVALRCPCCQHTKIQNFDFYRHFRNGAPFMLSTVIPTLLEFCQDGKKEQLKGPWHGRRMITFTDSRQGTARFAAKSQQDAERQFLRAALFHLVADRTLKSGALTPEQEVDLKKYKSRLAMFIEDGDDDMVEIMEEKIAALCGGGDVSIPWSDVEHELAKEKELQYWIKDSYQRFDDKMTMVKAPVLLARLLLLREFNSRPKRQNTLETLGLIRMEYPAIKDKGNTAPNEWVALFDDRDRAQSEWVNFLTLCLNFHVRANKAISLTEEQQRWIGAKFSPGLIAAPGDDSPFRNVQSWPQVRKGSVQPRLVRLLATAFNLDITDTQDKTQLNIILQDAWNVLQRYVLAGSGDGYRLELEHQVSFSLLAEKWQCPHTQKIIDTPLAKITPYLNVKGERDEQVCRLLEAPVYPYPYGRQIEDGSPVALNVVRDWQEQSDIANLRKENAWSDISDRIIERTPYFRVAEHSAQLPAPLLRDYEDKFKKGAINVLSCSTTMEMGVDIGGISVVAMNNAPPNPANYLQRAGRAGRRGETKSVALTLCKNTPHGEHIFSHTRWAFDTPIHVPNVSLSSEYIVRRHINALLLSVFLRQKNISDNSLRLSCGNFFLSLHEQCASQAELFINWCMTDALDHMSDGLETLLRRTSLEATSKMSLVQESAQQMKTILCSWQKEHQLLCEQSEAVKADTNRLSIAQAAVETQIQRLEGEYLLSELARKGFLPGYGFPTDVVSLNNDNAESINRRKALIQAAKEAKSAKNDTLEHRIDNLYSARDYPSRDLSVAIRDYAPGSEVVLDGRVYQSAGVILNWHSPASADQVSEIQSLMWAWRCQQCGASGTERQMPKVCSCCEAQLASDSYHRFIEPGSFAVDIRHKPHNDISRLVHVPFQDPWVTVEQDKWEEMSVNPSALFRSSHNGHVYYHSAGLSNTGYALCLECGRMEAMPDSPDVTPYQVLENHTRLRGGKGEIERESEHFCGGNERDFAIKGPIKLGHSTRTDVFELLLFHADGTVLNNRTIARSISVLLRNELAAKLGINSDEVGCTTKPVNYQEHEAQAIVLYDCAAGGAGFAIKTPEFLIALLQAVKKKAVDCHCDKACHRCLVDYSTQHALELLNRWKVIEFLDNDFFARLSLPDEFKLFDRDNRRELRPLMTAIEQSLAHTIDPELCLYMQRDTLDDLSKWPLIDALYSWARERTVKVVLLSTESSALTTPEQISLSWLANHPNIDLLQRDDAIKRDMTLCAEILSGNKAQSWGYRDEYEAQLVTGFGSRPMLSAIKLDALTHPERIGTVNIHHELNHSVKAFGALFWSKVLKASDLLLKKMQTHQIVEVEYCDRYLAAPLPFSLCLSAVGALLGHYKDCNASIITGRLKEGGYLPESVQDNWSSDDARGKVVNRCIEKTQLDITFETKPKYQLPHARTMTFTFDDGAKVTLWLDQGFGYWWVDKYLPENQFPADLTVDEQAECIVQGPWHLKSGDWPTVIFFSIEE

SEQ ID NO: 27126 - protein, 1125 aa, Vibrio harveyi
MKTFRHCIADILSSRDLERVSGAPLYSYKLTDGEYSSLQTSLIDSLRKSHIESYIPKSMSSEWAGAFVMYAAEWWRKEFNGGHWSWEPIFKSLNIQDTDLAANQRNTLIEAGFRFWRRPVLCNGQGRMFLGTVAVEGGLPLQLITDPNNKLSHYFEQVIKDFGKYALSKPNAVAIAQAHDHCIVPSFRTDAVYSVVGKIAEAIFQLTDQYGLDEQHDPLRFLDAVAPDWSTSLPLNIDHDVAKGLLNRALGQAIAVQRRLPHSLRLIRRLTQTYNPHAFVDDDFQQTEQSWTYQLAISLRPRLSAQYIQQLFGMQVLPERFSLFAMGKKPLLLAKAFKPKNNTERYLLDVMTCELPDDWFDCEIQLMARGDEGQSWYAPLLGGSALDAEEPWVFADNNGEWTFVGAGDVNCESSSAVIALSSELADVSLSSVSCVMGSVTTPHAQSLYLFNETGRYSFGNYVVQLGETSEPNREYVWQGEELPYQTVPTKCFIGKPALLALSSLGGQQRIASEQLRWHDGAKQQWCSFETLPLGQSEVAYIEGGRVKKRFRLASLPNDIAIEFLPGSQINRGQIVISSSRPPMVAVAQPTVGHLDYDVSRACDAVTIDLFCAQEQPPAVLDIDLWWQEKPKAISLTLPFPSKGICLLDESQQLVPCHSELLVDKINGYELYGYGVDGEIELQFLLKAQDVRGAFSRSAFFSAVLPSVDALASGLSLSSFRTEIQSLFALSSSLDAKVQLTVSHHGQALYTCALSAYECALMPDRESNSVALAQAIDDKGTPELYTIPLDRPDHPPLALMPASMTDGMSMQWLFPQEEIEAGAWLIYSDNPQFGLRPLMWSKDLECLSAPSNGFEMAAGIGRRAERLEAFASVALEMAYDFNRPEWKYARTLLAFDHVPLTTFDLWRGVLRQPEFMLALLLKANKKEIDQVWKMDKQFPLLWYALKATSAVKVTEAFYHYLLERLGEDMADVAQLRIQKKLAELVSYFPGLAPLAKLLQFKLGMVEQKPSLEPPAYMQHMFDCRNALSQRQSDVSWPTVFADHIFQSVMKNINAQWVQLCLTTKHGFKNNVMNAPVLLALATSNQAELTMTPEVVHAMREYRRFDPEYFDDSFALTQKMIIGLLAI

SEQ ID NO: 27127 - protein, 2066 aa, Vibrio parahaemolyticus
MQYFESLVDQLTKRAARATLGQFGLRSKPLREFLWQSFSQPPGKDGAFLADPVFEATFGWKPHTESMRDLSGGLLNRAIVKAMANPPKELEEEYLFDSSWYPYSHQYEAWSHLLETSPKSVIVSSGTGSGKTECFLVPILNDIVDRNSKPDGVEALFLYPLNALINSQRERLTAWTHQLGDQVKFSLFNGDTPESVSAAERKKHPNEQLSRRELRESPAQILVTNSTMLEYMLVRQKDANILNRSQGKLRWIVLDEAHTYIGSQAAELSLLLRRVMHGFGVTPEQVRFVATSATIGGADSDDDLKAFLADVAGVDITQVHLVKGKREIQPLMELEQIKGMSLDHVVSIKNEQQRYDVLQNIPPLRTLRQRLSSTDNRMTLNEISKLLSATEEPLSEQVSLQWLDICASTKNASGDSFIPFRLHLFHRVAGGLWACSNPDCSSKVGTPLESVDWRFGMVHMSRRDKCSCGSPVFEMVSCNGCGTSLLAATEKIDSETSHAQLHLTKPDSSIDDFALDLIGEEDLTNEDEEEASNEYDRFGLISPLSFEETGEYWINNQREVKAAKMPGSYLIHRVEGYRKSDGALSLRCPCCQHTKIKNFEFYRHFINGAPFMLSTVIPTLLEYCQDGKKEQLKGPWNGRRMITFTDSRQGTARFSAKAQQDSERQFLRSTIYHLILDKAIRESGASSASSPELEQYQAMLKMAIENGNEGMVEFVEGKISELVGSTSKPVTVSWPEVEDFLAEQKEVQLWIKKFYEHFDDRMDMVANPKLLARLLLLREFNSRPKRQNTLETMGLVCMEYPVLDKKANSAPSEWLRHFDSADEARAEWVNFLTVAVNFHVRSVKAVRLTEEQINWIGAKYSPAFLVGQDEPTHIWNVEAWPKIRRNGSRQPRLARLVATALNMELDDANSRADINEILRQAWMALQSSVLTPSGDGYRLELEQQVSFSLLADKYQCPHTKKIIDKPLLGVTPYLNVSGDRNEHLCKSISTPSYPFPFGRDPDSGETVELTKVRDWQEQPELMNVRKENAWSDIADRVVERTPYFRVAEHSAQLKASQLREYEKEFKAGRINVLSCSTTMEMGVDIGGISVVAMNNAPPNPANYLQRAGRAGRRGESKSIALTLCKSTPHGEHIFSNTRWAFDTEIKVPNVSLSSDYIVRRHVNSLLLATFLNRVLKSENSLTLNCGNFFKSDHSSAASQAEQFVDWCVNGALELVQEGLDTLLRRTSLDATSRIEILDASATHMKQIVERWVAEHQLLKDQSNSLEDNPNSLSTAQAAVESQIQRLEGEFLLSELARKGFLPGYGFPTDVVSLNTDHVKVIERRKRNIKMKQDQISDKTSRKDNLYSAKGFPSRDLSVAIRDYAPGNDVVIDGRVYQSKGVLLNWHSPASVDQVKEIQALRWAWRCDKCGASNTSSLRPDKCECCGNEFDLSDGNTKEHIHPYIQPASFAVDIRDEPHNDISRLNHVPINDPWVTVDSSEWREVSVNPGASYRSSHNGHVYYYSAGPVNKGYALCLECGRMEAMPESEDKSPKDVLMGHTRLRGGKGHLTSSSEVLCGGNDREFTTKGPLKLGHSTYTDVFELLLFNELGKPLVDRSIARSVAVLMRNQLAEKLGINNDEIGCTTKPVNHEGREVQAIVLFDNAAGGAGFSIQASDYVVQLLKGAKKIASSCHCDKACHRCLVDYSTQHVLDLLDRHKVTAYLNNGFFNNLSLPAEYELFDHHNRRELRPLMIAIEKTLAKDDDSDLYVELPISQLSDLGGWQLYQAFSRWVAERKVNLILVEAKVKELSLEQKVTLSWYQNHPNVKLLSRSLNGQSEHVVLASVTNKSCCYQWGIREDDHETLVTGVGSLGTLADFDIKRLHQSSDVEKIVIDSELDGKASEFGFKFWSHVFKCSPALMALMENQVIESVTYSDRYLAATLPFSLCFNALKFIGEHYKSCQIEINTGELARGYRPATVQDNFYDDYSRDKVVSLALESTAANISFKTAPKYKLPHSRTLVLSFDNGRQVTLWLDQGFGYWYADKRLSENHLPHNLYDEEHANIIVKGQSQISSGGFPTDVFISFA

SEQ ID NO: 27128 - protein, 1121 aa, Vibrio parahaemolyticus
MQTYKHILSSFLNQRELNKPNAQPLYSYKVTAEEFESLKQSLIASVASNGIHTYSNKPIREWSGCFVLYAAEWWRTSFQGGVWAWEPVLESLGLPANAISPTQRSEIVVKGLSFWGRKVLSNTKGRMLLGTVAVEGGLPQTLIQDPHSKLAHYFEQVIQDYGQFANSRLSADSIAKAHAHYIAASYRDETVYSIVAQVAESIYSLVDKHGLEEQSDPLHYLNTVDANWSQSLPLNMEPEAARTLLGNALGLAVEVQRRLPNSIKVLRSLRKSYSHYASMLDEFELGTEEVYQWKTQVDITLKSRLNVQFLEQLFGSVNLPERINLFAVGQKSLLLAKAIKRGTDSEHYLLDVYTTSLPEDWVDCDIQLKATDDLGNSWYAPVLGGAGLDVNEPWVFTQHNDEWLFKGAGNVTCEESNALVSVPEPLSHLELGSVGSIKNRILYEANTQTSSEFYFGEYCVSLQQEDTHSLEYNLVGQSVSYQTNPSKCFIGLPSLVAIDEAGRQTPIANTQLRWRNTMLEQWQTMSTVPFGKVDIALFENNKPVKRFTVGLLPDDFVIDFQPSHSVQIGQIGFYSENPLPSIALEDNEQLDVLPSSVLSHAQEDQNEAKRSLDMLSSQAHPPAQVNVRLWWQDQAKSLSMTLPFPAKGICLIGTQGEVVRNADAILVDRLNRYELFSYGVNDSLEVEFKLQARDIHGALSKSAYVKRSLPKGDTLSAGLSLATFKEDIDSLFALSSSLDAIVKVSVLDNAHTIFNFNVNAYGNTLTPNRELCTVEIDNDYFIGTLSMVPLDNPTFAPVTLAKNDEQWHFPDEDAAPGAWLIYADEAEQGVRPLMWSKDLELLSSPGNRLEEAAAIGSRKDRLDKFSVVCGQLAVEFNAPEWAYIKGLLAFDSVPLTTFDLWRGAITKPEFMLAMLLSANKKEAERIWQFSKQFPFLWHSLKARDAIAVINAFYDSRIEEYGTDFSGIICDQIESKLDDLVTRYHGLQSLKNLLMYKIDSSRDKPSLNPAAYKQQLFDLRNALNNQYDESHWPCAFADHILNNVINSVNEQLSGVCFTTKNLYRNNVMNAPVLLALSTCGSASLRVTPEVVHAMRQYKNFDPDYFEQAFALTHQMIFGLVNS

SEQ ID NO: 27129 - protein, 2068 aa, Vibrio parahaemolyticus
MQYFESLVDQLTKRAARATLGQFGLRSKPLREFLWQSFSQPPGKDGAFLADPVFEATFGWKPHTESMRDLSGGLLNRAIVKAMANPPKELEEDYLFDSSWYPYSHQYEAWSHLLETSPKSVIVSSGTGSGKTECFLVPILNDIVDRNSKPDGVEALFLYPLNALINSQRERLTAWTHQLGDQVKFSLFNGDTPESVSAAERKKHPNEQLSRRELRESPAQILVTNSTMLEYMLVRQKDANILNRSQGKLRWIVLDEAHTYIGSQAAELSLLLRRVMHGFGVTPDHVRFVATSATIGGADSDDDLKAFLADVAGVDITQVHLVKGKREIKPLMELEQIKAMSLDHVASIENEQQRYDVLQNIPPLRTLRQRLSATDNRMTLNEISKLLSATEEPLSEQVTLQWLDICASTKNANGDAFIPFRLHLFHRVAGGLWACSNPDCSSKVGTPLESVDWRFGMVYMSRRDKCSCGSPVFEMVSCNGCGTSLLAATEIIDSETSHTQLHLTKPDSSIDDFALDLIGEEDLTNEDDEEASNEYDRFGLISPLSFEETGEYWINNLREVKAAKVPGSHLIHRVEGYRKSDGALSLRCPCCQHTKIKNFEFYRHFINGAPFILSTVIPTLLEYCQDGKKEQLKGPWNGRRMITFTDSRQGTARFSAKAQQDSERQFLRSTIYHLILDKAIRESGAGAGSASSPELEQYQAMLKMATENGNEGMVEFVEGKISELVGSISKPVTVSWLEVEDFLAEQKEVRLWIKKYYEHFDDRMDMVSNPKLLARLLLLREFNSRPKRQNTLETMGLVCMEYPVLDKKVNSAPSEWLRHFDSADEARAEWVNFLTVAVNFHVRSVKAVRLTEEQINWIGAKYSPAFLVGQDEPTHIWNVEAWPKIRRNGSRQPRLARLVATALNMEFDDANSRADINEILRQAWMVLQSSVLTPSGDGYRLELEQQVSFSLLADKHQCPHTQKIIDKPLLGVTPYLNVSGDRNEHLCKSISTPSYPYPFGRDPDSGETVDLTKVRDWQEQPALMNVRKENAWSDIADRVVERTPYFRVAEHSAQLKASQLREYEKEFKAGRINVLSCSTTMEMGVDIGGISVVAMNNAPPNPANYLQRAGRAGRRGESKSIALTLCKSTPHGEHIFSNTRWAFDTEIKVPNVSLSSDYIVRRHVNSLLLATFLNRVLKSENSLKLNCGNFFKSVHGSAASQAEQFVDWCVNGALELVQEGLDTLLRRTSLDATSRIEILDASATHMKQIVERWVAEHQLLKDQSNSLEDNPNSLSTAQAAVESQIQRLEGEFLLSELARKGFLPGYGFPTDVVSLNTDHVKVIERRKRNIKMKQDQISDKTSRKDNLYSAKGFPSRDLSVAIRDYAPGNDVVIDGRVYQSKGVLLNWHSPASVDQVKEIQALRWAWRCDKCGASNTSSLRPDKCECCGNEFDLTDGNTKEHIHPYIQPASFAVDIRDEPHNDISRLNHVPFNDPWVTVDSSEWREVSVNPGASYRSSHNGHVYYYSAGPVNKGYALCLECGRMEAMPESEDKSPKDVLMGHTRLRGGKGHLTSSSEVLCGGNDREFTAKGPLKLGHSTYTDVFELLLFNELGKPLVDRSIARSVAVLMRNQLAEKLGINNDEIGCTTKPVNYEGREVQAIVLFDNAAGGAGFSIQASDYVVELLKGAKKIASSCHCDKACHRCLVDYSTQHVLDLLDRRKVTAYLNNGFFNNLSLPSEYELFDHHNRRELRPLMIAIEKTLTKDDDSDLYVELPISQLSDLGGWQLYQAFSRWVAERKVNLILAEAKVNELSLEQKVTLSWYQNHPNVKLLSKSLNGQSDHVVLASVTNKSYCYQWGIREDDHETLVTGVGSLGTLADFDITRLHQSSDVEKIVIDSELDGKASEFGFKFWSHVFKCSPALMALMENQVIESVTYSDRYLAATLPFSLCFNALKFIGEHYKSCQIEINTGELARSYRPATVQDNFYDDYSRDKIVSLALESTAANISFKTAPKYKLPHSRTLVLSFDNGRQVTLWLDQGFGYWYADKRLSENHLPHNLYDEEHANIIVKGQSQISSGGFPTDVFISFA

SEQ ID NO: 27130 - protein, 1121 aa, Vibrio parahaemolyticus
MQTYKHILSSFLNQRELNKPNAQPLYSYKVTAEEFESLKQSLIASVASNGIHTYSNKPIREWSGCFVLYAAEWWRTSFQGGVWAWEPVLESLGLPANAISPTQRSEIVVKGLSFWGRKVLSNTKGRMLLGTVAVEGGLPQTLIQDPHSKLAHYFEQVIQDYGQFANSRLSADSIAKAHAHYIAASYRDETVYSIVAQVAESIYSLVDKHGLEEQSDPLHYLNTVDANWSQSLPLNMEPEAARTLLGNALGLAVEVQRRLPNSIKVLRSLRKSYSHYASMLDEFELGTEEVYQWKTQVDITLKSRLNVQFLEQLFGSVNLPERINLFAVGQKSLLLAKAIKRGTDSEHYLLDVYTTSLPEDWVDCDIQLKATDDLGNSWYAPVLGGAGLDVNEPWVFTQHNDEWLFKGAGNVTCEESNALVSVPEPLSHLELGSVGSIKNRILYEANTQTSSEFYFGEYCVSLQQEDTHSLEYNLVGQSVSYQTNPSKCFIGLPSLVAIDEAGQQTPIVNTQLRWRNTMLEQWQTMSTVPFGKVDIALLENNKPVKRFTVGLLPDDFVIDFQPSHSVQIGQIGFYSENPLPSIALEDNEQLDVLPSSVLSHAKEDQNEAKRSLDMLSSQAHPPAQVNVRLWWQDQAKSLSMTLPFPAKGICLIGTQGEVVRNADAILVDRLNRYELFSYGVNDSLEVEFKLQARDIHGAFSKSAYVKRSLPKGDALSAGLSLATFKEDIESLFALSTSLDAIVKVSVLNNAHTIFNCNVNAYGNTLTPNRELCTVEIDNDHFIGALSMVPLDNPTFAPITLSKNDEQWHFPDQDTAPGAWLIYADEAEQGVRPLMWSKDLELISSLGNRLEEAASIGSRKDRLDKFSVVCGQLAVEFNAPEWAYIKGLLAFDSVPLTTFDLWRGAITKPEFMLAMLLSANKKEAERIWQFSKQFPFLWHSLKARDAIAVINAFYDSRIEEYGTDFSGIICDQIESKLDDLVTRYHGLQSLKNLLMYKIDSSRDKPSLNPAAYKQQLFDLRNALNNQYDESHWPCAFADLILNNVINSVNEQLSGFCFTTKNLYRNNVMNAPVLLALSTCGSASLRVTPEVVHAMRQYKSFDPDYFEQAFALTHQMIFGLVNS

SEQ ID NO: 27131 - protein, 2104 aa, Vibrio sinaloensis
MKGYFSTLKQQANNRAKESTLSVLGISNPSLRNHLSERFETVEPFVHGPVFEQTFAWEESKVQMSDLVSEGLLSKELVTALDDDINGRYAFKAKWSPFKHQLAAWRDLLNPEPKSRIITSGTGSGKTECFMVPVLEDLVREVKTEGKALKGVRALFLYPLNALINSQKERLNAWTQHFEGDIRFCLFNGNTPNDPSASQSQIQTKQPQEVLSRNLMRDNPAPILVTNGTMLEYMLVRQADAPIIEQSKGKLRWIVLDEAHTYVGSQAAELALQLRRVMQAFEVEPENVRFVATSATIAGLEAESQLRTYLAELAGVSETQVDVIGGKRAVPKLPDYPLNNKDISVIESIDPDGELPENKKDVQDPYVSASRYRALCESEIAKRIRSAFTAKDSSPLLFSELASSLSPINLTENELYRWLDICTGTKESYDRNAQPFLKLRAHYFQRTLNGLWACIDPNCSEKSGTHLNRDWQFGQVLSEQRQKCDCGAPVLELSFCSECNEPHLLGVDKTGVLTQWTGKVTDEFSLLEEGEKYIDEERTDQYSALKASDSMLVLAATENQENIFFETIYDHDGKEASVKSGSIRLAKYLDDGEQCSKCGFSGRGQHAKALRRGLLGAPFYTTTAVPTVLEYCPDIEKDKETGYGPLDAPGRGRRLITFTDSRQGTAKMSVQMQQEAERSRLRGLVFKELRKHVEEELAIDSDLLDIVRPYIEDSTVEDIEEFILIAGKRKPQVAEALIQYLSALEKGASRYSPKAISWKELADRISMDKDLQNSILTENKRLSPEVFDVTTGSLKLANMLLTRELARRPKFKNNLETQGLIRFVYPEVEKLSKAPEQWKEKGGLTLSDWKDYLKVCLDFFVRENTYVNIDREWGRWIGMHFAPKTLIAPDSKEEEESRIKKWPQINKGRKIQQRLITLLRVATGIDIEKTEGEQLINGWLQDAWKTLTKLQILRDSTSDKQYSLDLREVSFALLSEGYICPVTNKVLDTTFRGLTPYIPANGNYSDYQCTRVNLPPIWKFEGSDRGYDESLQSIRSDIEESQEIRSLREQNVWTDINDRTVEGGFYYATAEHSAQQSAERLADYEEKFKSGRKNVLNCSTTMEMGVDIGGITAVVMNNVPPHPANFLQRAGRAGRSKESRALSYTICKNNPHDTLVFNNPKWAFTTSIPAPHVEFSSKKLVQRHVNSYLLGRYLVDVIGPTDKEKINLNLEWFYLPDIGGKSVAERFSLWVMSLENSYLDGVKKLVKGTALSGVSPDILVKQTAKKILELSEKWVGEYKYIQTELNDTAPNGPYAHKLDNEKSRLCREYLLRDLATKAFLPGYGFPTDVVSIDTDNVADYIREKKFKKNKNQLEREDNVSINRGLPSRNLSVAIREYAPGSEIVIDGRVHRSAGISLNWQNVHVEGSRDAQKFDLAWRCPHCGQTGYESNPNKQVNLESLTCSNVMCGKVIPIDNEYRKKVIQPTGFVTDYYIEPTNNIAHQTYVPVQPAWVSAKGVPVPLPVSELGYMITDHQGKVFHYSSGMSGTGFALCMACGRAESMTSTGELPKALNLERTHKPPRPSKFAKDENDRHGDCDGSGRILESIHLGVHSQTDVFELVLRHPDTGEYIPDSDEGRVIATSLVVALRKALVKTLGISVNEVEYSVRPAVVGESQHAMVLQLCDSVSGGAGFATSTSHHITQVLCQMLRELECTKACDAFCPDCLLESDSRHDTDKLNRQIALKWLGDNFTNHLNLPSKYQRLLTEAEYCPLSIKEQLTSVVAGQVSEVKFVLSSNIERWDTSVTLLKSRVYEMLSNNIDVSFVVPDVDYPDDIKLFLKNISNIGASLYLTKDDTGLMVFQAKTDVGCFSLANLEDSARIPGLEWLMSDDISVISTVEPELSVIPYTIEVEPESVSQVGAIQIEAIKELNGTLTQLGEQFKQLVCDSDSRVKELISSNIIKKVHYSDRYLQSPSAVMLVSEAIKGLVCGHNDCEVLVDTCFDEKNGRQPAFISHDWDYKADFRQIFQAWLENATGRTTKINIVEDKKTIQHRRVLTISFESGHTVQITLDQGFGYWWLELTHGLHRFDFERDSLDQVKRMLEVQAKASVKNSADWPTLITTSLL

SEQ ID NO: 27132 - protein, 1102 aa, Vibrio sinaloensis
MDLNIPPVEGRINTTSNSISPVTIEDWLTRLLHRNELSLPNGQPLYQYHVKESEFIELRNILIRIGKVQSSKTWCAAFSIFCSEWYRRFYMGGWTWFGIWESLGYELDANIRQNVVERGLKAYWGRPISQYQDERNSYLGSLFKEGGLPYGLLASEDSRFQAIFKRILKSYEDAKDFGYSPVELVTECMDSLPEAFKQETTVNLITRMTELLLRLTEDYDLDEQNNPAAYLDDNAGGWRELFPIPLDGNAGNEFLSGLLSSASQQHRNKKHADKRITCQQWLANTSEFQFVTQIKLAKIVDMPFRREDTVTSRVELFIYEGSTPIAEIGVGHIHSDTGKCSVVLRSTSCRFNRVDPKQALYLIVLQAGKLLHREEISNSEIMIGEVPVVLSCIDEKMMFVGTGSISTRAESLTVLCPSNAVVDESEAKDVKITTDYGYTVGTFSGTLKVSVNNGLEIDRYLITTSANNMQYDEVRIDGKILPFSTAKGQPVYLGLPKITTQDICSQVVVAGEPVGLGHKASIFGLQSIKVKSNKGHTLFQKRLAILPKSFEIRLSSSEDADRGSIELHCVNRFTVKVLNAEVDVVARSTEYGKCLEIKSTLCIPPRELLLEITTNLMAAPVVVSVPFPSTGVLAYDKDNNKLPQLLTVADLLGSRLMLFPRLGKQCSYKIELSSPNSSRQAYYLWEYKVQGQPLEISLYEFRHNVRELLATNGNLDDLVRLEISGACKTVQFQIGRYSSMTQFENSCIKFEGEIKDFGKIKPVLIDLTNPTVHPKPLTQRESQGVATGIFELSSFPENPSLIVPSPDSQVAFRARFVPGSKIAENPIDVRSLQKAATVCHVNPSAIDEVLGQMVKDFDHSGWTFLADLETRFGYLPLATFEIWKSVVKRQDVLAALAFRFDNPIPLMSRLQSEFNVMWELIPIAAWKRISQNFIQGIRDDGYPERIVTKLINQKLDNISQICPVFESDCRHLVLDKAIIPQENLRGVLQYFSAHSVSEVRSLHTSDRRWPTMFSNDIEEWCLDHYQDLVTFSIPDGKGFQKAVLYFPLYASALVLQKTTLSEIGISDEPANEFFLRQLIEFDRQWFVPMYKLLLCIMAGERK

SEQ ID NO: 27133 - protein, 2068 aa, Vibrio sp. 2538-88
MQYFESLVDQLTKRAARATLGQFGLRSKPLREFLWQSFSQAPGKEGAFLADPVFEATFGWKPHTETMADLAGGLLDKAIVHAMANPPKELREDYQFEKHWAPYSHQHEAWSHLLQHSPKSVMVSSGTGSGKTECFLVPILNDIVTRESQPDGVEALFLYPLNALINSQRERLTAWTHQLGSQVKFCLFNGDTPEAVSAEERKLHPNEQLSRKELRENPAQILVTNSTMLEYMLVRQKDASILKRSQGKLRWIVLDEAHTYIGSQAAELSLLLRRVMHGFGVTPDQVRFVATSATIGGEDSDGELKAFLADVAGVDISQVHLVKGQREIKPLKALEQVKAMDLAHVNAIEDELQRYDYLSALPPLRTLRQHLSTTDNRMTLSAISKLLSATDEPLSEAETLKWMDICAGTKDVNGEAFIPFRLHIFHRVASGLWACSNKDCKAKAGTPLDSLDWRFGMVSMSRRESCSCGSPMFEMVSCNGCGTSLLATNVKTAADSGDTFLHLTKPDSAIDDFALDIAGEDDDVSSYEDEEEGEQYDRFGLISPLPGDETGEYWLDNQRKATTANSEDGFLIHRVEGYRNSLGALSLRCPCCQQTKVKNFEFFRYFKNGAPFMLSTVIPTLLEYCQDGKKEQKKGPWNGRRMITFTDSRQGTARFSAKSQQDAERQFLRATLYHLILDKALRKGQLTPDIEQKLDRLHRMLKIAVSMNEPSDVEAIECEIAELVGQSSQSILVPWAEVENFLADQKEVQLWIKKFYEHFDDRMEMVTHPKLLARLLLLREFNSRPKRQNTLETMGLVAMEYPLLAQKANTAPKEWLRFFDDVEKGRTEWVNFLTLAVNFHVRSLKAVRLTKEQLNWIGAKYQPTLLVAQGESTHIWNVESWPKVTRGGSIQPRLARLLSCAFNIDLDEAYNRAEVNEILRQAWNALQSSVLTPSGDGFRLELEQQVSFSLLKEKHQCPHTQKIIDKPLLGITPYLNASGEREEQLCRRLLTPDYPYPFGRDPKTGESVELAKTREWQEQHALIDIRKENAWSDIADRVIERTPYFRVAEHSAQLKASQLRQYEKDFKEGRINVLSCSTTMEMGVDIGGISVVAMNNAPPNPANYLQRAGRAGRRGESKSIALTLCKSTPHGEHIFSNTRWAFDTQIKVPNVSLSSEYIVRRHVNSLLLSTFLNKVVSSENNLKLNCGTFFKAGHELTASYAEQFIDWCREEAQEMVQSGLDTLLLRTALEANSRVEVLNKAAKHLETIMSRWTAEHQLLLEQSKSLADNPNVLSTAQAAVESQIQRLEGEFLLSDLARKGFLPGYGFPTDVVSLNTDHAKEIERRKRKIKEKHDNVDDNTSRKDNLYSAGGFPSRDLSVAIRDYAPGNDVVIDGRVYQSAGVLLNWHSPASADQVKEIQALRWAWRCDQCGASNTSTLRPERCECCGNEFLSGDEKSKDLIHPYIQPASFAVDIRSEPHNDISRLNHVPFNDPWVTVDGKEWQHVSVNPSAAYRSSHNGHIYYYSGGPTNVGYALCLECGRMEAMPEQGNKSPKEVLANHYRLRGGKGPLATAGELYCGGNEREFTIKGPLKLGHSTFTDVFELILFNDLGHPLVDRTIARSISVLIRNQLAEKLGINSDEIGCTTKPVNFEGREVQAVVLFDNAAGGAGFAIQASEHLVELLQGAKKVAAHCSCDKACHRCLVDYSTQHVLELLDRRKVASYLSIDFFRNLALPDEYQIFASNNRRELRPLTTAIEKALSKLSEAELYLTLPKKQLDELGDWTLYLAFNRWVEDRRVNVVLAENGDDELTIQQKVLLNWYLNHPNVNLYSVRTPPLSNGVLLASVVDDTKAYQWGYFSNDTDTLICGTDSFIKPTLFDSTRLNFEGGSLKKVVVHEELNGAVKDFGFKFWSYVFKHSPELMALMKSQQLQSATYSDRYLAAPLPLSLCFSALKFLGEHYKGCTTQVVTGELHRSAKPMTVQDNFEDEYSRDKVFRLIADATEANMSFRSRPKYELPHARVLELVFDSGTKVTLWLDQGFGYWYADKYLPENQLERDVSEEELADIISAGHSIIRSGKFSTDIFVSLS

SEQ ID NO: 27134 - protein, 1118 aa, Vibrio sp. 2538-88
MQTYKNVIASILEVRKLTKPNGLPIYSYKITPDEFSQLRTALIASMKSHGVQFYASKPTREWAGCFVLFAAEWWRNSFQGGVWAWEQVLDSLGLGANDFSPLQRSEIVAKGLSFWGRKVLSNTKGRMFLGTVAVEGGLPQALLLDPNSKLSYYFEQVIQDYGQYANAQLSAVSIAMAHSHCIPSSFRDDAVYSIVAQVAEAIYQLVDKHALDEQEDPLHYLNTVEKAWQHDLPLNIDERTVHQLLGNALGMAVEAQRRLPNSIKILRSLRKSYSNYASMLDEEEAFEWRHQVSITLKNRLNENFLQQMFGTRSLPDRFHLFAVGQKTLLLAKAFKNGKVSEQYWLDVFTQSLPDTWFDEEIQLKATDDHGNEWFAPVIGGAGVDDDEPWVFTQHNDEWLLHGSGSVSCEETNALVSLPHGFSVECSDLIGYAGERTLVAIGSKGGEPTEHWFAGHCISLMQDDSHSLEYSLVGQTLVYQTKPSKCFLGMPELIAIDQRGNQNKVASSHLRWRNTLLEQWQSIDSVPFGKVDIALFENNKPKKRFTVGLLPSDFDIKHMSSDSVHIGQIAFTSKHTLPTIALGECQQLDVLPSSVLSKPLTVVGEQTRSLDLVSHAPHPPAHVSVLAWWVDRSKSLSMTLPFPSKGICLIGSSGEVIRSRDVVLADKLNHYELFGYGVKDALEVEFALQARDISGSLAKTAYVKRDLPTGNVLSSGFCMAAFKQDIESLLALSSSLDASVRVSVLESAQPIFTFNIQSYDASLIPDKDNNLISLKGEERELSLSMVPLDNPSFAPIPLQREQEHWVFPNEYAKPGAWLIFSDDVQRNVRPLMWSKELELLSSPENRFEAAAAIGVRNQRLEAFATACGQLATEFDAPEWPYIKALLAFDSVPLTTFDVWRSAVTKPEFMLAMLLAANKKECERIWLFSQQFPLLWQSVKVRKAIKVVEAFYASRLSMYGEDFADIIRSQIKTKLDALVSRYSGLDSLADLLMHKIDPSHPSKTINHAAYMQKIFDLRNDLSNRYDEAYWPCDFAAHIIASVTRRVDRQLANVCLTSNNVYRNNVMNAPVMLALSTCGVAKLTINPEIVHALTQYRNFDAEYFEQAFSLTHQMIFGLTNP

SEQ ID NO: 27135 - protein, 2143 aa, Vibrio sp. HENC-03
MSTKAINFKSLYKDLSSVTSQAVINRLQLKSAPLRKFLQSEFQVKYGKGNDFFAQPVFEATFGWSSEGCENDLNGLVTQGKLEQTFVNNLSQPPMPFPDSSEEKEEYRLKGISEDRWAEDIQEDYTWPLDRPPYKHQLEAWDHLSSDKVKSVVVTSGTGSGKTECFLVPLLNDLAKQSNRAVEPLEGTQAIFLYPLNALINSQKERLSAWTRGFEGKVRFALYNGETPTQAPSKTISNASLSKNTASELVTNRKDIWSSPPPILVTNATMLEYMLIRQQDEDILAKSQGKLKWIVLDEAHTYVGSQAAEIALLLRRVMHAYNVKPKDVRFVATSATIGDKNKQDETNRDLQRFLAKVAGVLPEQVAVVNGHRAIPHINSTGMESSFSLKKAREMSSGELYDYMSSFPVLREMRESLTREPHTLEEIARILEPSKSERISQVELTKALDIIDLAVTAYPQGDDSQQAFLPVRAHIFHRSQRGLWACSDPSCCNKANTELQDGWKFGMVYTNERTHCEGECGAPVFELTHCKDCGTPSLAAAKTTAQGGIKLLEPRDTDLLDDYVDEIDEHEQASDENFDTEFEANVQIFAREDALGNAHDQLGCTHVSLDPKTNRISEAFESGHLDIFYNQNDRDDGLRCAHCHGVENVPNTQFKRALLGSPFLMGSLVPAMLRHIPGDNSDDLKGKRLITFTDSRQGTARFSAKMQLDSERNWTRSQVYKTAVLEAGELELTEELKEKKAALKFLKSALPNDPNTIALEKQIDEGLKKLPTKKVNWCFLKERLSTLPEIQLLSGAELDLLEGKALEKYDERIPGEYRLRSELLSDADNLADLFLKREFARRAKNANSLESMGLVQLHYPAISNLTNEDMNSHEWRSLGFDLDDLKSYLKICIDFYIRENTLVDIDRSVINWMGAKINPRLLKESNYEYQDEIERRAYFKFPVVNNGRQHRLVRLLELGAGRVAKDEKELFNSVLSFIWRILRDHILTKASRQDYSDGATLSGYNLKFDEKIEFAPIEKAWLCPVTNRWLDTTFRGLSPYTTGSSTLDDVRCDEPFEITHPETEIVNSSPADIRNWLADEDVLNTHRDHGRWSDINDRVIAGVPLVRAAEHSAQQSSDKLKRLEKAFKKDYLNVLSCSTTMEMGVDIGSLSMVAMNNVPPSTSNYLQRAGRAGRRKESTALALTFCKATPHGERVFNEPKWPFATPIRVPKVSLDSGIIVQRHINAFLLASFLKIEKSRSNNLLKMQVGAFFLGDGGLNPFNAFINWLAGPALNDESVLAGIDSLKFDSVFAGHLNSILVEGALDAIESSHIKWMRRYESLNTQIEATSDSNSPASKKLARQLKRLERDYLLAELANTGYLPGYGFPTGVVQLITDNRSENNSRDDGKSQHRTSYPSRGLEVALREYAPGSEIVRDGAVYQSQGLQLNWKMPFSGNDIKQEQLIEYQWECEHCGNIGFESVSSERASIRCTDCDSDRLTWSEFIVPSGFVVDFNKPLHNNYVSPNYAGYREPKVALNDAQWQPLSNTGVGRYRVSEYGSIFHYNDGEGGGYALCWCCGRAEPLSIEKTPKGNVRLSKEPHILNTHKRLQGFKVKGEVMCEGVKDGWGIKVSEISQSEREISMPFIMGYPQSTAMFELQLKSPTSGNWISDETLLYTLGVALRQMYSDEKGITTQELGVVTRRKRTESFEDVVSLYIFDSATQGAGFSSSMPEVLSQLLKDLTEYLKKCPNNCEAACHACLLDYDTQHNVKILNRNYLIKELEENRILEGLALSTKRCFFGDSSRVELSSANQVLSRVGHSCSQINVFLSSSEWHFGEWNIREKITTLATKGIPVNVYFSKELADSLDSDLAWEIARSMPVGIINFQELDKPIELASGGQPVMSLKVDSELHWYATDELSQLGANEHWGSGEDLCLVTAVKELEISSTKFNLEALAQASNLNENSFILSDVTSLKGSIASFGVSFVELLAGQIPSLNEMLNNNIESIHYSDQYVVSPISVVLINHVLAAFNKRYGRFSSEINTVAPRKYVTGQRLSSSIGDNFLEANDVLDFIYDSSRTLGAEVYGDIVDKSELSHSRIMRIDLKDGREIKLLFDHGMGYWSRSRDYPQKFDFKNVGYEASSIDDWNFGLRDSGKETFIAVKLGD

SEQ ID NO: 27136 - protein, 1169 aa, Vibrio sp. HENC-03
MILDSVQNPVLKMQQWFTEFESRRVKPNKGMPLWALKVTDEELQQMKQLLRALFSAKDPSVVFNQHSCAGYGKKFDQIFTLYLATWIQRNFTGGKERWPVVLRSIDISHNNRLNTYIYDSVKAGLKYWGIDLYSTSSANQYFATLYCQGGFPRSGLVGLSSGPVPEYLDKVISQYALFHHTSEINDIAKQQLELLPETLKQVAFARLATVLVTKLMEYRDRYHLHGESDPVIALNVRYPQWRDELPFLLCDEEAYELISRLVRKTSAIIRREQNPVRIKRYLREDMGHWDLVAETYVNHTIHPQDLSRVLSLENLPKFFDLYTQTNTGERVRTASFNLKGYANQRWQVITKFAHFYNADAASNIGYELWSDGRKFNSDTYYRGEELNKALPWIFSAEGEKSQYLGQGNVHVKQASAIIVHAGLVEPATSQSKVEKVGRIASLDRDVYRVVGKVKVELDYDFIEVLTGADEAQDVTCWLDGKRNREAISHQHVFEGKPTGMMRFGVNKSQLIPSAELFWKSVDSDSLVPLNSDAFTYGLGSVIWFNSGQVMWQMKCAILPASSDFNVIHYGKGEIELKAVGFKNTDFGFVDNEKNWLRDVEVIEDMFLAEVQIPASMPDTFHPVLGWNNSTKNTLTFEFDSLQSGVCLLGSKGNTLNARGNKITLDDLYASSLKVKLVEESSSISVSAALMQHKTIKASITDIIQVPESKVTVGCGELARLAQALFTQSDDTRDRVSFRFYSGRELLESRVPAIEQFKYPVASLKGDRSMLRIYGAHDHRNPESIQLYTAPIWDLSREHTPLVKSLGERGELLFAMPEINEPGPWFVYAQNDRKIQPRAVLVAQNETGIKEYNYSRLQLSIRDLLFNPETRSFDYSEMDAALKELMFDLQHDDWHTVQSFVEQLSIANPTTFHIFKRLAANPNVFASLLLKQENLEEFESVWSISLDMPFEWLSVPLNQWIDAIRLTTKSTMESLVMMKDQLPVDQFEQIQKTMLKSRLQNLSDKGEYFAAVVDAALFALYDIKSSWMDLPIYASEEQPSYIADFHKQKSEYFSRQEGRLLTQIQNKHNDIRLKDLLDTRLSRDLLDAELKGFTQHYSVDKSKATRLAIPLELPVKVALHNAGIYPAADINEEELRLVNFALNRLSQFDRVWTQESMAIALKSAVKLRAQ

SEQ ID NO: 27137 - protein, 2107 aa, Vibrio sp. J2-31
MKQYFSTLKQQANSRAKESTLSILGINNPALRNHLSERMETDEKFVHGPVFEQMFSWEADEITIEDLSTPEYNNLLSPELLDALDVAPHKEGCKRDSSCKCKYVLNREIKPYKHQLEAWRGLLDPRPQSQIITSGTGSGKTECFMVPVLEDLYRETQQTNSSLTGVRALFLYPLNALINSQKERLNAWTTHFNGDIRFCLYNGNTPNDLKAQDRQRQKNQPQEVLSRKLMRDNPAPILVTNGTMLEYMLVRQADAPIIQQSQGKLRWIVLDEAHTYIGSQAAELALQLRRVMQAFDVKPEDIRFIATSATIAGAEAETQLKQYLARLANVGVEQVAVIGGRRVVPGLPKVTPANLTISEIEAIDPEGEQPKEKKLSQNSEVSERRYSALASSKLAVRIRELLAGDNIGPVHYAELLDKLKPYDLNEAELCRWLDICTGTKQFHSSEAFLKLRAHYFQRTLHGLWCCIDPNCENKKESKLNGAWPFGLVYSEHRQKCHCGSAVLELTFCNDCNEPHLLAIDQNGQLQQCTGKISDEFSLLDEEEKEVDEERSDQFSKKTTASDTQVVIGSKQNDDYLLTGFDNAGREEFLDNSSIHLSKSMNESQQCCECGYSGRGQYSKALRRGLLGAPFYTANAVPTVLEYCPDIEVDKESKIGPNSVPGRGRRLITFTDSRQGTAKMSIRMQQEAERSRLRGLVFKELRRHVEEKVVIDEALLDSVKDYLSMPIDKLRVMLPSIEQSMPEDAKALKKYIDVVSSSVAIPLPQTIPWSELAAVIKQDNDLKESMLKENKRLSPEIFDDSTGPLRLTQMLLTREFARRPKNRNSLETQGLVKIVYPGLDKIDVVPELWENYGLTVKDWRDYLKVCLDFFVRENSYITIDREWIRWIGMHFSPKTLLGPDASDVDENRAKSWPLVRKGSKRQQRIITLLTVATGIDITSTLGEDTVNGWLISAWNALTGSKILQDSTADKQYSLGLTNVSFSLMNSAYICPITNKLLDTTFKGITPYIPFKGQLDSNLCEKVKLPAVWAFEGSDDFLLSLILTRKDIEESSEVRSLREQNLWTDINDRTVEGGFYYASAEHSAQQSAERLKIYEDEFKVGRKNVLNCSTTMEMGVDIGGITAVVMNNVPPHPANYLQRAGRAGRSKESRAISYTLCKSNPHDTLVFNNPKWPFTTVIPAPHVEFSSEKLVQRHVNSFLMGRFLIEEVGLTNKEKFNLDLEWFNAKLNGEKSIAERYINWLKTCDKRFESALSTLIEGTELKKIPLTQICKRSAKKIEEITTRWLKEYQYIENELVGVDPDGPYAFKLNSEKSRLCREYLLRDLATRAFLPGYGFPTDVVNLDTDNIVDFRRQLQFRNLSKLDREDNVSINRGLPSRNLAVAIREYAPGSEIVLDGRVHRAAGISLNWQKIHVDGAKDSQKFDLAWRCPGCGQTGYETDLEIQSDSNSLMCTNIACGQSIPDNTDCRKKVIQPTGFVTDYYREPTNNISNNNYVPVQPSWVIASGTATPLPMPALGYMVADTNGKVFHHSSGLSGKGYALCMACGRAESMTAKGELPNALNFEKTHKPPRPSKFDKDEVGRHADCDGSAKIMSSIHLGINSRTDVFELVIKNPKTGEYIPDNEQGRKVATTLAVALRKCLIEQLGVSTNEVQYSVRPTVIGENQHALVLQLFDSVGGGAGFSTSAPFHISKILNGLVGKLDCRKHCDAFCPECLLESDSRHDTDKLDRMLAIEWLGDDFKHYVSLATKHQNLINDGKYCPQTIEAQLTDLLNEKVSECLFVLSSEVEGWDTSLVLMKSKLHELLAKNIAVSIVVPKVDFTEEILSFLREIQKIGVQLRYGKECGAIVFQGLTNSGWSTLANLDIKATTPGEYWLTAEDISIISYSEPEIATTPFELDSMEPTHLLGAVHVDLTTELNGPLSNFGRGFVKLLKNKDERLAKLLKEGELNSISYSDRYLQSPVSLLLLAEVLKVLGETSDCQIEVNSCFDEQNRNPFAVNHDWNDRYDYDAIFNAWLTHMAGKKVNTNIIDNKREVPHRRAIQLHFSTGDIVEVTLDQGFGYWRLDLAGGMHRFDFMRDTHDQIKRLIEVYKLAKVSNSASWSTWIAVNVL

SEQ ID NO: 27138 - protein, 1102 aa, Vibrio sp. J2-31
MDTTSPSALEPTSAILGSTSVNGCLRAILTKRELSQPTGQPLFTYQLSESEYHHLRTSLKKQKLPTRLHGDSSWCAAFCLFSAEWYRRQYQGGWSWSGISSSLEFELDANQRSKVIKTGFKYWQRTVSQYNDERHSFLGSVFREGGLPYGLLASEGGRFQTIFKRILRVFDDAQEFGQSPFQLVSEGLEHLPEAFRQETTVDLITNMTELLLRLTDEYKLQQQEQPANHLDTQLPNWRDLFPIPLDVDTGSEFLTGLLTSASVQRKDKSQQTKRIICRQRLSNNDDLGFVAQIKLMKAIPMPFKREALINSRVELFIQEGNRVIAELGIGHTTFEGETTKVILRTPACEFRRQAIEQDLYLVVLQAGVELHREEIANSDLAMNEMPIVLKSDGEHDWVVGQGSVNVKADQLKAILSKGSTYTAEFPELCTSVTTEHCQFVHFSGEIKVDYYTEDDEHDTYVISTRQSAVLAEQVSVRGVKLQYYSSTGQPIYLGLPTITSQEAHTELWLGNKPLGETHQAGLFGIQSVRLKASGNRTMLRKRLAILPQSFGIELKPSKQANSGFVDLHCERNLFVSIEGEQVSYKQTNIEGGKRITVTAEGSPPADIILSISANLMADPIKVRVPFPASGALTFDKHGNGLANRITIDDLLGARIQFFPRVDVAASYHIELKGPTRSRDASYYWEYKVADKVLEVSLYEFRHRIRELLAASGELDDEIRMVIGGSGCREQQTIIGRYATEAQQLNDTVSFNVKLEKELIIKPELINLADPAEKPHALQQRYSNGVATGVFELNTKLSQPALIVPSNKTQLAFRAKFIPSREPIEHSSDVKTLNKAVALFHPVTNPNAIADVLPMLANDFNHSSWRFINDLFANYSHLPMATFEVWKAIVTNTTCLSALAFKAYNPAQLMERLKVEFNVIWELIPLSIWRSHTVKYRQMLLDIGLPEKVVDNKVKSKLETLSEFTPLFEKQCRALIDDQFIQQKTNLPAVFQYFLPKWSQDLMRVHLSDREWPKAFGYDLETWCQKHCESLIHFEVNRSSHKSVLYFPIFAAAVACGKVQLEELSPSLYPIDYFHLRQIVEFDRHWFNPVFQSALCVFSQEEA

SEQ ID NO: 27139 - protein, 2085 aa, Vibrio tasmaniensis LGP32
MTRYFSDLVEQSISRSKESTLSVLGITDPNLRNHLSDIMSVDCGQEDAFLAPPLFEHTFGWEYAEPKVFELEGNLLSKAVIDALDDKSNGRYRFEAKFNPFQHQLEAWDTLLEDSPKSVVVTSGTGSGKTECFMVPVLEDLYREYQQKQSPLVGVRALFLYPLNALINSQQERLDAWTQHFGDGIRYCLYNGNTENSENKVRKLQQEHRNEVHSRELMRKEPAPILVTNGTMLEYMLVRQIDAPIIECSREEKSLRWIVLDEVHTYVGSQAAELSLQLRRVLHAFGVEAKNVRFVATSATIADANATEQLTEYLSKLADVPKDQIKVIGGGRVIPELDFVESVELTLDNLEGIEPGGEPSKKPNPEISKERFTSLEASSFAHILRKVIVESDVPLTLSEINEKSSVLSNQSQLSQQDLLRWLDLLTGTKRDKHSEAFLKLRAHFFQRMTSGLWACIDRNCSCKQGTKLEQEWPFGNVYAVQRQTCDCGAPVLELSFCLDCNEPHLMGLDKKGKLLQWNGGAGDEFSLQQERLDDDDQDVQQLDDTARYPEMFGAKQDDHEHYAAINIGKDGIIGSVKPGYELMMDTAKKQTCCSCNFEGYNHGSPFRRAMLGAPFYIANVVPTLLEFCPDIVADGPEGPQSLPARGRRLITFTDSRQGTARLSVRMQQEAERSKLRGAVVEVLRDKQLSQPQNDDKPSEGVSAQDLLAKAKELRAMGMNGPAEMLEAQASAIESGGAELTLAKLSWNDMVTELAKKSDLNGAMLQYNQYLSPEIFKQFDGSAKLADMLLFREFARRPKRQNSSETQGMVKVSYAGLDKIKSCPDRWEEYGYKLDDWLDFIKVSLDFYIRENNFLRLEDAGWLKWVGSRFASKSLRNPDSEEANEGRVKKWPQIRSGNHNRLVKLLAATSSIDADSTVGNDIINGWLASAWHELTVNTRILSPDNNRFALDRNKITFSFVDKVHICKVTNKLIDTTFRGISPYLPRKVEDISQYKCVEVDFPCIWQVEATQHDYQKGLKHIREIVGKDSKVEYLREHNLWTDINDRAVEGGLYYRTAEHSAQQSSDRLNEYEDLFKKGKINVLNCSTTMEMGVDIGGISAVVMNNVPPHPANYLQRAGRAGRSKESRAISYTLCKGNPHDQQVFQQPKWPFVTKIPAPYIAFNSQRLIQRHVNSLLLSIFLKTQIGSTNKEKTSLNLEWFYLPEGNAVCDSFLNWLESDARDWDSDVTALVRGTGLAGSQPSALRASASKVIQQLKNKWFNEFNYLEQELLGADAESPYAYRLGLEKSRLGQEYLLRELASKAFLPGYGFPTDVVNFDNNNIEDFIREKQGKEKKSNEREDNVSRFRGLPSRNLAIAIREYSPGSEVVLDGRVFRSGGVTLHWHNVSDSGVNEAQKFDLAWRCDSCGQTGYEESVSASSLNMNCTNSACGAPIKGQHIRQVLQPTGFATDFYHAPSNDISTQKFIPVEDAWVSTGKAPYIDLPNRAMGFMISTSEGTVFNHSSGEYGKGYALCMSCGRAESLDRNGDYPAGLNPSAPHKPLKAVKKDKSGEGNVTCDGSATPMKGVHLGCHSKTDVFELVLRHPVKHEYISCDNDGRTVAMTLAVSLRSALAKQLGISTSEMGYAIRPAIIEGTTSAMVIQLYDVISGGAGFASSASQYIQTILADMISGLTCPNCVSGCSDCLLESDTRHDIDEIDTALAREWVGHDFNHFNRLPEALAEYSQGEYQPYSVLGTIRRQINLGAKSLTLFLNPDCDEWDLTHPDFKRTIAGYLLSDEIGVTLALTSTELSNEFEEELWTFQQLGVQISKAGEVSPHLMAQLSDGNKVSTIANTVAQNTIPGKLWLQQGGISICCESTQLHPQSPFVLSISKKGEAPQIASIELVDELNGSLSKFGKAFWITMFKTNPNLAELLKSESISEVEYSDRYIQSPSSMLMICELLGYICRGFDSIRTVTINTLYHEKQTVGHYLHHDWQDKGEFIEAYEVWGELKLGVKPSVKCHEKRSSIAHRRLLTLKLESGRELVFKFDQGVGYWRISDTTSRFDKVKYSFHSDLDPQLRDLRSKEPNLVVSNSESWSTDVTLQIKN

SEQ ID NO: 27140 - protein, 1124 aa, Vibrio tasmaniensis LGP32
MTIQTNSSDLSSRSTLSLERTQSISHWLDNFINKRTNKNISASEGLFQYHMTQQEYQVLRKTLANGANFSVQSRFSDKWCSAFVLYGAEWFRREYSRDWSWLPIFQSLGLELNHSQISDIVVRGLTGYWKKPLAKFSNGHNDYIGSVFSEGGLPSNLLSNDVNLQQANHYQNAFFAIFERYQDAKGLGSYAIEALISSRITGFPETLQTARTVKLITNMIDKLDSLVYQFGLETQTNPAQYLDKQFPLWRESFPLPLENETGSAFLSQLLSTASKEVNKARVVRKHLQCRHSVSVGQQAIYSLVSLPHLCVFELSLTALTSSRLELAVFEGAEQIASLGTGFAQTCENGVSVRMRNPTIEVRRRKPSSELYVVAMQSGRKLADIALPNSSLDIGESPLTLSSESDKWEVMSQSTFSTRRSKVALLLPANAIVQPVYGDFELANIQFNDLPIYHLNGQCEIKIGSDERYIVTSGSDDFTTPGYVLKGEQVQFPTQPAIVFKGIPNVVEELSQSPLSVEEELNIFLDNTPLRALSSSEFNGRQLLTVKDEQGLIKLKKRVGILPKDFEVEFENGGQPKQGVIRFLTKSPCTWKLVSDTVTVESFTNNDGVKEVRLIANDKPPASVRFAIQANILAAPITIEVPFPARGAVAYNKAGRPLSQRLSVEGLLGSRLFLFSTRGIPATFQLEAELRAKAQSKLHVPPYFRWQYKVTDKPVEISLYGLKGQILELLSLSEMLDSEVELRLTGPGRTLSFVVSHYSTMLEHDRHNHTISVRSTAISEASQVKPVLMSLANPEQSTFALTPCHSEGVATGEYELPEMIHRGGPWLVIPEKGSEVFFRAKFFPGEAHERNGEVKTLQKASELFHPRFEPNVIADVIEQMAEDWSHSGWEYLKQTYSNYGHLPLSTFEVWRHLVRNERALAVAVFRLEFDDKCVSQMDAELPLLWETIEISHWQHAISLLTQTLQAIGLEATLVTNMVEQQVSKLGLAIPILNDTEVKLILLQQSSCQIPLPMMQMMMNGWYQDLLHTHSEDDDWPTEMGNELKHWCQHLDLLPFEFTVNRPFQSGVIYWPIFAAALASNRVPSEISNDFLSGTIFHLRKLRDFDHDWFEPVYRLFINYFANEAR

SEQ ID NO: 27141 - protein, 2066 aa, Vibrio toranzoniae
MQYFESLVDQLTKRAARATLGQFGLRSKPLREFLWQSFSQPPGKEGAFLADPVFEATFGWKLHTQSMRDLSGGLLNSSIVNAMANPPKELKEDYLFDSSWYPYSHQHEAWSHLLEASPKSVIVSSGTGSGKTECFLVPILNDIVERNSKPDGVEALFLYPLNALINSQRERLTAWTHQLGDQVKFSLFNGDTPESVSAAERKKHPNEQLSRKELRENPAQILVTNSTMLEYMLVRQKDANILNRSKGKLRWIVLDEAHTYIGSQAAELSLLLRRVMHGFGVTPDQVRFVATSATIGGKDSDADLKAFLADVAGVDITQVHLVKGEREIKPLMELEQIKTMNLDSVSSITNEIERYDVLQSLPPLRTLRQHLSSTDNRMTLSEIGKLLSATEEPLSEQDSLQWLDICASTKNVDGDAFIPFRLHLFHRVAGGLWVCSNSGCSAKVGTPLESIDWRFGMVHMSRREKCSCGSPIFEMVSCNGCGTSLLAATERTDSETSHTQLQLTKPDSSIDDFALDLVGEEDLTIEDDEETSEEYDRFALISPLNFEETGEYWINNQRDVKTAKVSGAHLINRVEGYRKSDGALSVRCPCCQHTKIKNFEFYRHFRNGAPFMLSTVIPTLLEYCQDGKKEQLKGPWNGRRMITFTDSRQGTARFSAKSQQDSERQFLRSTIYHLILDKAIRESGANSTSSPELQQYQDMLKMAQESGNESMIEFVEGKISELVGGSSKPITVTWQEVEEFLAEQKEVKLWIKKFYEHFDDRMDMVANPKLLARLLLLREFNSRPKRQNTLETMGLVCMEYPGLAKKESSAPSEWLRNFDTAEKARAEWVDFLTVCVNFHVRSMKAVRLTDEQINWIGAKYSPAFLVGQDEPTHIWNVEAWPKIRRNGPRQPRLARLLATALNIELEDADIRADINEILRQAWMALQSSVLTPSGDGYRLELEQQVSFSLIADKHQCPHTQKIIDKPLLGVTPYLNLSGNRTEHLCKQISTPSYPFPFGRDPESGETVDLNKVRDWQEQPNLIDVRKENAWSDIADRVVERTPYFRVAEHSAQLKASQLREYEKEFKEGKINVLSCSTTMEMGVDIGGISVVAMNNAPPNPANYLQRAGRAGRRGETKSIALTLCKSTPHGEHIFSNTRWAFDTEIKVPNVSLSSDYIVRRHVNSLLLSTFLNHVVKSENSLKLNCGNFFKSDHESAASQADQFVDWCVNGALDFVQDGLDTLLRRTSLDATSRIEILDTSAKHMKRIVERWSVEHQLLKEQSKSLEENPNSLSTAQAAVESQIQRLEGEFLLSELARKGFLPGYGFPTDVVSLNTDHVKVIERRKRYIKMKQDQINDKTSRKDNLYSAAGFPSRDLSVAIRDYAPGNDVVIDGRVYQSKGVLLNWHSPATVDQVKEIQALRWAWRCDKCGASNTSLLRPEQCECCGNEFNFSDEKTKDRIHPYIQPASFAVDIRDEPHNDISRLNHVPFNDPWVTVDSSEWHEVSVNPGASYRSSHNGHVYYYSAGPVNQGYALCLECGRMEVMPEGGDKSPKEVLMGHPRLRGGKGHLTSSREVLCGGNDRELTVKGPLKLGHSTYTDVFELLLFDEQGKPLVERSIARSVAVLMRNQLSEKLGINNDEIGCTTKPVNHEGREVQAIVLFDNAAGGAGFSIQASEYVVELLQGAKKVASSCHCDKACHRCLVDYSTQHVLDLLDRRKVATYLSNGFFNNLSLPVEYELFDHHNRRELRPLMIAIEKTLAKHEDSNLYVELPISQLSDLGDWQLYQAFSRWVAERKVNLILTEVQVQELSLEQKVTLSWYQNHPNVKLMSKLLNDHVNHQVLASVASESYCYQWGLRDDDHETLVVGVGSLGELVDFDPTRLRQSSDVEKIVIDSELDGKASEFGLKFWTLVFKRSPALMTLMQDQVIESATYSDRYLAATLPVSLCFNTLKFLGEHYKSCQVEIHTGELSRGYKPTTVQDNFFDDYSRDKVVGLAFESSAANMSFKTTSKYKLPHSRTLVLSFDNGKQVTLWLDQGFGYWFADKRLSENHLPYHLDDEEHANIIVEGQAQISSGTFPTDVFVTFS

SEQ ID NO: 27142 - protein, 1119 aa, Vibrio toranzoniae
MQTYRNVLSSILNARELTKPNAQPIYSYKVTALEFELLKQSLISSVESNGIQTYSNKPTREWAGCFVLYAAEWWRTSFQGGVWAWEPVLESLGLQANAISPTQRSEIVAKGLSFWGRKVLSYTKGRMLLGTVAVEGGLPQTLIQDPNSRLAHYFEQVIQDYGQFANSRLSAVSVAKAHAHYIAASYRDETVYSIVAQVAESIYYLVDKHGLDEQSDPLHYLNTVDANWSQGLPLNMEPEAARTLLGNALGLAVEVQRRLPNSIKILRSLRKSYSYYASMMDMSVSDDDYQWQNQIDITLKSRLNAKFLQQLFSSVNLPDRINLFAVGSKSLLLAKAFKRGADSEHYLLDVYTKSFPTEWFDCDIQLKATDDLGNEWYAPVLGGAGVDANEPWVFTQHNDEWLLKGAGSIECAEANALVLVPEHLSHPTLAMVGHINERILYDVNAQIETEFYFDAYCVSLDREGVQPLEFNLVGQPVPYQTNPSKCFIGVPSLVAIDENGQQSEIPNTQLRWRNTMLEQWQSMNTVPFGKVDIALFENNKPVKRFTVGLLPDDFSIEFQPSHTVQIGQIGFYSNKPLPSIALKGAERLDVLPSSVLSHSQQDPNEAKRTLDMLSHQAHPPAQVDVAIWWQDQAKSLSITLPFPAKGICLISSGGEAVRNAEAILVDTLNRYELFGYGVSDSLEVEFKLLARDIYGAFSKSAYVKRILPKGDVLSTGFSLATFKEDIDSLLALSSSLDAAVKVSVLDNAHTIFNFSVNAYSNALIPNRAQGTIEIENNNFMGTLSMVPLDNPTYAPITLIKNDEQWCFPEEDASPGAWLIYADEAEQGVRPLMWSKDLELLSSPSNRLEEAASIGARKDRLDKFSVVCGQLATEFSAPEWKYIKALLAFDSVPLTTFDLWRGAITKPEFMLAMLLSANKKEAERIWQFRQQFPFSWHSIKARDAIAVVSAFYASRIEVYGNDFSDIICDQIESKLNELVTRYHGLQSLKNLLMHKIDPNREKPSLNPAAYIQQLFDLRNSLNNQYNESHWPCEFSDHIFKSSIKAVKPQLAEVCFTTKDLYRNNVMNAPVLLALSTCGSASLRMTPEVVHAMRQYNSFDPDYFEQVFALTHKMIFGLVNS

SEQ ID NO: 27143 - protein, 2065 aa, Vibrio xuii
MEYFESIIEQLTKRAARATLGQLGLRSKPLREFLWQAFSKAPGQEGAFLGDPVFEATFGWKPHTETMQTLSGKLLSSRVVHAMANPPKALKEDYQFESSWPPYAHQHEAWQHLLKDEPRSVIVSSGTGSGKTECFLVPILSDIAARNSKAEGVEALFLYPLNALINSQRDRLAAWTHELGSDVKFCLYNGETKEQVPAAKQKAEPNQQLSRKALRDDPAQILVTNATMLEYMLVRQKDEPILRKSQGKLRWIVLDEAHTYIGSQAAELALLLRRVMHGFGVTPDQVRFVATSATIGGKDSDKDLKAFLADVAGVDITQVHLVKGHREITGLAELKTPQAMNLQQVKAIEDEVMRYQALESIVPLRVLREHLSSDDNRMSLSQIGKLLSATDEPLEEKTVLQWLDVCASTKDSDGQAFIPFRLHLFHRVASGLWTCANPSCKAKVGTALDALDWRFGMVYMSRRERCGCGSPVFEMTSCNGCGTSLLLADESIDKETGESVLSLTKPDSSIDDFSLEIEVDDSDALLELDEEESETHARLCMMAEHDREETGQYWLNNEGVLKPSTHKGAFQVHRVEGYSKSDGTGVALRCPCCQHTKIQNYDFYRHFRNGAPFMLSTVIPTLLEFCQDGKKEQLKGPWHGRRMITFTDSRQGTARFAAKSQQDAERQFLRAALFHLVADRTLKSGALTPEQEADLKKYKSRLAMFIEDGDDDMVEIMEEKIAALCGGGDVSISWSDVEHELAKERELQYWIKDSYQRFDDKMTMVKDPVLLARLLLLREFNSRPKRQNTLETLGLIRMEYPAIKDKGNTAPNEWVALFDDRDRAQSEWVNFLTLCLNFHVRANKAISLTEEQQRWIGAKFSPGLISSPSDDSPFRNVQSWPQVRKGSVQPRLVRLLATAFNLDITDTQDKTQLNIILQDAWNVLQRYVLAGSGDGYRLELEHQVSFSLLAEKWQCPHTQKIIDTPLAKITPYLNVKGERAEQICCLLEAPVYPYPYGRQIEDGSPVALNVVRDWQEQSDIANLRKENAWSDISDRIIERTPYFRVAEHSAQLPAPLLRDYEDKFKKGAINVLSCSTTMEMGVDIGGISVVAMNNAPPNPANYLQRAGRAGRRGETKSVALTLCKNTPHGEHIFSHTRWAFDTPIHVPNVSLSSEYIVRRHINALLLSVFLRQKNISDNSLRLSCGNFFLSLHEQCASQAELFINWCVTDALDHMSDGLETLLRRTSLEATTKMSLVQESAQQMKTILCSWQKEHQLLCEQSEAVKADTNRLSIAQAAVETQIQRLEGEYLLSELARKGFLPGYGFPTDVVSLNNDNAESINRRKALIQAAKEAKSAKNDTLEHRIDNLYSARDYPSRDLSVAIRDYAPGSEVVLDGRVYQSAGVILNWHSPASADQVSEIQSLMWAWRCQQCGASGTERQMPKVCSCCEAQLSSDSYHRFIEPGSFAVDIRHKPHNDISRLVHVPFQDPWVTVEQDKWEEMSINPSALFRSSHNGHVYYHSSGLFNTGYALCLECGRMEPMPDSQDVTPYQVLENHTRLRGGKGEIERESVHFCGGNERDFAIKGPIKLGHSTRTDVFELLLFHPDGSVLNNRTIARSISVLLRNELAAKLGINSDEVGCTTKPVNYQDHEAQAIVLYDCAAGGAGFAIKTPEFLIALLQAAKKKAVDCHCDKACHRCLVDYSTQHALELLNRWKVIDFLNNDFFARLSLPEEFKLFERDNRRELRPLMAAIEQSLAHTIDPELCLYMQRDTLGDLSKWPLVGAMYSWAREQTVKVVLLSTDSSALTTPEQISLSWLANHPNIELLQRDDAIKRDMTLCAEILSGNSAQSWGYRNECDAQLVNGFGSRPTLSTIKLDALTHPERIGTVSIHHELNHSVKAFGALFWSKVLKASDLLLKKMQTHQIVEVEYCDRYLAAPLPFSLCLSAVGALLGHYKDCKASIITGRLKGGGYLPESVQDNWSSDDARDKVVNRCIEKTQLDITFETKPKYQLPHARTMTFTFDDGAKVTLWLDQGFGYWWLDKYLPENQFPADLTVDEQAECIVQGPWQLKSGDWPTVVFFSIEE

SEQ ID NO: 27144 - protein, 1125 aa, Vibrio xuii
MKTFRHCIADILSSRDLERVSGAPLYSYKLTDGEYSSLQTSLIDSLRKSHIESYIPKRMSSEWAGAFVMYAAEWWRKEFNGGHWSWEPIFKSLHVKDSDLAASQRNRLIEAGFRFWRRPVLCNGQGRMFLGTVAVEGGLPLQLITDPNNKLSHYFEQVIKDFGKYALSKPNAVAIAQAHDHCIVPSFRTDAVYSVVGKIAEAIFQLTDQYGLDEQHDPLRFLDAVAPDWPAALPLNIDHDVAKGLLNRALGQAIAVQRRLPHSLRLIRRLTQTYNPHAFVDDEFQQTEQSWGYQLAISLRPRLSAQYIQQLFGMQVLPERFSLFAMGKKPLLLAKAFKPKNNTERYLLDVMTCELPDDWFDCEIQLMARGDEGQSWYAPLLGGSALDAGEPWVFTDNNGEWTFVGAGDVSCESPSAVIALPAEMADQSLPHASRVLGAVGAPIAQSLYHVKETGRYTFGQNVVQLGVASEPNKEYVWQGEELPYQTLPTKCFIGKPNLFALSSQGMQQRIPVDRLRWYDGTKQQWSALETLPFGQSEVAYIEDGRVKKRFRLASLPNDIEIEFFPGSQINRGQIVISSSRPPMVALAQSAVGLLDYQVSKACDAVTIDLFCAQEQPPAVLDIDLWWQEKPKAISLTLPFPSKGICLLDANQQLVPCHSELLVDKINGYELYGYGVDGEIELQFLLKAQDVRGAFSRSAFFSAVLPSVDVLVSGLSLSSFRSEIQALFALSSSLDAKVQLTVSHHGQALYTCALSVYECALMPNRESNCVALAQTTDDKGTPELYTIPLDRPEHPPLALMPAPVTDGASMHWLFPQEEIEAGAWLIYSDNPQFGLRPLMWSKDLECLPAPSNGFEMAAGIGRRADRLEAFASVALEMAYDFTRPEWKYARTLLAFDHVPLTTFDLWRGVLRQPEFMLALLLNASKKEIDQVWKMDKQFPLLWYALKATSAVKVTEAFYHYLLERLGEDMADVAQLRIQKKLAELVSYFPGLAPLAKLLQFKLGMVEQKPSLVPAAYVQHLFDCRNALSQRQSDVSWPAIFADHIFQSVMKNINAQLVQLCLTTKYGFKNNVMNAPVLLALATSNQAELTMTPEVVHAIREYRRFDPEYFDDSFALTQKMIIGLLAI

SEQ ID NO: 27145 - protein, 2106 aa, Yersinia bercovieri
MTTRYFSSLIEQSLSRSTEATLSIMGVTNPQLREHLALQMRADCGKAGSFLASPVFEQTFGWEESKYTMKMLATEKTLLSKKVIDSLDSEQNGRYRFGANWKPFTHQLASWESLLEKKHSVVVTSGTGSGKTECFMVPVLEDLYRELRDSGNQPLVGVRALFLYPLNALINSQRERLDAWTRGFSSGIRYCLYNGNTEELHASVKSEQANKPNEVLSREKMREEPAPILVTNGTMLEYMMVRQVDAPIIQQSKAEKSLRWIVLDEAHTYVGSQAAELALQLRRVMTAFGVTPDDVRFVATSATIAGSDSEKQLKKFLSELSGVPQERIDVLGGNRVIPELDACKNYLVTLDELEHIPDSGNEGISFERYSALTHSPEARYLREMLVSQPRPVKLDVMTKRLNELTKNHYTQQEILRWIDLCTGTSLNAQDPAFLKVRAHIFQRNTQGIWACADKHCSAKHNTALEKNWPFGYVYVNQRQNCHCGSPVFELAFCNECNEPHLLAKDKKGKLVQWDNKGGDEFSLHDDIPDDFETSGEKVQKEHVFQAPQIIAPECNTEAGYIIQRLDRNTRSIGVVHKDAITLAINENEQICSASNCGYKGGKGQSPFRRALLGGPFYVTNIVPTVLEYCQDFANDEGKEGVGPLSLPGRGRRLITFTDSRQGTARMAVRMQQEAERSRLRGSVVELLSWHQRKQAVNTPNALADVTKLVEMAKQARDEAKNLRDWGMPEEAILSEEKAERIEQAIQKATGGKVNIVLTSLTWQEMINELKDKADIKGSILQYNHYLKPEIFTENSGPLKLSEMLLFREFMRRPKRTNSLETQGLVQVGYQGLEKLHKTPVHWHEQGLTLDDWRDFLKVTLDFYVRENNFIQLDLELKNWIGSRFSSKFVRNPESKDPDDNQVKRWPQIRHGNVTHRLVKLLILGAKFSTVNTVTIDIVNAWLKEAWLELTGPLAVLKPDGNRFYLPKEHLTFSLIQKASICPVTNKLLDTTFKGLTPYLPRHIQFERLTNTQYSAYMAQEVTLPEVWEHDHSQLDYVEGLAQTREWVSQDPLVAHLRSQNVWTDINDRVVEGGFYYRTAEHSAQQSADRLQSYEKMFKNGQLNVLNCSTTMEMGVDIGGISAVIMNNVPPHPANYLQRAGRAGRSKESRAISYTLCKGNPHDQQVFANPLWPFETVIPAPMVAMNSERLVQRHVNSLLLSEYLCHVVGETKKEKTNLNSAWFFGEEFGQSVCNSFKIWLERPALIIDDALELLVKGTALNAARPEFLREKTFRAITGLQKRWQGIFHDLVKQEHESQPNTPYRKRLELEKKRHCDEYLLRDLAARTFLPGYGFPTDVVNFDNFTMEDYVREKTHKSRNKSDREDNVSRYKGLPSRNLSVAIREYAPGAEIILDGRVFRSAGVSLHWHNLNADTNEAQRLDRAWRCQKCGTLGYEEGIGSSVELFCTNRDCGERITRDNTRQVLQPAGFVTDAYDPVTNNIETMKFIPVVPAWVFVKAERLPLPNPEMGFMASGANGHVFQQSMGEGGHGYALCLSCGRAESMISEKDAPKSMEAHYPPRPGKADRDSQNQRIICPGSTALNTKVTLGALARTDVFELILRRPQDGEYIPDSSEEGRIVAMTLAVALRRALAGVLGVSAAELGYAVRPVRLESEESVLAVQLYDVISGGAGFASSAPLHIEAILQGMVKQLGCAHCDTACSDCLLDSQTRHDHDHLDRKAALAWLGDDFSHYIGLPDEEKFSLPDAQYCPGTIEDAVRRAINEGADKLTLWMNGPLNEWDLYARQFRAAIQNYRLKDSVAVEIVIPASIDDPEVLHELAQFAAIGVRLCHAEQEVSFPIVAQIAFADRVITLVSRSQQATVPGPHWHQNDELVVRSQYYRPVALRGFELPATTVNYSELVKDIQIHKELNGPFSQFGQRFWDVLSNGHEKAQNLMKTNRITHIHYTDRYLQNPVALALLSALLKPLKTLMTKDAEVVIDTLFKNKDRPGNRPSHDWMSEADFQDFADQWFAASIGKAADITVFDYSRDIPHHRKLTVNFDNGQVLKIRFDQGMGYWRIDFPYVWRSFDFNDDVTSQLHKMAKACMEGKVINGEENWSTDVVVEVMEP

SEQ ID NO: 27146 - protein, 1100 aa, Yersinia bercovieri
MSRSEYIYLIKCTSWLTKFLTHRGLKVTDSRPLFEYHATSDEYEELKRLLRDVGQAEGLKNDKGYAACFTLFSAEWYRRDYERIHGWSWEPIYKTLDISLSAPELSLIVPKGLEDYWRRPVRFYDSERRNFLGSLFSEGGLPFKLLKESDSRFQSVFSRILNQYDQSLSLGYSVLALVQAVVEKSQLPTVFKEDTSVELIGRMADQLISLVQTYDLSNHSEPVNELDRVHPKWRDSFPMPLDDETGTSFLNGLLRTATVETKPRLQKKSKTTGCNFYWSEQHPDEIQAHIFLPNELTFAISSEPSTTRFELAVYEDGEEVASLGPAYARLDKTQAIVRLRKSEVRFVRQQTTASLSLVARAGGIIVGSIKLDRGEIAVGDVPLTFVRDEDRWLLQGQASCSVHSSDVLIILPTEGRLASKHEDCSSDIRALEHPVLSIKGRQDVIFEGNETYRIRTGREQVKYPDLALQGNQLAWLCSPYETFAGIPRVIHKFATAQRIEYERFLSGKSIDKCDLHETMGAHYISIRNEDNETLLRRKVGILPSDFQLEIKNREQANEGVIIISTQHPCLYRLKDKTLEVGRSKSANKTEIMIKAEGVPPTSVVLQVTPNLAGNPIDIILPFPTKGCLVLDVNGQHLRKNITINDLLGTRAFLFGKNGEPARFRLELRLMSRARLQVWYEWRYTAGERPVELNLYSLREHIENLLSLETGIDQIVEMRIDGAGSVLTWQIRRYKYSLNYDYERQVLFSNSVNTHSGQIPSPVIMLLSEPERKPVSITSRMSEGVPVGEFELSSVIQKNGPWLVVPGKGEEAAFRPCFIRGEPPLPTEVHAIQSMQKATQLFNPRSDVNTITLVLDQMASSPSHSGWQFLRSLYEQYGYLPLATFEVWRALVQHPQALAMSLFKFEMSVEYLSRIENEFPIFWEFLPIFEIKGAANRFCTFLTHKGAPEEMQKRLLNKMYQQLGTIFPTYANEVQEWLSLDLQPRPIPHSMMREIIQNWYQDLLREHSESSWPEYGGSQLYHWILSQQDSVVDVSPETRDRYSVAWLPVFAAAVASGKTTFESIFGHEPGTLFFLRQVRDFDSRWFNSIFQYSLLRNVAEK

SEQ ID NO: 27147 - protein, 2106 aa, Yersinia enterocolitica
MTTRYFSSLIEQSLSRSTEATLSIMGVTNPQLREHLALQMRADCGKAGSFLASPVFEQTFGWEESKYTMKMLATEKTLLSKKVIDSLDSEQNGRYRFGANWKPFTHQLASWESLLEKKHSVVVTSGTGSGKTECFMVPVLEDLYRELRDSGNQPLVGVRALFLYPLNALINSQRERLDAWTRGFSSGIRYCLYNGNTEELHASVKSEQANKPNEVLSREKMREEPAPILVTNGTMLEYMMVRQVDAPIIQQSKAEKSLRWIVLDEAHTYVGSQAAELALQLRRVMTAFGVTPDDVRFVATSATIAGSDSEKQLKKFLSELSGVPQERIDVLGGNRVIPELDACKNYLVTLDELEHIPDSGNEGISFERYSALTHSPEARYLREMLVSQPRPVKLDVMTKRLNELTKNHYTQQEILRWIDLCTGTSLNAQDPAFLKVRAHIFQRNTQGIWACADKHCSAKHNTALEKNWPFGYVYVNQRQNCHCGSPVFELAFCNECNEPHLLAKDKKGKLVQWDNKGGDEFSLHDDIPDDFETSGEKVQKEHVFQAPQIIAPECNTEAGYIIQRLDRNTRSIGVVHKDAIPLAINENEQICSASNCGYKGGKGQSPFRRALLGGPFYVTNIVPTVLEYCQDFANDEGKEGVGPLSLPGRGRRLITFTDSRQGTARMAVRMQQEAERSRLRGSVVELLSWHQRKQAVNTPNALADVTKLVEMAKQARDEAKNLRDWGMPEEAILSEEKAERIEQAIQKATGGKVNIVLTSLTWQEMINELKDKADIKGSILQYNHYLKPEIFTENSGPLKLSEMLLFREFMRRPKRTNSLETQGLVQVGYQGLEKLHKTPVHWHEQGLTLDDWRDFLKVTLDFYVRENNFIQLDLELKNWIGSRFSSKFVRNPESKDPDDNQVKRWPQIRHGNVTHRLVKLLILGAKFSTVNTVTIDIVNAWLKEAWLELTGPLAVLKPDGNRFYLPKEHLTFSLIQKASICPVTNKLLDTTFKGLTPYLPRHIQFERLTNTQYSAYMAQEVTLPEVWEHDHSQLDYVEGLAQTREWVSQDPLVAHLRSQNVWTDINDRVVEGGFYYRTAEHSAQQSADRLQSYEKMFKNGQLNVLNCSTTMEMGVDIGGISAVIMNNVPPHPANYLQRAGRAGRSKESRAISYTLCKGNPHDQQVFANPLWPFETVIPAPMVAMNSERLVQRHVNSLLLSEYLCHVVGETKKEKTNLNSAWFFGEEFGQSVCNSFKIWLERPALIIDDALELLVKGTALNAARPEFLREKTFRAITGLQKRWQGIFHDLVKQEHESQPNTPYRKRLELEKKRHCDEYLLRDLAARTFLPGYGFPTDVVNFDNFTMEDYVREKTHKSRNKSDREDNVSRYKGLPSRNLSVAIREYAPGAEIILDGRVFRSAGVSLHWHNLNADTNEAQRLDRAWRCQKCGTLGYEEGIGSSVELFCTNRDCGERITRDNTRQVLQPAGFVTDAYDPVTNNIETMKFIPVVPAWVFVKAERLPLPNPEMGFMASGANGHVFQQSMGEGGHGYALCLSCGRAESMISEKDAPKSMEAHYPPRPGKADRDSQNQRIICPGSTALNTKVTLGALARTDVFELILRRPQDGEYIPDSSEEGRIVAMTLAVALRRALSGVLGVSAAELGYAVRPVRLESEESVLAVQLYDVISGGAGFASSAPLHIEAILQGMVKQLGCAHCDTACSDCLLDSQTRHDHDHLDRKAALAWLGDDFSHYIGLPDEEKFSLPDAQYCPGTIEDAVRRAINEGADKLTLWMNGPLNEWDLYARQFRAAIQNYRLKDSVAVEIVIPAGVDDPEVLHELAQFAAIGVRLCHAEQEVSFPIVAQIAFADRVITLASRSQQATVPGPHWHQNDELVIRCQYYRPVALRGFELPATTVNYSELVKDIEIHKELNGPFSQFGKRFWDVLFDGHEKVQSLMKTNRITHIHYTDRYLQNPVALALLSALLKPLKTLMTKDTEIVIDTLFKNKDRPGNRPSHDWMSEADFQDFADQWFAASMDKAAEITVFDYSRDIPHHRKLMVNFDNGQVLKIRFDQGMGYWRIDFPYVWRSFDFNDDVTSQLHKMAKACLEGKVINGEENWSTDVVVEVMES

SEQ ID NO: 27148 - protein, 1100 aa, Yersinia enterocolitica; identical to SEQ ID NO: 27146

SEQ ID NO: 27149 - protein, 2109 aa, Yersinia enterocolitica
MKVQQLHYAPLLNQLHQRAVRSVVSQLALRSKSLTEYLESQYFRAPGQQGSLLADPVFESTFGWMPASETMDGLRDKLISNHLVNALSHAPVPFSHQLTAWRTILEDKQSLLVSSGTGSGKTECFMVSVLEDLIRQQEAHRQLLIGTQAIFLYPLNALINSQQERLRDWTKGFKGKIRFALYNGETKHTKYEVQEEQKKVPEQSLSREEIYESPPSIMVTNTTMLEYMLIRRKDAPIVDKSQGMLKYIVLDEAHSYIGSQAAELALLLRRVMQAFNVGPGTDNPVQVIATSATIGEDSVEGNQELAKFVADLAGVTERNVKVVRGYRQIPPISDTHIRAEFPLSLTSLNNLTPTELYQQLCQYRVTQELRRALTQQKNPAVRLSELLAIARHIWPEISNRELLQLLDLMAKARADTSDNSLAFTPLRMHGFIRTLAGLWACSNRQCAHKSHELQNKDWSFGQIWSEQRLFCDCGAPVFEVLRCSGCGTAYLSAKEELKNDGATWLSAQPTVADEDEFALEVDLYRDDEDEDSEESGHQFDRLLADTGEKTFVSLEENSQGKIVSNSAVGYEVNLLRPENRDAGKSTFFTCICCGDAERKNNPLFRPLRLGAPFFLSDIIPTLLEFSPLPKNLEEQQGPFNGRRLLTFTDSRQGTARISARLQQDADKSTLRTLCYQELANITEHSAGLSDEQKELLKPYIAQFSLVPIFKSAVEALSKAITSHEVLSPNEILALNTITAAISSQSEAHAQAMEVLLSGSGGQKVKSVSWQTLVEQLSGSVDLADRMRGSFKEISGLDLTKQQFADFCLYSEFGRRPKNAWTLENLGLVAIHYPFIDNVNRCPQDWKSLLPDPDKQLAEWRNLLKITLDFFIRENSAVFYENEQYPRWMGARFPVKMLQGPDKKYKEQKRDQLWPQIRDRHYNRVIKLLVAVFPAIQPDQTYWKDLVNNLMKEAWDAIRPNLRQFESGYQFDIKEQAYFYSPKEIWRCPYTRRALDVTLLGHSPYLPGSEGIAPEKAVLVEMPELPMRHWRLSGGGELPRDERLQWLENDPQIKSARREGVWSTRSDRLALKDGWYRLEEHSAQRTPQQNQFNEKQFKAGKVNVLNCSTTMEMGVDIGGMSLVAMNNVPPAPANYLQRAGRAGRRGESASAAITLCKNTAHGMEVFKDPLWPFNSSSKAPQVRFESESIVQRHVNALVLGLFLRAEVPDATKLSCKWFFEGEDSQCQRFLNWMDGQSEALANKLKRLVQGTILTSLTASQLLSRTNSMMKKAELHWRNQLAILLQNIESLKADNIAWEETPAGKAIAYQLRDYRSAYLFSKLISEAFLPGHGFPVGVVNFNFLTADELEKRKALKASQLDQKEGTENFSRSLEKLPSRDLPTALREYAPGADVVLGGKVYRSAGIMLGKVLGSGQELKGDHHIPWFWHCRQCGAGSTSATYPAGCSHCGAEKSLLTVRRYLQPVGFATDIRYQAHNDVSMPAQLPYQDPRVLVPSAVWVSLPDTSLGRYRFSNSGELFHFSDGEFGKGYAICLSCGRTESQTEAERTPATLKNPALENTHLLLRGGSNDRQGSSKLCHGHVHKDLWLGYSSRTDMVELQLNDENGLLITDDVAARSLAVALREGLAHKLGIENTELGVAIQQSRDSNNAYGYSIFIYDNNAGGAGYAVQVIDLFSEVFNYAKKLLDCSCDKFCHHCLLSYDSQHYVSKLDRHRALLLLTSTRLQMLKLAPEYQFFGPGSRVETIPLMLRLSQHLSSGRYGTLSLVISGVTEEWDFAHWPLLKDVLRFASSGGKVELLITTALAELPEKIRHQLSALSAMPGNKLCIRPITESLLAQSKGRWLAQIVGDDHCLQWAAGIDAITTPGESWGQSATTPVVSCPVHVAKVLPGDALSPEELLPELPAGAVRINLSHQLDGPLDGFGSRFWALISSQHPFWKRAFTEKREVAQVQYSDRYVNSPFTARLLAELLTELVEQGMAERAALSISVKKLDYSSRQHDSLFNAWLNEQDREQVVRTLLEEGYLGPAWSGNISWFIGDNRTTEHGRELTVSFKDGSEGYLLLDTGLGYWRCQGNSFFDFEEHPSRQVEIVASSRANLVAPDNGLRSYIIVG

SEQ ID NO: 27150 - protein, 1117 aa, Yersinia enterocolitica
MKTPTNPLLLWLKEFLKKRKLALTDGRALYAYRCDDVEFAKLAQTLSSHIPRTYPKTVFISYSDALFCLYAAEFIRRNHTAGHPKWDAILQSINWQIPYQHRQKLVSEGIRYWKREVRSLGQASGYLHTLACEGGLPVRMIENESGYLINYFRRIYQALRGSQGNVSAVKIAEDLSDTIPGTMQNELVYEVAGEFCWTLSKLLNESGHQGGDPIASLRKTLPNWHHQLPLVLLEENAAEIVRRLLSQTSETRVASGILIERIWIDVDDSWFCDARFRFPGMLRNEQLKALFECEIQEDQSRLIVSAQWKNGGARLAMLSRHEHQDWRVELLPAATQKISGVEAMGEISLMLFEGPALIGKGIPKGGYELTEDLPWFFETMNESESQLKLFGMGSVSSVQESLFISLPTNSHLDISGDGAFDIPQVLKNSARSLTKVSGVFSVILHDGAVCTVRTLQPFDSSTEYFIKPSEVDLVKSDYPVHRAKPKIAWKKELQHGIVPEHELYWRSIRSGNTTWSPVSTAIPKGQIEVRHVVNNEVLFSGRMVVLPADFDIKIVPDSAQKGIVTLSGIAETRVEHYTNNENYLLKTDYLAQECIVPFDGNVSKNITIDLRVTWRDGCNLKLLLPSPVAGGRFVNHEGETFSEGIASVDHLHGVSADLLTISPVGKGFLNIELKDENPLSKSYHFLSMDIPLFTGRNENLQQISLYEKYNLLKSLLACSWAKNSSLHLDFYAEKLGKVGSTLNVKRYDGKFIERDDRLHIDVQDAISFPQDRASEIIVQAVSLTDPASCVMTLQKDALGYDFSSKSDSSGPWLIIGKLDNYIRVEPLLRWSDKLPVHDELLIKSLCEPERSKRKNEIKLLLSDIKNNPLQQSAYSMVEYLKKYKSSDDLPLYVHDLFNKLSRDPLALIQLLITSCLSGDSELIYDMQNELPFSWGWIPFEHWRKSFHDCYVSLATQFGDEALALNILQPFVVFISNRAAIDRRFAAIANMLQMNFKLSQSVCVGIPSVDREQFNEAKQMLLRTPDSFGRVGTFTKEQWLTAISPDLKSIFKKFWIEDSYQQKFEKLFNLMLVAALLSHKDNNVMHQLSSLFEIHYQQAPQQLGIIYQYYFEQAGVCH

SEQ ID NO: 27151 - protein, 2106 aa, Yersinia frederiksenii
MTTRYFSSLIEQSLSRSTEATLSIMGVTNPQLREHLALQMRADCGKAGSFLASPVFEQTFGWEESKYTMKMLATEKTLLSKKVIDSLDSEQNGRYRFGANWKPFTHQLASWESLLEKKHSVVVTSGTGSGKTECFMVPVLEDLYRELRDSGNQPLVGVRALFLYPLNALINSQRERLDAWTRGFSSGIRYCLYNGNTEELHASVKSEQANKPNEVLSREKMREEPAPILVTNGTMLEYMMVRQVDAPIIQQSKAKKSLRWIVLDEAHTYVGSQAAELALQLRRVMTAFGVTPDDVRFVATSATIAGSDSEKQLKKFLSELSGVPQERIDVLGGNRVIPELDACKNYPVTLDELEHIPDSGNEGISFERYSALTHSPEARYLREMLVSQPRPVKLDVMTKRLNELTKNHYTQQEILRWIDLCTGTSSNAQDPAFLKVRAHIFQRNTQGIWACADKHCSAKHNTALEKNWPFGYVYVNQRQNCHCGSPVFELAFCNECNEPHLLAKDKKGKLVQWDNKGGDEFSLYDDIPDDFETSGEKVQKEHVFQAPQIIAPECNTEAGYIIQRLDRNTRSIGVVHKDSLPLAMNENEQICSASNCGYKGGKGQSPFRRALLGGPFYVTNIVPTVLEYCQDFANGEGKEGVGPLSLPGRGRRLITFTDSRQGTARMAVRMQQEAERSRLRGSVVELLSWHQRKQAVNTPNALADVTKLVEMAKQARDEAKNLRDWGMPEEAILSEEKAERIEQAIQKATGGKVNIVLTSLTWQEMINELKDKADIKGSILQYNHYLKPEIFTENSGPLKLSEMLLFREFMRRPKRTNSLETQGLVQVGYQGLEKLHKTPVHWHEQGLTLDDWRDFLKVTLDFYVRENNFIQLDLELKNWIGSRFSSKFVRNPESKDPDDNQVKRWPQIRHGNVTHRLVKLLILGAKFSTVNTVTIDIVNAWLKEAWLELTGPLAVLKPDGNRFYLPKEHLTFSLIQKASICPVTNKLLDTTFKGLTPYLPRHIQFERLTNTQYSAYMAQEVTLPEVWEHDHSQLDYVEGLAQTREWVSQDPLVAHLRSQNVWTDINDRVVEGGFYYRTAEHSAQQSADRLQSYEKMFKNGQLNVLNCSTTMEMGVDIGGISAVIMNNVPPHPANYLQRAGRAGRSKESRAISYTLCKGNPHDQQVFANPLWPFETVIPAPMVAMNSERLVQRHVNSLLLSEYLCHVVGETKKEKTNLNSAWFFGEEFGQSVCNSFKIWLERPTLIIDDALERLVKGTALNAARPEFLREKTFHAITGLQKRWQGIFHDLVKQEHESQPNTPYRKRLQLEKKRHCDEYLLRDLAARTFLPGYGFPTDVVNFDNFTMEDYVREKTHKSRNKSDREDNVSRYKGLPSRNLSVAIREYAPGAEIILDGRVFRSAGVSLHWHNLNADTNEAQRLDRAWRCQKCGTLGYEEGIGSSVELFCTNSDCGERITRDNTRQVLQPAGFVTDAYDPVTNNIETMKFIPVVPAWVFVKAERLPLPNPEMGFMASGANGHVFQQSMGEGGHGYALCLSCGRAESMISEKDAPKSMEAHYPPRPGKADRDSQNQRIICPGSTALNTKVTLGALARTDVFELILRRPKDGEYIPDSSEEGRIVAMTLAVALRRALAGVLGVSAAELGYAVRPVRLESKESVLAVQLYDIISGGAGFASSAPLHIEAILQGMVKQLGCTHCDTACSDCLLDSQTRHDHDHLDRKAALAWLGDDFSHYIGLPDEEKFSLPDAQYCPGTIEDAVRRAINEGADKLTLWMNGPLNEWDLYARQFRAAIQNYRLKDSVVVEIVIPAGVDDPEVLHELAHFAAIGVRLCHAEQEVSFPIVAQIAFADRVITLVSRSQQATVPGPHWHQNDELVVRSQCYRPVALRGFELPATTVNYSELVKDIQIHKELNGPFSQFGQRFWDVLSNGHEKAQNLMKTNRITHIHYTDRYLQNPVALALLSALLKPLKTLMTKDAEVVIDTLFKNKDRPGNRPSHDWMSEADFQDFADQWFAASIGKAADITVFDYSRDIPHHRKLTVNFDNGQVLKIRFDQGMGYWRIDFPYVWRSFDFNDDVTSQLHKMAKACMEGKVINGEENWSTDVVVEVMEP

SEQ ID NO: 27152 - protein, 1100 aa, Yersinia frederiksenii
MSRSEYIYLVKCTSWLTKFLTHRGLKVTDSRPLFEYHATSDEYEELKRLLRDVGQAEGLKNDKGYAACFTLFSAEWYRRDYERIHGWSWEPIYKTLDISLSAPELSLIVPKGLEDYWRRPVRFYDSERRNFLGSLFSEGGLPFKLLKESDSRFQSVFSRILNQYDQSLSLGYSVLALVQAVVEKSQLPTVFKEDTSVELIGRMADQLISLVQTYDLSNHSEPVNELDRVHPKWRDSFPMPLDDETGTSFLNGLLRTATVETKPRLQKKSKTTGCNFYWSEQHPDEIQAHIFLPNELTFAISSEPSTTRFELAVYEDGEEVASLGPAYARLDKTQAIVRLRKSEVRFVRQQTTASLSLVARAGGIIVGSIKLDRGEIAVGDVPLTFVRDEDRWLLQGQASCSVHSSDVLIILPTEGRLASKHEDCSSDIRALEHPVLSIKGRQDVIFEGNETYRIRTGREQVKYPDLALQGNQLAWLCSPYETFAGIPRVIHKFATAQRIEYERFLSGKSIDKCDLHETMGAHYISIRNEDNETLLRRKVGILPSDFQLEIKNREQANEGVIIISTQHPCLYRLKDKTLEVGRSKSANKTEIMIKAEGVPPTSVVLQVTPNLAGNPIDIILPFPTKGCLVLDVNGQHLRKNITINDLLGTRAFLFGKNGEPARFRLELRLMSRARLQVWYEWRYTAGERPVELNLYSLREHIENLLSLETGIDQIVEMRIDGAGSVLTWQIRRYKYSLNYDYERQVLFSNSVNTHSGQIPSPVIMLLSEPERKPVSITSRMSEGVPVGEFELSSVIQKNGPWLVVPGKGEEAAFRPCFIRGEPPLPTEVHAIQSMQKATQLFNPRSDVNTITLVLDQMASSPSHSGWQFLRSLYEQYGYLPLATFEVWRALVQHPQALAMSLFKFEMSVEYLSRIENEFPIFWEFLPIFEIKGAANRFCTFLTHKGAPEEMQKRLLNKMYQQLGTIFPTYANEVQEWLSLDLQPRPIPHSMMREIIQNWYQDLLREHSESSWPEYGGSQLYHWILSQQDSVVDVSPETRDRYSVAWLPVFAAAVASGKTTFESIFGHEPGTLFFLRQVRDFDSRWFNSIFQYSLLRNVAEK

SEQ ID NO: 27153 - protein, 2106 aa, Yersinia massiliensis
MTTRYFSSLIEQSLSRSTEATLSIMGVTNPQLREHLAQQMGADCGKAGSFLASPVFEQTFGWEESNYTMKMLATEKTLLSKEVVDSLDSEKNGRYRFGANWKPFTHQLASWESLLEKKHSVVVTSGTGSGKTECFMVPVLEDLYRELRDCGNKPLVGVRALFLYPLNALINSQRERLDAWTRGFGTGVRYCLYNGNTEELHASVKSEQANRPNEILSREKMREEPAPILVTNGTMLEYMTVRQVDAPIIQQSKAQKSLRWIVLDEAHTYVGSQAAELALQLRRVMTAFGVTHDDVRFVATSATIAGNDAKQQLKKFLSELSGVPQERIDVLGGNRVIPELEACKNYPITLDELEQIPDSDKEGISLERYRALTHSPEACYLREMLVSQPRPMKLDVMTKRLNELTNNHYTQQEILRWIDLCTGTSPNAQDPAFLKVRAHIFQRNTQGIWACADKHCSAKHNTPLEKNWPFGYVYVNQRQNCQCGSPVFELAFCNECNEPHLLAKDKKGKLVQWDNKGGDEFSLNDDVPDDFETSGEKVQKEHVFQAPQIIAPECNTEAGYITQRLDRNTRSIGVVHKDSLPLAMNETEQICSASNCGYKGGKGQSPFRRALLGGPFYVTNIVPTVLEYCQDFANGEGKEGVGPLSLPGRGRRLITFTDSRQGTARMAVRMQQEAERSRLRGSVVEILSWHQRKQAVNTPNALADVTKLVEMAKQSRDEAKNLRDWGIPEEAILSEEKAERIEQLIQKATGGKVNTVLTSLTWQEMINELKDKADIKGSILQYNHYLKPEIFTENSGPLKLSDMLLFREFMRRPKRTNSLETQGLVQIGYQGLEKLHKLPVHWHEQGLTLDDWRDFLKVALDFYVRENNFIQLDLELKNWIGSRFSAKFVRNPESKDPDDNQVRRWPQIRHGNTTHRLVKLLILAAKFSTINTATIDIVNVWLKEAWLQLTGPLAVLKPDGNRFYLPKEHLTFSLIQKASICPVTNKLLDTAFRGLTPYLPRHIQFERLTHEQYSAYMAQEVTLPEVWEHDHSQLDYAEGLAQVREWVSQDPLVAHLRSQNVWTDINDRVVEGGFYYRTAEHSAQQSADRLQSYEKMFKNGQLNVLNCSTTMEMGVDIGGISAVVMNNVPPHPANYLQRAGRAGRSKESRAISYTLCKGNPHDQQVFANPLWPFETVIPAPMVAMNSERLVQRHVNSLLLSEYLCHVVGETKKEKTNLNSEWFFGEEFGQSVCNSFKIWLERPTLTIDAALERLVNGTTLHGARPELLREKTFHAISNLQKRWLGIFQDLVKQEKESQPNTPYRKRLELEKKRHCGEYLLRDLAARTFLPGYGFPTDVVNFDNFTMEDYIREKTHKSRNKSDREDNVSRYKGLPSRNLSVAIREYAPGAEIILDGRVFRSAGVSLHWHNLNADTNEAQRLDRAWRCQKCGTLGYEEGIGNSVELFCTNSDCGERITRDNTRQVLQPAGFVTDAYDSVTNNIETMKFIPVVPAWVFVKAERLPLPNPEMGFMASGANGHVFQQSMGEGGHGYALCLSCGRAESMISEKDAPKSMEAHYPPRPGKADRDSQNQRIICPGSTALNTKVTLGALARTDVFELILRRPQDGEYIPDSSEEGRIIAMTLAVALRRALAGVLGVSAAELGYAVRPVRLENEESVLAVQLYDVISGGAGFASSAPMHIEAILQGMVKQLGCTHCDTACSDCLLDSQTRHDHDHLDRKAALTWLGGDFSHYIGLPDEEKFSLADAQYCPGTIEDAVRRAINEGADKLTLWMNGTLNEWDLYARQFRAAIQNYRLKDNVAVELVIPAGVDDPEVFHELAQFAAIGVRLCHAEQEVSFPIVAQIAFADRVITLASRSQQATVPGPHWHQNDELVVRSQCYRPAALRGFELPAITANYTELVKDIQIHKELNGPFSQFGQRFWDVLSSGHEKAQNLMKTNRITHIHYTDRYLQNPVALALLSALLKPLKTSMTKDAEVVIDTLFKNKDRPGNRPSHDWMSEADFQDFADQWFAASMGKAADITVFDYSRDIPHHRKLMVNFDNGQVLKIRFDQGMGYWNIDFPYVWRSFDFNNDVTSQLHKMAKACMEGKVINREENWSTDVVVEVMEL

SEQ ID NO: 27154 - protein, 1100 aa, Yersinia massiliensis
MSRSDYIYLIKCTSWLTKFLTHRGLKVSDSRPLFEYHATSDEYEELKRLLRDVGQAEGLKNDKGYAACFTLFSAEWYRRDYERIHGWSWEPIYKALDISLSAPELSLIVPKGLEDYWRRPVRFYDSERRNFLGSLFSEGGLPFKLLKESDSRFQSVFSRILNQYDQYLSLGYSVLALVQAVVEKSQLPTVFKEDTSVELIGHMADQLISLVQTYDLSNHSEPVNELDRAHPKWRDSFPMPLDDETGTSFLNGLLRTATVETRPRLQKKSKTTDCNFYWSEQHPDEIQAHIFLPNELTFAISSEPSTTRFELAVYEDGEEVASLGPAYARLDKTQAIVRLRKNEVRFVRLQTTTSLSLVARAGGIIVGSIKLDRGEIAVGDVPLTFVRDEDRWLLQGQASCSVHSSDVLIILPTEGRLASKHEDCSSDTRALEHPVLSIKGRQDVIFEGNETYRIQTGREQVKHPELALQGNQLAWLCSPYETFVGIPRVIHKFATAQRIEYERFLSGKSIDKCDLHETMGAHYISIRNEDNETLLRRKVGILPSDFQLEIKSREQANEGVIIISTQHPCLYRLKDKTLEVGRSKSANKTEIMIKAEGVPPTSVVLQVTPNLAGNPIDIILPFPTKGCLVLDVNGQHLHKNITINDLLGTRAFLFGKNGEPARFRLELRLMSRARLQAWYEWRYTAGERPVELNLYSLREHIENLLSLETGIDQIVEMRIDGAGSVLTWQIRRYKYSLNYDNERQVLFSSSVNTRSGQTLSPVIMLLSEPERKPVSLTSRMSEGVPVGEFELSSVIQKNGPWLVVPGKGEEAAFRPCFIRGEPPLQTEVHAIQSMQKATQLFNPRSGMNTITLVLDQMASSPSHSGWQFLRSLYEQYGYLPLATFEVWRALVQHPQALAMSLFKFEMSAEYLSRIENEFPIFWECLPILEIKDAAVRFRAFLAHKGAPEEMQKRLLNKMYKQLGTIFPAYANEVQKWLSLGIQPRPIPHPTMRDIIQEWYQDLLREHSESRWPEYGGAQLCHWIMSQKDSVIDISPDTEYRYSVVWLPVFAAAVASGKTTFESVFGHEPGTLFFLRQVRDFDSRWFNSIFQYSLLRNVAEK

SEQ ID NO: 27155 - protein, 2106 aa, Yersinia pseudotuberculosis
MTTRYFSSLIEQSLSRSTEATLSIMGVTNPQLREHLALQMRADCGKAGSFLASPVFEQTFGWEESKYTMKMLATEKTLLSKKVIDSLDSEQNGRYRFGANWKPFTHQLASWESLLEKKHSVVVTSGTGSGKTECFMVPVLEDLYRELRDSGNQPLVGVRALFLYPLNALINSQRERLDAWTRGFSSGIRYCLYNGNTEELHASVKSEQANKPNEVLSREKMREEPAPILVTNGTMLEYMMVRQVDAPIIQQSKAEKSLRWIVLDEAHTYVGSQAAELALQLRRVMTAFGVTPDDVRFVATSATIAGSDAEKQLKKFLSELSGVPQERIDVLGGNRVIPELDACKNYPVTLDELEHIPDSGNEGISFERYSALTHSPEARYLREMLVSQPRPVKLDVMTKRLNELTKNHYTQQEILRWIDLCTGTSSNAQDPAFLKVRAHIFQRNTQGIWACADKHCSAKHNTVLEKNWPFGYVYVNQRQNCHCGSPVFELAFCNECNEPHLLAKDKKGKLVQWDNKGGDEFSLHDDIPDDFETSGEKVQKEHVFQAPQIIAPECNTEAGYIIQRLDRNTRSIGVVHKDAIPLAINENEQICSASNCGYKGGKGQSPFRRALLGGPFYVTNIVPTVLEYCQDFANDEGKEGVGPLSLPGRGRRLITFTDSRQGTARMAVRMQQEAERSRLRGSVVELLSWHQRKQAVNTPNALADVTKLVEMAKQARDEAKNLRDWGMPEEAILSEEKAERIEQAIQKTTGGKVNIVLTSLTWQEMINELKDKADIKGSILQYNHYLKPEIFTENSGPLKLSEMLLFREFMRRPKRTNSLETQGLVQVGYQGLEKLHKTPVHWHEQGLTLDDWRDFLKVTLDFYVRENNFIQLDLELKNWIGSRFSSKFVRNPESKDPDDNQVKRWPQIRHGNVTHRLVKLLILGAKFSTVNTVTIDIVNAWLKEAWLELTGPLAVLKPDGNRFYLPKEHLTFSLIQKASICPVTNKLLDTTFKGLTPYLPRHIQFERLTNTQYSAYMAQEVILPEVWEHDHSQLDYVEGLAQTREWVSQDPLVAHLRSQNVWTDINDRVVEGGFYYRTAEHSAQQSADRLQSYEKMFKNGQLNVLNCSTTMEMGVDIGGISAVIMNNVPPHPANYLQRAGRAGRSKESRAISYTLCKGNPHDQQVFANPLWPFETVIPAPMVAMNSERLVQRHVNSLLLSEYLCHVVGETKKEKTNLNSAWFFGEEFGQSVCNSFKIWLERPALIIDDALERLVKGTALNAARPEFLREKTFHAITGLQKRWQGIFHDLVKQEHESQPNTPYRKRLQLEKKRHCDEYLLRDLAARTFLPGYGFPTDVVNFDNFTMEDYVREKTHKSRNKSDREDNVSRYKGLPSRNLSVAIREYAPGAEIILDGRVFRSAGVSLHWHNLNADTNEAQRLDRAWRCQKCGTLGYEEGIGSSVELFCTNSDCGERITRDNTRQVLQPAGFVTDAYDPVTNNIETMKFIPVVPAWVFVKAERLPLPNPEMGFMASGANGHVFQQSMGEGGHGYALCLSCGRAESMISEKDALKSMEAHYPPRPGKADRDSQNQRIICPGSTALNTKVTLGALARTDVFELILRRPQDGEYIPDSSDEGRIVAMTLAVALRRALAGVLGVSAAELGYAVHPVRLESEESVLAVQLYDVISGGAGFASSAPLHIETILQGMVKQLGCTHCDTACSDCLLDSQTRHDHDHLDRKAALAWLGDDFSHYIGLPDEEKFSLPDAQYCPGTIEDAVRRAINEGADKLTLWMNGPLNEWDLYARQFRAAIQNYRVKDNVAVELVIPAGVDDPEVLHELAQFAAIGVRLCHAEQEMSFPIVAQIAFADRVITLASRSQQATVPGPHWHQNDELVVRSQSYRPAALREFALPATTANYTELVKDIQIHKELNGPFSQFGQRFWDVLSNGHEKAQNLMKTNRITHIHYTDRYLQNPVALALLSALLKPLKTLMTKDAEVVIDTLFKNKDRPGNRPSHDWMSEADFQDFADQWFAASMGKAADITVFDYSRDIPHHRKLMVSFDNGQILKMRFDQGMGYWRIDFPYVWRSFDFNDDVTSQLHKMAKACLEAKVINGEENWSTDVVVEVMEP

SEQ ID NO: 27156 - protein, 1100 aa, Yersinia pseudotuberculosis
MSRSEYIYLIKCTSWLTKFLTHRGLKVTDSRPLFEYHATSDEYEELKRLLRDVGQAEGLKNDKGYAACFTLFSAEWYRRDYERIHGWSWEPIYKTLDISLSAPELSLIVPKGLEDYWRRPVRFYDSERRNFLGSLFSEGGLPFKLLKESDSRFQSVFSRILNQYDQSLSLGYSVLALVQAVVEKSQLPTVFKEDTSVELIGRMADQLISLVQTYDLSNHSEPVNELDRVHPKWRDSFPMPLDDETGTSFLNGLLRTATVETKPRLQKKSKTTGCNFYWSEQHPDEIQAHIFLPNELTFAISSEPSTTRFELAVYEDGEEVASLGPAYARLDKTQAIVRLRKSEVRFVRQQTTASLSLVARAGGIIVGSIKLDRGEIAVGDVPLTFVRDEDRWLLQGQASCSVHSSDVLIILPTEGRLASKHEDCSSDIRALEHPVLSIKGRQDVIFEGNETYRIRTGREQVKYPDLALQGNQLAWLCSPYETFAGIPRVIHKFATAQRIEYERFLSGKSIDKCDLHETMGAHYISIRNEDNETLLRRKVGILPSDFQLEIKNREQANEGVIIISTQHPCLYRLKDKTLEVGRSKSANKTEIMIKAEGVPPTSVVLQVTPNLAGNPIDIILPFPTKGCLVLDVNGQHLRKNITINDLLGTRAFLFGKNGEPARFRLELRLMSRARLQVWYEWRYTAGERPVELNLYSLREHLENLLSLETGIDQIVEMRIDGAGSVLTWQIRRYKYSLNYDYERQVLFSNSVNTHSGQIPSPVIMLLSEPERKPVSITSRMSEGVPVGEFELSSVIQKNGPWLVVPGKGEEAAFRPCFIRGEPPLPTEVHAIQSMQKATQLFNPRSDVNTITLVLDQMASSPSHSGWQFLRSLYEQYGYLPLATFEVWRALVQHPQALAMSLFKFEMSVEYLSRIENEFPIFWEFLPIFEIKGAANRFCTFLTHKGAPEEMQKRLLNKMYQQLGTIFPTYANEVQEWLSLDLQPRPIPHSMMREIIQNWYQDLLREHSESSWPEYGGSQLYHWILSQQDSVVDVSPETRDRYSVAWLPVFAAAVASGKTTFESIFGHEPGTLFFLRQVRDFDSRWFNSIFQYSLLRNVAEK

SEQ ID NO: 27157 - protein, 2106 aa, Yersinia ruckeri
MTTRYFSSLIEQSLSRSTEATLSIMGVTNPQLREHLALQMRADCGKAGSFLASPVFEQTFGWEESKYTMKMLATEKTLLSKKVIDSLDSEQNGRYRFGANWKPFTHQLASWESLLEKKHSVVVTSGTGSGKTECFMVPVLEDLYRELRDSGNQPLVGVRALFLYPLNALINSQRERLDAWTRGFSSGIRYCLYNGNTEELHASVKSEQANKPNEVLSREKMREEPAPILVTNGTMLEYMMVRQVDAPIIQQSKAEKSLRWIVLDEAHTYVGSQAAELALQLRRVMTAFGVTPDDVRFVATSATIAGSDAEKQLKKFLSELSGVPQERIDVLGGNRVIPELDACKNYPVTLDELEHIPDSGNEGISFERYSALTHSPEARYLREMLVSQPRPVKLDVMTKRLNELTKNHYTQQEILRWIDLCTGTSSNAQDPAFLKVRAHIFQRNTQGIWACADKHCSAKHNTVLEKNWPFGYVYVNQRQNCHCGSPVFELAFCNECNEPHLLAKDKKGKLVQWDNKGGDEFSLHDDIPDDFETSGEKVQKEHVFQAPQIIAPECNTEAGYIIQRLDRNTRSIGVVHKDAIPLAINENEQICSASNCGYKGGKGQSPFRRALLGGPFYVTNIVPTVLEYCQDFANDEGKEGVGPLSLPGRGRRLITFTDSRQGTARMAVRMQQEAERSRLRGSVVELLSWHQRKQAVNTPNALADVTKLVEMAKQARDEAKNLRDWGMPEEAILSEEKAERIEQAIQKTTGGKVNIVLTSLTWQEMINELKDKADIKGSILQYNHYLKPEIFTENSGPLKLSEMLLFREFMRRPKRTNSLETQGLVQVGYQGLEKLHKTPVHWHEQGLTLDDWRDFLKVTLDFYVRENNFIQLDLELKNWIGSRFSSKFVRNPESKDPDDNQVKRWPQIRHGNVTHRLVKLLILGAKFSTVNTVTIDIVNAWLKEAWLELTGPLAVLKPDGNRFYLPKEHLTFSLIQKASICPVTNKLLDTTFKGLTPYLPRHIQFERLTNTQYSAYMAQEVILPEVWEHDHSQLDYVEGLAQTREWVSQDPLVAHLRSQNVWTDINDRVVEGGFYYRTAEHSAQQSADRLQSYEKMFKNGQLNVLNCSTTMEMGVDIGGISAVIMNNVPPHPANYLQRAGRAGRSKESRAISYTLCKGNPHDQQVFANPLWPFETVIPAPMVAMNSERLVQRHVNSLLLSEYLCHVVGETKKEKTNLNSAWFFGEEFGQSVCNSFKIWLERPALIIDDALERLVKGTALNAARPEFLREKTFHAITGLQKRWQGIFHDLVKQEHESQPNTPYRKRLQLEKKRHCDEYLLRDLAARTFLPGYGFPTDVVNFDNFTMEDYVREKTHKSRNKSDREDNVSRYKGLPSRNLSVAIREYAPGAEIILDGRVFRSAGVSLHWHNLNADTNEAQRLDRAWRCQKCGTLGYEEGIGSSVELFCTNSDCGERITRDNTRQVLQPAGFVTDAYDPVTNNIETMKFIPVVPAWVFVKAERLPLPNPEMGFMASGANGHVFQQSMGEGGHGYALCLSCGRAESMISEKDALKSMEAHYPPRPGKADRDSQNQRIICPGSTALNTKVTLGALARTDVFELILRRPQDGEYIPDSSDEGRIVAMTLAVALRRALAGVLGVSAAELGYAVRPVRLESEESVLAVQLYDVISGGAGFASSAPLHIETILQGMVKQLGCTHCDTACSDCLLDSQTRHDHDHLDRKAALAWLGDDFSHYIGLPDEEKFSLPDAQYCPGTIEDAVRRAINEGADKLTLWMNGPLNEWDLYARQFRAAIQNYRVKDNVAVELVIPAGVDDPEVLHELAQFAAIGVRLCHAEQEMSFPIVAQIAFADRVITLASRSQQATVPGPHWHQNDELVVRSQSYRPAALRGFELPATTVNYSELVKDIQIHKELNGPFSQFGQRFWDVLSNGHEKAQNLMKTNRITHIHYTDRYLQNPVALALLSALLKPLKTLMTKDAEVVIDTLFKNKDRPGNRPSHDWMSEADFQDFADQWFAASMGKAADITVFDYSRDIPHHRKLMVNFDNGQVLKIRFDQGMGYWRIDFPYVWRSFDFNDDVTSQLHKMAKACMEGKVINGEENWSTDVVVEVMEP

SEQ ID NO: 27158 - protein, 1100 aa, Yersinia ruckeri
MSRSEYIYLIKCTSWLTKFLTHRGLKVTDSRPLFEYHATSDEYEELKRLLRDVGQAEGLKNDKGYAACFTLFSAEWYRRDYERIHGWSWEPIYKTLDISLSAPELSLIVPKGLEDYWRRPVRFYDSERRNFLGSLFSEGGLPFKLLKESDSRFQSVFSRILNQYDQSLSLGYSVLALVQAVVEKSQLPTVFKEDTSVELIGRMADQLISLVQTYDLSNHSEPVNELDHVHPKWRDSFPMPLDDETGTSFLNGLLRTATVETKPRLQKKSKTTGCNFYWSEQHPDEIQAHIFLPNELTFAISSEPSTTRFELAVYEDGEEVASLGPAYARLDKTQAIVRLRKSEVRFVRQQTTASLSLVARAGGIIVGSIKLDRGEIAVGDVPLTFVRDEDRWLLQGQASCSVHSSDVLIIPPTEGRLASKHEDCSSDIRALEHPVLSIKGRQDVIFEGNETYRIRTGREQVKYPDLALQGNQLAWLCSPYETFAGIPRVIHKFATAQRIEYERFLSGKSIDKCDLHETMGAHYISIRNEDNETLLRRKVGILPSDFQLEIKNREQANEGVIIISTQHPCLYRLKDKTLEVGRSKSANKTEIMIKAEGVPPTSVVLQVTPNLAGNPIDIILPFPTKGCLVLDVNGQHLRKNITINDLLGTRAFLFGKNGEPARFRLELRLMSRARLQVWYEWRYTAGEHPVELNLYSLREHIENLLSLETGIDQIVEMRIDGAGSVLTWQIRRYKYSLNYDYERQVLFSNSVNTHSGQIPSPVIMLLSEPERKPVSITSRMSEGVPVGEFELSSVIQKNGPWLVVPGKGEEAAFRPCFIRGEPPLPTEVHAIQSMQKATQLFNPRSNVNTITLVLDQMASSPSHSGWQFLRSLYEQYGYLPLATFEVWRALVQHPQALAMSLFKFEMSVEYLSRIENEFPIFWEFLPIFEIKGAANRFCTFLTHKGAPEEMQKRLLNKMYQQLGTIFPTYANEVQEWLSLDLQPRPIPHSMMREIIQNWYQDLLREHSESSWPEYGGSQLYHWILSQQDSVVDVSPETRDRYSVVWLPVFAAAVASGKTTFESIFGHEPGTLFFLRQVRDFDSRWFNSIFQYSLLRNVAEK

SEQ ID NO: 27159 - protein, 2106 aa, Yersinia ruckeri; identical to SEQ ID NO: 27157

SEQ ID NO: 27160 - protein, 1100 aa, Yersinia ruckeri; identical to SEQ ID NO: 27158

SEQ ID NO: 27161 - protein, 2082 aa, Yokenella regensburgei ATCC 43003
MGVTNPYLREHLTQQMAAECGKDGTFLASPVFEQTFGWKESNFTMRELATKQTLLSKEVVDSLDNEENGRYRFGSTWKPFTHQLASWQALLDKKHSVVVTSGTGSGKTECFMVPVLEDLYRELRDNGGKPLIGVRALFLYPLNALINSQRERLDAWTRGFGTGIRYCLYNGNTEELHASVKSEQANRPNEVLSREKMREEPAPVLVTNGTMLEYMMVRQVDAPIIQKSKAEKSLRWIVLDEAHTYVGSQAAELALQLRRVMTAFGVTPDDVRFVATSATIAGSDAEKQLKKFLSELSGVPQERIDVLGGSRVIPDLAPCQHLSLSLDELECIPDSDGAGISLERYTALTHSPQARHLREMLVSQPRPMKLDALTRRLNELTKHQYTQQDILRWLDLCTGTLPNAQEPAFLKVRAHIFQRNTQGIWACVDKHCSAKHNTALEKGWPFGNVYVNQRQNCECGSPVYELAFCNECNEPHLLARDKKGKLVQWDNKGGDEFSLQDEAPDDFDSSSEKVQKEQVFQPPHIIAAECNTEMGYIVQRLDRQTRSIGVVNPDSIPLAMNDIEQVCSASNCGYRGGKGKQPFRRALLGGPFYVTNIVPTVLEYCQDFISDEGKEGVGPLSLPGRGRRLITFTDSRQGTARMAVRMQQEAERSRLRGSVVDILGWHQRKQSTHAPNAQADVTKLTEMAAQAREEAKNLHDWGMPEEAIRREEQAERLEHAIQVATGGKVDAVLISLSWSEMVKELKDKADIKGPILQYNHYLKPEIFTENGGPLKLAEMLLFREFMRRPKRTNSLETQGLVQVGYQGLEKAHSIPAHWQDKGLTLDDWRDFLKVTLDFYVRESNYTQLDEDLKNWIGSRFSSKFVRNPDSKEPDDNQVKRWPQIRHGNVTQRLVKLLILGAKFSSVNTVTIDIVNAWLKEAWLQLTGSLAVLKSDGNRFYLPKEHLTFSLVQKAYICPVTNKLLATAFRGLTPYLPMHIQFERLTSAQYDAFVAQAVTLPEIWQHDRSQDDYVDGLRKVRDWLGQDPLVAQLRSQNLWTDINDRVVEGGFYYRTAEHSAQQSSERLQSYERMFKNGQLNVLNCSTTMEMGVDIGGISAVVMNNVPPHPANYLQRAGRAGRSKESRAISYTLCKGNPHDRQVFANPLWPFETVIPAPMVAMNSERLVQRHVNSLLLSDYLCHVIGETEKERTSLNSQWFFGEELEQSVCNRFKAWLERPTLSIDAALVRLVKGTALHGVAAEKLRDKTCDAIAALQKRWLGIYRDLVKQESESQPNTPYRKRLELEKKRHCGEYLLRDLAARTFLPGYGFPTDVVTFDNFTMEDYIREKTYKVRDKSDREDNVSRYKGLPSRNLSVAIREYAPGAEIILDGRVFRSAGVSLHWHNLNADTNEAQRLDSAWRCHKCGTLGYEEGIGGSGDLFCTNDACGERITPENRRQVLQPAGFVTDAHDPVTNNIETMKFIPVVPAWVFVKAERVPLPNPLMGYMASGADGNVFQQSMGEGGHGYALCLSCGRAESMLNLTDAPKSMEAHYPPRPGKADRDSQNQRIICPGSTALNKNVTLGALARTDVFELIVRRPQDGEYIADNTEEGRIVAMTLAVALRRSLASVLGVSAAELGYAVRPVRLENEQSVLAVQLYDIISGGAGFASSAPLHIEAVLKGMVKQLGCHHCDTACSECLLDSQTRHDHDLLDRKAALAWLGADFSHYIGLPDEEKFSLADAQYCPGSIEDTLRRAINDGGRKLTLWMSGPLNEWDLYARQFRTAIQNYRLKDDVEVVLVIPRNIDDPEILLELAQFTAIGVQLCQSELDTDTPLVAQVTFDDRLMTLISRSHDATIPGPNWHLNSQMVIRSHLQAPIALYKAELPSEDAGSKGLVNDIEIHKQLNGPVSQFGQRFWNLLTESQDDIQRLLTECRVTRIHYSDRYLQNPVALALLGGLLKTLKPMLTQEAEVTIDTLFRSKERPGNKPFHDWMSEADFQDFADQWFAASMGRAVEIQAFNSGRDIPHHRKLMVSFDNGQALKIRFDQGMGYWRINFARAWRDFNFNDDVSFQLGNMAQACAEGLVVNSEESWATDVLVQVIVP

SEQ ID NO: 27162 - protein, 944 aa, Yokenella regensburgei ATCC 43003
MFSLILNQYEQAQSSNISTFMLVHAAVEKSSLPVVFKEDTSIELISRMAEQLVSLVQIYNLSNHTEPVKELERVHPKWRDGFPVPLDDDTGTSFLNGLLQTASIESKPRLQKNKATLCQFLWSENHPDIVQTLISLPEELSFPIDSEPSTTRFELAIYEEGNEIASLGPAYATLSNSQAKIRVRKREIKFYRKAPDVSLFIVARAGGMLVGSKLLEGSEIAVGDVPLVFVSDHDEWLLQGQASCSVRGSHVLIVLPKDGCLASEHEDCDPDLSALGCRALIINGRQDITIKGDETYRIKTGRDQIIQAGFSFQGKRLNWTSCPDEVFLGIPGITKNPEDHSEHHYKRFFNGTFIDDCNAQEKMGTQFLSVRNDNNETLLRKKIGILPNDFNLEIKNGEQANEGSIIITTKHSCWYGLKEKTLEVDRKRFPGGTEIIMKTEGIPPASILLHIMPNLAANPIIVSLPFPARGCLAFDKDEKPLPKNLTINDLLGARAYLFGKNGEPTRYQLELRLRSRSGMQAWYEWRYSAGESPVELTLYSLREHIDNLLSLEKGIDQTVDMRIEGGGSSFTWQIRRYKYSLEYDREMQLLLANSVSNRTGQIPSPVIMLLSEPERKAISLVSRTSEGVPVGEFELSSTIQNNGPWLVVPKQGEEASFRPCYIAGEPVIQSDTSAIQSLQKATQLFNPRSDVNTITLVLEQMASDPAHSGWQFLRNLYDQFGYLPLATFEVWRALVQHPQALAMSLFKFEMSIDYLSRIESEFPVFWEFLPITEVKHASMRFRAFLTHKGAPEEMQTKLLGRMFQQLGTVFPTYASEVQLWLDQGKLPPTFPAQMIKGIIHEWYQELLREHGESRWPEFGGPSLFRWYTSQKDPIIEVSPDTSYRYSVTLLPIFAAAVACGKTTFDSVFENKPGAVFFLRQVRDFDSRWFNAIFQYCLLRNVATK

SEQ ID NO: 27163 - DNA, 1596 bp, Clostridium sordellii
atggataaagctaaagaaaattataaggtgggagaagtaagaatagtatctgcagatcaaataaaaattgaatatgctagatctgtttcatatgaagaaaaaaagttcttttgttctaattgtggcgaatatgttacttatgtaaataaagataaggggaagacattttttaggcacataaaaaaaacagaagaaacgaaggaatgtgaattaagaatagatgcacaaagccagctttcagtatatcaaaaagttggacttcctacatacttaaaaaaagactccaatggaaattttaacttgtttattggattttatgctatagataaaaaaataatggaactatcaaaaaatgaaaaagctagcattacaatattgggtggaaaaagtaactataatttaactaaaaagtattttatagataatataaacttttcttctgatattttaactttaaagcaaataaattttttagctacaaagtataaaatggaatactcaacattaaacgctaaaagtttactatctgataaatggggagatgaaatagaaggaattaatgcaaatggggcattatttaagtttggtgaaaatggtgggcgaaaaataagaattaatgaagaaataactacaaatacagattatttttgtatttgtaaagataatagtaaatttataagtttcagtggtataaactatttagaggtagggagtatttcatttgtaaatggagtttataaagtatataagataagctttagtttaagcgggtgggataatgaaagattatcagagttttgtagagaaatatttaaaataagcttagtaaataagccttatgaaattattccaatttggccaccaacgattaattgtgataataaaatagaattggtatttaataaaaataatttattattactaaagtcgcttcaacaaaatacaagagcatttatacatagaatgaagtattattcagaaattaatttgaataaagtaagtgataatcaatatttatttaaaatatcacctagttatatggaaagagctataaatataaatgatgagtataattccaaatatttacttgtatccaattataaaggcaattttaaatcatttagtaacaatattatattaacagatgtaaatgaaaacgttatagaaagaggtaaatatgataagttaccgttacaaggaaagttaaaaatatattcaaattctgagattgatattattcattatagaagaggaattatttataaattatacagagttaagagtaaagaaaatcttataaatgatttaaaatatggtgataaattaattgcaaaaataggattaaagaaaaatactataatagaatttgaaaaagtaaaagaagaaattactgaattatttttaaatgatgtagaaatttataaaaagctaaaaaaattaaatgagccatttgagccagtagatacatatacaagagcaatttttagatacttaaagaattatcctaaaacatttaatttaattaaatcctatataataaaaaataaaatgccaatagctgcaaagaaaattttaaaaaaaatagagattaaatag

SEQ ID NO: 27164 - DNA, 2010 bp, Clostridium sordellii
atgagttacgctacaacacaagaattaattaataataaacttaaaaaatataatgaagaagaattttactgtttaataaatagtattgataataaagagttaattaagccaattaagaaaaatagtaaaaagtttatccaagatacaaagggttggagaattgataaattagataaaaacaaattaaaagaaatatattttaaatatgtgtataaaaaaagagaacctaatttatctgcaaatttagtaaatttaataaatcaaaattcagtagatataatagatatactagagtcgaaattagatgatatagaaaatataaaattagaaataagaagcaataataaacaatacttagataaaatagtaagtgtattaatagacacctattatagtgaaaatataatactttgctttaaattaatagacatagaattaggtgaagaaagtagttcctatatagaaaaagttattaaacaaaaaaaactgataaaagaagaaaagataaaaataacaaatgatattacgatagagtttaatgaaaagttaaaagaaagcgaaaaaaattataacgaaattataaaaaataaggaaaaacaaataaaagcattaaattctcatatagataaaatcaataaaaaattttcattagaaatagaaaaaaaggaaatagaaatatttaaattaaaagaccataatgtttcaaaggaaataaaattaaatctaaaattagaaacattgaataaaaaaatagtagatttggaacaaaacttaaaaaaatctatagtaaaaacagaagaggctcaaaaaataaattataaaaaagaagaagaaattaataaactagtatatttgctagaagataaatatagtatgtttgataaatatgcaaagtcaaggtgggaaaaagaaaataaagagctgctattaaaaaatagagaaatagaaaaaaacataatagatttagatgtatataaacaatgtattgaagaggaactagttgtgttaaaaaaagataaagaaaatatagaaagtgcaattaattccctagaagacaattcaaaggattttataaaaaatattaattatataattgatagaattaggaaatgtgaaattattgaagatgatagaatagatacaaaaaatgaagtatcgagcagaattaatcatattccaagtaggttaatagaagaaaatccagaagtaaaagcacatgtatatgattttattgatgacctatccgataattttgagagtataggaataggaaatgattatacttatgatttagctaaatatgtatattctacaatatcaaataaaatgggattatttataatgggatataataatagattatttgcagatgcaatatcatatacaatgagtaactcatcagcagacattttagtaataccccctgggtttacagatagtagactattgattgagacagtaaataatctaacaagtaaggtagtgcttattgaaaatacaattgataatgttgttgaaaatgtttacatgccacttttaaaagaaaatcaagaaaaaatattaatattttcaatggaatcaaatgaaaatattaatataattcctaagagtgtgtttaattatttaatggtagttgatttagattcaattatagaaagtgaacaagtcgaagcattgtatgctagcataacatctgatgatatatttaaattagataaaaataaaaaaataaaaaaatcaagattattaagagatttaagtaatattgtagaattaagtaatatttcaaaaactaaaataattgaggtaattaatattatcaataactttgattcagaaaagaacagtaagaacggaatttatagtttactattattttcagtaggaatgttatctaaaagtcaaaataagtatgaacaaatagaaaatttcatcaagaaacaaaattttgaacgtgaaaaattagatattttagattttataataggaatgggaaataaagatgaataa

SEQ ID NO: 27165 - DNA, 1038 bp, Clostridium sordellii
atgaataataaagctcagatactaagtgaaataagcaatgatttaaatataggtcaatataaagaagaaaattttatattatataaatcaagagttatatactcagctttatctaaatggataaaaatatctaccttagataaggatattttaaaagataaagaatatgatataggtcaaagtagtaaatatttagttaataaagctaaagaaattttagaaaatataatagaagtatttccagaaattaatatatggtttcatccaaaaggcatgaaagaaagtccagaaattttaataattgatagattaaaaaattctggagaaattataaagtcggggtttagaacacaactagcacttccgacttatgaggaatgtataattagcgacaatacaaaagtaactagagggatagaaaataatgaaatgcatgtgtatacaggcttagttcaactaaaatcattagataatatttgcaaaatagataaaacaggtttatttgaattttatggtttagaagataaaacagcacaagaaatatggtataaatatattaaaaatgctgagtggaaaaaaagaaaatctattacatgtaatatttttaataaatatagtaagtttaatttttatagaagctgggaagaaaattacaatttaaaagatggtgaaatttcaatatataaagaaaattacaatgattatggtgtaataaaaaacatcgatggtgaaatatacacaagtcaatttacgcgcccattagtagaaagttatgaaataagaaggtttatgtatgctttaaaatgtgaagttaaaaacaatactatagcgaattacaaatatataggtaagtatgatgcagtagaattaaatcttagaagtgctttaccaaatcatgaaaataatatattgttggctttaggatggcctaagaattcgatccaagataccaataatttaatatttaatatacatgtatgggagtttgttaagctcattttggaaaatttgaatatagtcacaagggagattgattaa

SEQ ID NO: 27166 - DNA, 5262 bp, Clostridium sordellii
atgaataaatacggagtatcaaagacgcacagtgctattaaagataagttaattgattatattaaggctcaatatttagctgaaaaccaactactaatagaagcatgtgaagatattatagataaacaaggtatattatttcaagaaccatatatagaagctaacccagcttatgaaatattagaagatggaataaataaatcagatatacctaatgatattaaaaatatattggtagaaatgtctaataacaagttaggtgtatttaagaatccatttaaacatcaggtaaatgcactagaggggttttatagtggaaaagatttatttatagcaactggaacaggttcaggaaaaacagagtgttttatgtggcctatgataagtagtatcataagtgaggcggtaaataattcaagtagttgggaacaaaaaggtgttagagctttaatgttgtatcctatgaatgcactagtttctgatcaacttggacgtttaaggaaaatgattggagatacagaaggcagatttagaaaagtattttacaacaatgtaaattcagataatattagattacctaaatttggcatgtatacaggaagaactccttatccaggtgataaaaatagtaaagaggacaaagcgcttgcaagtactctttcaaaggacttactaaataaagaagatattataaaaaataaattaattgaaattggtaagtatccggctaaatataatttagaagagtatataagcaatttaaaagaaagtaaacatataacacatgattttgatgcagagttaataacaagacaagaaatgcagcaaatgtgtccagatatacttataactaactattcaatgcttgaatatatgttaataagaccgatagaacaatctatatggcaaaatactaagcaatggttagataaatcaaaagaaaataaattattattaataatagatgaggcacatatgtatagaggggcatccggtggagaagtatcattattaataagaagattacttcataaattaaatataggaagagataaggtaagctttattttaacaagtgctagtgtacctaaaaataaggagcaagaaattgttaatttcgcatgtaatttaaccgcacaaagtcctaaagatagtaacttcacaattatacatggaagtacgcagcatatagatacaaaaaatttgatagatattgaagtagatgagttgtgtagtattgatattgatgattttcaaagtgataatgataaaaagacaaaggcaataaataactttatttctaaatttatcaaaaacgatataagtgctaacgtattagaagaagctcaagataagttatatgcatttttaagtaaagttagaccgatggtttatattatgaaaatctgtcgaggtaatggagtttcttttacagagcttgctcaaaaagtatttccagatgaaaatttagaaatagctaaaagggcaacacaagtattattagggatagcgccattagctaagaataaagaaggacaagttttatttccatccagacttcatatgatgtttagaggattacaaggaatatatgcatgtagtaacccaaattgtgatgaaaaagtatcctatgatggtattaatttaggaaaaatatatttaaataaaaaatatagtacatgtaagtgttgtggtagtaaagtatatgaattagttaatgacagaagatgtggagcgttattttttaaggcatatatagatgaaaaagaaagtgatccaaaatttatatggaataatataggggaacagtatgataatactatgaaagaagtacatttatatattataccaaataacagagattttgaaaaaaatacttatactaaactgggatatttgaattctataactggtagattatatgatgatgataaatacagagattcagatggatttatttatgtatcttatgagaataaggagcaaaaaggaaagccaggaatacttacatactacagttgtcctaaatgtagtaaatcacatttaaatgtaagcgattttgtcacaaaaggaaatgagccattttacaatcttgtatcagaacaactgcgtattcagccacaaagtgtatttgatgaaaaattaataaagaaaaccccaaatgcaggaagaaaggtattattgttttcagatagtagacaacgagctgcatgtttagcaaaagatttaactagggcagcagatgatgatgcagctagaaagataatagtaatggcgtgtaagcaattacatgaatgggctaaaaaaaatggaaaagatcctactatggatttattatatattgtatttttagaaatagcatgtaataacaatttacagttattctacggaaaagaaggtgaattctttaaagaacatattttaaaaatagaatctaaaatagagaaaagtataaaaagaggaagagatctaaggtatgattctattagaaaagagatcaatgatactattaacttatataatgaacaaatattaaaattaatgtgtagtagctatcgatccctaacagatattggtttgtgttttattgaaccttgtaatgaaggtttacaggaagatataatagatgaattagaagattcggatatagatatgtcttggaaagaattctgtaggttattctcagcatgggctaatattattatgaaggatgtatatgcattaggaggacaaatagatgatgaagtaagaagaaatgttaatacgacaagatttgatagatatggaatagaggaaaaaaagagtattccaaaagctataggaaaagtattagaaaaaaatgacttaaaaaagtattctgatgaagagatagaaaaaatatatgaatgtttattgaaatttactgagactcctgtaggtagtgataagaagtatcttaatttgaatcttataacacttaaatataatgcaactcaaaagtggtatcactgtaaaaagtgttcaggtgtatttttcactgtactatggggaagatgcgcacattgtggagataaaaatgtagaagaaatgaatcaaaaagatttagatagatttaaattctggagagaacctgttttaaaagcacttgatggaaatgaattaattgcaagtataaatacggaagagcatacagcacaactatcgcataaagatcaacgtcaaaaaatatggtcaacaacagaaaactacgaaatgagatttcaagatgtacatgtaaatgatgaaatgccgatagacatcttaagttgtactaccactatggaagtcggaatagatataggatcattaactgcagtaggacttagaaatattccaccaatgagagagaattatcaacaaagggcaggtagagcaggaagaagaagtgctgctatatctacaatagttacatttacagataatggtcctcatgatacccactattttttaaatcctagagagataatatcaggagaagtaagagttccatggatagacgttgaaaataaaaaattaatatataggcatcttaacatggttgtcattacagagtttttatcaactataaataaaagtattgataaaataggtataacagagttcatagataagaattataaagagtttgctgattttgctaaggcctataattatactttagataaagttaatgtgctaataccaaataagaacatgatagacttagaagaatctaaaaatctattaattcagcagttagggaaaataaaagataaagttttaaaaatgccagaagagtatattgatgaaaaggattcttcaaagtcactactagatgtattatatgatgaaagtgtattaccgacatattcattcccaaaaaatatagttggattgtttatagaagataaaaaaggagaaaaaatagagcaaaaaccagatagggcattggatatggcaataagtgaatatgcacctggtcgtattattgtagtagataaaaagacatataaatcagggggtatatataatcatcattctaaactcagacaaggatattatgaaaaacctgcaagaccttattttgaaaataatgagtactttaaaaatttatactcttgtaacaataaggcatgtggatggtttggaactgaattaccagaagataataaatgtccattctgcaaagggggagaaataaaaagtgagaaattactaaaaccatggggatttgcaccactaaatgcaaccagtattcctgaatcagaagctgaaaatgaggtatcatatgcagagcaaccttgttattcaacaacacctgctaaagatgatatgttgagtacaggctatgagaacataagaaaagctaaaagggcagatcaaacgctaataatactaaataaaggacctaaagaagaaggctttaatgtatgtaaagattgtggagctgcagtaataggatcagaagaattaaataaaaaagttaatgcaccatataggcacccacgagtatttaataaaaaatgtaaccatagagattttgagaatgtagtattaggtcattcatttatgacagatatggttgtattcgagattaagctagactgtaataaaataaacacaaatattgaagacttatggataaattcagcagcaattactttatcagaaggaatgatactagcagcaggtagattgcttgatattgaatttaatgaaattagaagtggatataggttaagaagtggagaagattgtgtatttgtagatgtatttttattcgacagtttatcaagtggtgctggatatagtgctgaattagcaaataaatcaaaagaattattagagtacacattaagattattaaagtcttgtgattgtgaagattcttgccataaatgtttaaatcacttttggaaccagagagtacagaataagctagataggtatttagctatacaacttttagaatggggacaatttggaaatatggcaagaaagtatgaagttacagagcaagaaatgttatttaagccaattagagaacttttagaattagaaaatgagtatgtaatagaaaatagtgatgaattcataataattaaaaaaggaaaaagcttaaagaaggtatatgtatatccagttatgtggaatgctaatagtttaggattagaaaaagatataatttgtatttcagataagatgattattaaagccttacctaagtcatataattatttagttaatttacttaaaaataaataa

SEQ ID NO: 27167 - DNA, 1236 bp, Acidibacillus ferrooxidans
atgagcaccgaccggtataaggtaactacccagtacatgaaaaaggaattatttcgcgcattaatgctgcaaggatatgttattaggagagaccgtgttgacttaccgacgctagacacaaaagaagatatacgggaagctcatttgattcaacgcaggtcacgtttaaaggttgagcagttgttctacaagtcacgtggaactgatttgatagacgatttcttcgctaatggtcacgacgttaatccatcttctttcgaccctgagattattccggtagaatcaggcaaatggacaggggaactgtttcgagttgccaccttactttggagtattccggtcagtaggggatacggtcgaagaatgaggtttttagtcatggataaattcaatggtaaattggtaggcataattgcattaggtgacccagtttttaaccttaaggttagggaccagcacataggttggaattcgaatcagcgaaaagagcgcttattcaatgtcatggatgcttatgttttgggtgcggtccctccatacaatgaactgctggcgggcaaatttatcgctggtgtattgttaaccaatgaaatcagagaccagtttcgcaagaaatatcaaaatacttctaccatcatccagggtatagttaaacctgctgacctcgtgttgattacgacgacatccgctcttgggcgttcatctatctataatcgagttttttatgataacaacagcatccgaagatttttgatggagaaaatcgggtacacgtcgggttatggacattttcatattcctgaagagatttttgaactcatgaggaagttcttagaagaacgtgatgataactacgctaatgggcatcaatttgggaacggcccaaactggcgtatgagagtgatacggaagacaatgcagtatctaggatattcaaaaactccagtacttcatcatggtatcaagcgagaagtgtttgttgcaccgttggcaaggaactttagagaatatttaaagggtgagaccgggtgccccgacttcctcccgctcactttggaggaatatggaacatattttgttgaaagatttatggtaccacggtacgacagaattggcggcatatctcatcattatgtctctaacgttaaggctcatatagaacaattgttgacggaggatattaatcgaccgctccaatccgatagtttgaatttttcaccgtctcaactgatgtga

SEQ ID NO: 27168 - DNA, 1407 bp, Acidibacillus ferrooxidans
ttggacggtagcgatgccccccatccgtggcaactacaagtacatattcctgaaccagttttgcctgaagagttacgctcgggtcgcttgctcattcgtcaagctctcggtggaaccaggattattccattgcgaagtattcagtctgtaggtatccgtgtggcagtatctcctcagctacttccttacaaaatcgaggggattgaggttgaggaatccgattggatgaatcgtatttcagttgtgccagcacttagtagtcaggcgaatgtttttcacactggtctgaatggcggcagaagactgaatgataaagaacccattacatgggggaaatcgtacgttttattgtgggacgaggcgaaccctatcaaaacccctgtctttctgcattcacaggaactcaatttgcaagattcttggataggacaaatcgtgtacttgccaaagacatatgacagtgtagtggcaaagtgggtcctgagcgtactagggcgtcccattatccctcagcagcgcacattaattttgatgagccctgtacccctcaatgaacttgcagatggcaccttagttgttcccaccgatcaggaagtaatcattgggaccatggggggtcagcccaagtctactctcaccctactattcacaggcgaaggaataactagaaagattcaacttgttaaagctgatgacatgccttgcgtatttaggttcggacatctcaacgatggaatgatgcatctttggatagagaacgagcctgactgtgcgctgcatctcctagcacgaacttctgagttatgccatccatcgtttcctaaggtatctttagttacgtctggttcagaaaacgaaatttttctccatgctgatggctcggtgaaaaagttacagaatgttcgtgattccggtggatatttaacgcaggtaaatttacctccaagggtatcgatgaaagtggtatcaagtgaatttgatgaaccactggaacttacgggaggatcggacgacgaggcttacgaacgtacattggcgttcattaacgaggtgatgcataagaaggaaataccgatcacatttgatgctggagccttcgggaatttaacccttgaaggatccactccgaaatcggtcggtcaggttcgcatgtctgcggaatggcgtagaaaggtgtcttgggtattaggactgtcagagacgggttggaataggcattattcggtcatacataggctgatccgcgctgctgaccatacgtttatggaacgcttagatatacgattgttacggatgttaagtcagaagtcttcacctcccgagttggatgggcatgttattaatctccttgctgagtgtcggcgacttgtatacgagagagttgaaaggggacgcacaatgccatga

SEQ ID NO: 27169 - DNA, 1815 bp, Acidibacillus ferrooxidans
atgaacctgagctactcggatgaaaaacggttgattttatcaacaatcgagattgagaacataatgttatttattgctgatatacctcttaaggaacggcaaggcatattcaatcatctggtcgtcaaagtcaatggattcaggcccaatacaaggcagtatcttgaaaggaaaatgcaaatttatctacaacggcgacatcattggtcagagagagagtggaacatttttgtacaattatggcttcaatggactatgggccatcctaagatattgaccaatatcggatgttcgaaactagatgaggtcgtgaacattgtgagcgaaatgagtgcagacgaagacgtcatgattaaatactttgacggactttcgaatgccgaatatagtgtgtctgtgtcacgacgcgatcttagaaattggttcgatttcggtccatttaatcccaatgattgtgtagcagcacttattgaacgagcaccgacagaaaaatttttacagtttgtcgccaaggcagatacaatacaaagtacattaaatggcttagaggggcgtttacagcaggtaattgaacacgtatctacttctcgggaagaattgtggaccgctgtgaatgaaacgttgaccaaagttcagaaatttacatctgccattgaagatgtaagtgaccgccaacagcatttacagcttgcccatgaagaaaatgcaaaagcaggggagttatcccttagaggtgtccaggcggaacttgaggaacgtattgtacgtttagagcaagagacctcccagttcaatgttcgctttcaagattcattggcgagaactacgaatgttatagatcacttgagcagcggactaggtacattgtccgtggtacaaggacgtagaaatgataaaaattttgacgtcagtaagttacagagtgaacccggtccaatagatataattgaaaccacggacgcgttgatttccaagataaggaaaagtgttaattcacttggtgtgcaattgtctgatgcgaaactggtcgccgctattgttaccgcttcagtaggggctggtcaattgacgacgttcactggttcttattcccttactattgcacgatgttgtgcactcagtttagctggggatgccgtttatatcgttagagtccccaccggtttgttggatttcaacgagatctggagcggagtggacgaattaatcaaagacgcttctggtaagggcgctccgataggggtgatttttgagggattaaatagggctttttgtagcgccagtggaaaccggttaaaagaattgattgaggaacgaatgttgggagttactgacggtcagcttcgttctccatacttatttgcaaccttagtagatggacctgctggacttcaggaaagagcaccgttcgagatgggtcctgtcctttacactgacattttgcaatggaaaaagacaccgggatttatacagtccccgagcaaagcggcgggtgctgtctggaacgggtttactgaaggcatcaattcacatggtagcatggtcacggagcatgaagagatactgccagaatggttgtcgcctcatttaagtgctttgtcctatcgtgtatttcattcagctttccactatctaaatatgattgattacgcgaatgccgacagggcattgtcttttggatggatcgctccttgtttgataaactttaatcgttctgaatttgacagactggttgatgatgattatttcgatgagaagcttagtagaccactagaagcgcttgtaaagttggtggatagaaatggatacaattaa

SEQ ID NO: 27170 - DNA, 1092 bp, Acidibacillus ferrooxidans
atggatacaattaattcggcgtctagtgaggaatttcttcatttcaaattggcggaaatcggcagtggagtacgtgacgaaactgctgggattgtcgtaatcgttgcagaatatattcgcgattggctctggcatttgtcattgcatatgccacagtcgtttggtcagtataaattcagccctgttcatattcttcgattgctagacaatgtggaaaatcagttaacccctgcgtggtctgaatccagtgaaaatggcgtcggcaatgacgtcttcaacataagaaatataattatgtggacgcttgaacgattgcaggagataggtgacgtggtcaaagttggaacacatcactggattcctgcacctatccgattcgtcaagatgccggatactgaacgaattttcgttttcggaggagtatctaactcaattctaaagcggcagttgcctaagttgcggtatgttggtttgggacgataccttctagatgtagaaataccagataatatgcggcatgagtcaaatttctggcagagctacacttcttggctaggagagattccggacaatttggaatcatggatcgacgaactcaagactgtggtaaataaacacggcggtgtaagttcagcgagtttcgctgactacgaagtatttgtttccgtcccggaagtacgtagaactacacataaatcgtgggtttcggccaatgaattacattgtactcgggaagacatttttctgtgtagaaccaccgatttcacagaatattttattgggcaaataaagaatggacaattactcaaggaactacctatgggtaatatagaccgacagtggcttcaaatcggactatgcactcggcacgggttatcacctttggccacattgaaggataccaagatatatttctctcctcagctgccagaagcgttacgtagacgtttgatgacgtgtttggttcctttgccacctattgaagggcgacaacagtattatgtttcaaagggctcactttcagatgcagagaatgtgtattcgtactatggatatcagaccaaacacgtaggaggtcgacagtctatatga

SEQ ID NO: 27171 - DNA, 5556 bp, Acidibacillus ferrooxidans
atgaacgaggataaatcaattggcgtttttggtttaacgacaactctccacaacgttttgcgttcctatttggaatctgcctaccatatccgaaatatttctctcattgaagagagacgacgattgctcgataagacgggaacgataagtcagcaggcatatgttgagtcgactccaagctacgcacttggcaaatgttacaaagagttggatttaccgcatgtttctttaaaggttctgcacgatatttctaatctaaccccatcggttggtatttatccaactccgtatcaccaccagtcggaagcgttggaggctttttttcgtggcgattatgacttaatcattgccactggaacgggctctgggaaaacagaaagcttcctaatgccgattttggcctcgttggctcttgaggcagattcccacccagactctgcaaaactacctggatgccgcgcactacttctttacccgatgaacgcactggtcaatgatcaactcgccagaatacgaaagctcttcggagatgaaagggtttctcagatactaaagaaagggagaaatcggccggttcgcttcggttcttatacatctaggacgccatatcccggtctgcgaagtgcaaatcgagacgacaagcatatccggcccctgtttgaaaagttctatcttaaatatacgaatgatgatgaaaaagttgaattacttaaagacaaagggaaatggccaagtaaagacattagggctttttatggtaaggagcttgaggaggaagatgtctattcttcaggcaagcgtaaaggaaagcctcgaataattcgacactgggagaaacgtttgcgaacgcaaccagatgatagggaactgataacacgtgacgaggtgcaaagaacgtgtcctgatattctaattacaaactactcgatgcttgaatacatgctcatgcgtcccattgaacgttcaatttttaagcagacgaccgaatggttggagtcaaatcccggtaaccgtctcatattggttttggatgaggcacacatgtatcgcggtaccggtggggcagaggtcgctctactaattcgtcggctaatggcccgactacagatatctcgcgatcggcttcaatgtatattgacgagtgccagtttaggtgaaggggcggaggcagaagcagccgtattggattttgcagggaaactcactgggcttacttctgaatctaaccgccgttttaagcttataaagggtgttcaagaatcggtgaatcatgcacagcctggaacctttcaggaggctgaaatcctcgcgaaattcaatttggacgatttccaaaaaggtattgtagagcatcacccagggcggactgcgctcttgccgttggtaagtgacctgagttggggaactttacctagtgactgggacgatatacctgattttttatatcggaaaatgaagaattggggaccggcagaactcatggttgagagtcttagcgggcatgcagttcaagttgatgagttgtcgagtacacttttccctcgtgtaccagagatgatatcgcatcctgctactgaggcattgattgctttaggcacattcgcgcaaaacaaacatgatggccgtgtatttctgccaactaggctacacctattttatcgtggcctacctgcactttatgcctgcacagatgtagcctgtaccgatcggttggggacagaggagacacaatctattctgggatgtcttcacacgactccgcgtttacggtgcacgtgtcattcaaagtcgcgtgtttacgaactactgacacatcgagactgtggtgctgcattcataaaagggtacacaagggcaaccgctgactcatttctcttgcatgagccggtaggtgacgtaggtatccaagattcgtctgaacggttttatgacgtacagttactggttgatggggagccgcatgttgacgcacttcaggattgtaaccttttatggttagatgcaaaaacaggacgtctagcgcgtgaggaaccgcgcgacaaacgaggatttttaagggtatacgccccggttcctaaaacaggtaatggagaagatagggtgtttggacggtgtcccatctgcttgaggacgtggcgtggcaggagcaaaatcatggatttgtcaacgaagggtgaggcaccatttgcgaatttggtgaaggagcaattgttccttcaatcccctaaaatcactgaaacaagcaagtatccaaatgggggaagaaaggtactcttattttccgacggtcgacaaaaggcggcacgtttggctcgggatataccacgtgaagtggagtgggattcgttccggcaagctattagtctcgcagtacgaaaataccatcaagttaccgatcgcgacccaagaataaactcaagtctgtatggggctctaattgcagtggcttcggagtttaatacgatctttttcgatggaccagatcggaaagaattattgaaagcagtgaaggagtttcgcgacgagcttgacggaagcttggaagtggcgattgaggaaaactgggattttactcctcctcagtcgtattaccgcctgttactaagacaactgtgtagtcctgagttttcgcttcgggcagcaacactagggtacgttcggcctgcctctattgaaagactgattcaggaattgaggcggataaatgaatcattatcacgagatgatgttgaacaaatctcagtttcttttgtccaggaagttttgtccgattatgcatttgagacggaatctttgatatcggcatcagttcgacgcgacgcggctggacatccgcaaaacagttgggcaagtgatgggaaattgcccaacgctgtgcggaatattttaatacagtctttcggactacgttacgacgatgttgaaaagattgaaggagttttaagaagaaagctgtgtcattcactgggggatgcgtatgtattaaaaggtaatgaggtctcgcttacaattagacctgatgaaacttggtatcagtgtaatgcttgtacatatttatcacccgttcacttagccgggcattgtgtcaactgtggaagtcgtgaagttcaacctttaatccctgaatctagcgagtatatcagggcacgcaagggatttcttcgtgaaccggtgatgttggcgcttagcggattaaagagtccaaagaatataaccgctgaagagcatacagcgcagctttcccagcgagatacaggaaatttatttgccacgacggagaaatatgaacttcgctttcaagatattttgattgaagatgacgaaggggcagttgatgtactaagttcaactacaacaatggaagtaggtattgacataggctcgttggtggcagttggacttcgaaacgttccgccgcaaagagaaaactatcagcagagggcagggcgggccggacgacgcggctcttcagtatccacagtaataacttatgctcaaggcggacctcatgatagttactattttcatcatccggcatggattgtgtccggacaaccgaggttaccaatgatcaaaactgacaatgccaaaattgcacagcgtcatgtgaatgcgtacttaatgcaaactttctttcatcataggattgatgaaggtacggttgaggatctcaattataatcagggtatcttatctgttttgggaacggcatctgatttttttcaaaataccaacgggaatcttacttttgaagagttctcacaatgggttcgagtattaatattggagtcatatagcccaataatggaaaatatcgtgcgttggttgcctaccgatatatcaagtgacatgtactcgtgggtcaaagctacagccaaggagttacttgatcagttgaaagcggtaagggatatggtaaaaattccacttgagaaatcctcaggggtacctctggatacaaacgatgaagacaccgtggaaacgggttacgatttcggtgacagtagggatgagctattatcctttctgtttgatcagggcctgctcccgagctatgcattcccaatagatttatgcagctttgtaattgagggcaaggaatctcgactaggtgggttcaaggttgtggtgaaagaacgaccacagcaatcaatcgataagtcactaagcgaatatgccccagggcgactgatcgtagtggataaaatcacctacagatctgggggtatcacagcaaactcgtctttacctacagacccagatcgagctctgccactgtttgagagcaagcgtaacctccggccctatgtgtcttgtccaagatgcactttcgtacaagatttgatagcagatccacaaaatctcgaaaattgtcccgtatgtcagggaccattggaaaaaggagaaatgttaattccggaggtctttcatcctgagcggggggagtctttgaatttaaatgatacggagcaagagtatacatatgcaacttcggcacagttccctgttcctgtgtcggtagacgaccttcaagaatggacaaatgtaggggaaaacatacgcgttacatacgctcgtaataagcgattggtgatggtcaataaaggtgacagtgaaaccaacgaaggattttccatttgcgaaaagtgtggggcagcctctgtcttcgactcccataaatttcagcaacgtgaacatgtcagaccgtataaagtagaaccaaaaagcggcgtatacgcgcgagagcggtgcgatggcttgttccgccaggttttcctcggacatcagtttcaaacggacctgcttgtcctacgtattaatttgcaaagtccattggtgcggcgactagatgctaacgtatcagctaatgttcttcatgacgctctacggacaatttcggaggttttaattcttgccaccagtgaatgtttggatcttgatccgtccgaatttcatgcaggttatagattggttagaccacagtctggggatgcgattcgcggtgatatttatctgtttgatactttatccggaggtgctgggtacggagagcaagctggaaaagtcgtcgatgttattttatcaaaatcgttagaacggttagaaaattgtcccgcacattgtgatacttcctgcactgaatgtttacgtcactaccaaaaccagtactggcatagcaacttagacaggcgattaggtgcagcacttcttcgttattgcttgttcggtacggttcccgaattttcgcctacagaagaacagagtgacatgttgattgcactggcacgtttgctccagttagacgggatgaagtgtacgatgaagtttgacgttaatggagttttttcgcccctcgtcgtaagtgatggcacgacacgattggcagttggggtagttccatctctattggaggagaacgaaggtgttgtgactcatccaatgatgaatgtagaagcaggtaatttgaaaagggtagtcttttctcaataccttttggtgcgcaatctgccccttgtataccatcgagtaaaactgatgttcgaagaatggcggtga

SEQ ID NO: 27172 - DNA, 1515 bp, Anoxybacillus flavithermus NBRC 109594
atggaaagagcatttgatcaattagggaagcttgttcatgcaaaaaacgcacataagtatggcattgtttatacgtgtccttgttgtggggcgagagtatttaaagcagagggaagaatacaatccgcccattttcgccatgagcgagggcaagggtctgaacgatgcgagctttacgttcaacgtttaacagggtcgtctcattttaatgattattcggcgatagtaaatcgcccctttattacgtttgaaccgtttgaagacgattgggaactttttattacattcccttacttaactccttctcaagcgagacaatgcgatttacaacatttacactttaaaataaaatgcaatgaaatgaattcctttatttcatccgcccagctctggccaagctctaatgaaaataaacttcggattgttcctaaagaaagctacagtttctctttcgcgagaaaagaagatgaaagatgttatgaaaagcttggccttttttggcctgaatacatgaaagggtttagaagtaatatatatttatttcaattaataaacaaaaatttttgcatgattgagcctagggaagtatcgctgaatgatacgttttatatgatgtcgcgaaaaaaaatagaattcccggaggaaatatatgcaaaagcattaaacaaaaaatatgggtggtttgcttacaaaattcagattccatgtgtgttaacggattcattaataaagtggtttcagcgatttggatattttttaaaatcgccatattattacttagatatagtaactccttcagttttcgggagaaaaaacgatgcgcttttaattgaagaaaaggaatgtgtgattcagataactttccgtgattttaaaccacaaatcattcatttagttcatattcagcctgattatgtaagtaaagaatatcgtttatcaggcacttattttaaggttacattaaacaaagaagggtttcatactttttacattaaaaatcaagaagggaaaatgttgcatttatactatggtgagaagattaatacctgctttttggaacgattcgattcctcgattatagctgatcaacaaaaattaacgctatttgaggaaaagagcatttcaaaatataagtccatttctgtaatggaatcccctttcttttcttattggatcaaagaaaaaaataagttcgcaaggaaactcgaccacggaggggatttttcctatccatccgttgagaaaattttcattcctgggatttggacattttccttttccttagaagaagatcaacgacataatgagttcgattggcataaaattttgttggcatatatacggatggaacaaggagcaactacttggatttcaaacgaacaatatatttttttacagaagtgtttagggagtatatatgataaaaacttgcaatcgaaattaacgtattatttgaaattgtatcgcaatcaggttccaaagcttgtcaaagaatctattcaaagaatgaaataa

SEQ ID NO: 27173 - DNA, 1980 bp, Anoxybacillus flavithermus NBRC 109594
gtgaaaacgatttttggcattattgagagagaaagaagacaaaataaaaaatatatgtttgttaaggttctggcggaatataaagatcaccagttaatcgaggttaaagatccgtgtctcgactatcctagtgagggagaagtgatatggtctcctgtgccagaagaaataaatgtaggaaaattaggattctatacaatagaagagagaaaggaagaggattatatagggaagtccgtatactcaaagtacatggtatacaaagaattagaggacttaaaatactacgaggttgttaaaataccgctttcacttgccaaaaataccgaaatcatttatttaatccaaaacgggattgacgctccgcagaagtttagttcagatattttattgctgacgaacgataattatttgatcggaccttaccgtactaaacaaacaaaagatgggaaatggaccattgattcgttcgatgataagtggttggagattcgaaaaaagagtataaatctcgttgagtattatgataaaaacatagggggaatgcgttattttacatcaactatgttaatggatcgtgttgaagattatcttgattgtgccacgaatgagcggatcatgcgctatgcattaaaagtgctcaaagagtatcaacaagttcaagagatttcaagaaaggttattagccagctgtctgatttagttagcgaacttccttcacaagttcattatgagcgcattatgacagctattgagttattaactgaatatgaggtaacagaggaagacgttagccgatttgaaggagaattgttgcaatatccagctattcagaagaaaatgcaagcattattggaagagaagtttaacgctgagaaaaaaagaattgaagaggaacatcgaaaaacgttaaacgaaactgcgcatttgcgtaaagagaaagagcatctattattagaaatggaaaagctaagtcaacagataaaactatcagaagaaaaactaaaaaaagccgataaagcattgaatgataaaattaaggaaatgaaggaaaatatttttcatacattaacagacttagttccgttagcaagtttagggataaacgtttctcagcatcaagttacaaactaccgaaatgagtctccttggaaggtaaaagacaatgaagagacggtggtgtatgatagtattcacgatttagtggatcatgctgtaaaaaatctgtctatgcttggcatagaggataataaagcgttgttagtagctaagactgtgattggagcgatgttatttagaacaccaatcgtggtaaagggaggctctagttttgaattggcgcaagtgattggctggaccattgcgggaaacgagcatctaacgattttccctgatatgaaaaatttcagcaaccaaacacttgtcgagagcttctctaattatgtacggtttgattgtgtgaaatctgtacatttatgtcaaattgaaaattcaccagctgaattgtacttgccatcatttttagattattggcgagtttctattgaagaatcattgccggaattaattcttataagtattaaagaagatagtgatttgacggattccttcattcaaaaattaccttttgtaccgataataaatgcagatgaaatagtaacaaatgcaaatattcgatcgctaagaaaggcacgtagtttagtgtttggttccatctcgtcgaacttgctgatagaggatgatatattaagaagaaagtcgagtgaatttagcagttttttagagatcgttaaagaggttataccgtttaccaaacaaaaagaatcatttaagaaatggtttcgtttattagaagacgaactgttggaggaagaagaggtgtccgtgtggattactaaagtattgttgcaaccttatattgacaatgaaaaggcaatgaaaattttagaagagttcgattacgaaagtatgatggtttag

SEQ ID NO: 27174 - DNA, 939 bp, Anoxybacillus flavithermus NBRC 109594
atgttggggaaaagatgggaaccgaaaatacagcaatttagacaaataaaatctcatgctctttctttattacatttttatgcgtttgaagaccaaaaaatgcaacctgttcattttcagcagctgattccatcgcttcaaaggctaataaaaagcgatttttttgaagattttaggaatcttatgaaagatgaagacagtagaactgaggcgcaagtgttgcttgagtggttatctagtttgggggaagtgctaaaactctcccacggatactatttaccgctgccatcgcgttccgttgaactcccagcatctaaaaacttgattttgcttagcagtatgaaaggaactagcgataagtattatggatgtggtagtgggtatatagaagatagtaacgtttttccgacgttgacacttgatgaatggatgccgtcattgtctgtaaatgaattcattaaaacaatcaaatcggagaagccaacacagttgactgacgaaccaaccgaagtttttttagcgaaaacaaaacgtaagtggcgtccatttcaaacgaatctcatatcacagttcgactgttatattgctagatataacttaaagaacagtcagccgttttacttttgggttgaaaaaggaagttattataaaataccagctgattatttggatattgcaaaatacgcattggaatacagagctgggattaaaataacagtaaaatgtacaaaaattcatggggagcttattcatatccgtttttctaaaaggttgccaatatccgaagaaagaatgctcatgctatttgctttcccattttcctttataaagccgattgaatggattatgtctcttcagcattattcagactttatttgggttttgcaacgattaggaattgatcatacttcaatactatgggagggagctgaagtttga

SEQ ID NO: 27175 - DNA, 5355 bp, Anoxybacillus flavithermus NBRC 109594
atgatggagttcaccattaactcggtttctgcacgattacaccaaaagttaagggagtatattgaagcgcagtatccaattagccatcattcactgttgttagaacggagagaattgctagattcccaaggaatcatttcaaaagagccgtatattgaggcaacacctgtctatgaaccaggctcaacatatgaacaaataaacttaccaagtcactgcaaagaggcaatgatgtgtttttcggatttatctccaagtgtagggatttataagagaccatatgttcaccaacaagaggcattagagtcatttctgaaagatgggaacgatttagttgtagcaactggtacaggatcaggtaaaacagagtcatttttacatcctattttgaacgcattgatcgacgaaggaactagtagaagggagcaatttcaaacacatgccgttcgagcattaattttatatccgatgaatgcactagttagcgatcaaattgcaaggctacgtaaactttttggtgacgaacgggtggcaaagtattttcgagagcgtttcgggcgtcacccgttgtttggtatgtatacatcgcgaaccccttaccccggggagcgtacagaggaaaaagataaatatcaattaaaagaaatccttcaatactatttagacattgaaacgaatcagccgcaattagcaatagaaatgaaaaaaaggggaaaatggctcgcaaaaaacttagaagctttctgttcaggtaaaagaggggattggaaatcccgatatttgacatctccagatgatcgtgagctatttactagacatgaaatgcaaacgactccaccagatattttggtaacaaactactcgatgttagagtatatgttgatgagacctattgagcggccgatttgggaaaaaacaaggcagtggcttgcagaaaatgaagaaaataaatttatcttagtgcttgatgaggcgcatatgtaccgtggaacaagcggtgctgaagtagcgttgctcatgagaagattgcaggcaagattagggattacacgtgatcgattgcgttgtattttaacgagcgcgagtttaggcgcggagaatgatgattcggtggctattgaatttgcagaacagttaacagggaagcctaaaagtcgctcttttaaattaataaaagggacgagggagaaaagagcaccaggtagaatcggtacagctaatgaggcttattctcttgctttattagatagtgagcaatttactaatcgtattcatcagtatgatatgttaaaaaataaccttcaagttatagcagatcggctcggttggcaaaatgttccgaatgaccttgaagagttaccagcatacttatataaaagtttagatggatttggtccgcttgaattaattattgaacaaataagtggaaacgctcaaaaatttagtgatattgctaagatggtatttccaaatgtggaggaagaaattgcacaaaaagcgacgagtcatttattgatgttggcgaatgctgcgaaaaacaatgaacgggtgctgttaccggtacggatacatttatttttcaaaggcgtatcaggtatttacgtatgcacaaatcctaaatgtgatgcaagaagggtaaaggaagacgattcaattttagggaaaatgtatgattcccctaaactaaaatgcacttgccgtgaggaagcaagaatttacgaattactgactcaccgaaaatgtggtaccgctttcattaggggatatatctctaaaagaaatgataattatttatgggcagagaaagggaaaggaatcgttgatgaggaattgacggaggttcatttgctagttgagccgccacatgaaaaaatacagaaaggaaatcgagcggcacgtcctgtatggcttgatataagaacagggtatttaatgaaatctccccctgatgatcctgaaggttacctgaaactgtattggccgaacaacgaggtgaataagaacaaaaagaaaaatcaaacggtcacttttcaacaatgtccttgttgcatgagaaaagtgcaaggaacgattacagatctgaaaacaaaaggggaacagccttttgccaatatagttcgcgagcagtttttattgcagcctcctgtaaaactagataaaaagctgcctaatgagggacgaaaggtgttgttattttctgatggtcgccaaaaggcggcacgtctcgcaagagatattccatatgaagtagagttagactcctttagacaggcaattttattagctgcacaaaaattgattgatcaagaggtagaaccgaaacttggtaattccttgtattgttcttttcttcaagtggttgacgagcataaattatacttttttgacgatcaagatagaaaatcgctcgctagtcacgttcaaactttgaaggataactttgatgatgactatgaggaactggttgaagatggcgatattgaacctttaactcgttttaaaacagaactacttcgtcagctctgccatccgttatattctatttacacaactgccacgggttacttggagcctgtagagaaggaagtagcaagaatagataaaaaattaaaggggatattgtcaaaagaagatatttatgtactgatagctatttttattcaagaaatgttagataagatagctatcgattcaaccgttcaattttatgagcgactgaagattaggggatttggcgaggatgagtggggagttaataaaggttatatatcgaagaatttagagaatatcattaacctttatgttcaaaatcaagagcataaacagctgattgtagatgcactgtttaaattgtgcacagaatcagaaggaagatattatttatcccctagaaaattaaaactgatgcctggcatttatacaacgtggtataaatgtaacgattgcaaagaaattaatatggtaatagcaaaaaacaaatgtgtaaattgtttatctgagaatattgagatattagatgtcaatagtaagagtttagattcagaaaaagggttttggcgttcaccgatacaaaaaataatgacaaacaatgaaaagatatcaaatattactgttgaggaacatactgctcaattatcacaaaaggatgcgaaaattgccattgcaaccaccgaagaatatgaattacggttccaagatattatattaaatgaatcagaaggtcctgtagatatattaagctgcacgacgacaatggaagttggggttgatatcggttcgctaacagctgttggcctgagaaatgttccgcctcaacgggaaaactaccaacagcgtgcagggcgcgctggtcggagagggacagctctatcaacagtagttacttatgctcaaggagggccacatgattattattattttcggcatccagaaaaaatgataagcggttcaactcgcaaaccaattgtctatactgataataaaaaaattgcgaaaagacatttaaatgcattccttattcaaacatattttcacgaaaaagtctctacagtaactactgcgtcaagtattctcagcagctcattgggggatacaaaatcgttttttgaaggagagccgccatttaactatgtacaatttaaaaaatggttaaatgacaatgtagagtgccgttttcgtgactgccctgtaatatttgatttaattcctgatgaagttgtttcagctaaggaagcattaggagaaaatattttacaattaaaatggggcgttgttaaagaagcgtgtaacgaactggtaaatgaattagaaaagaattatgagaaagtaaagcatacattaaaagcgcttgttgatgatacagtggaagtaaatccaaacgataagtttcttgactttttatttaatcatgggttgcttccgacatatgcgtttccacaagatttatgcagtttttatattgaaggaaaagatagaagaacgggaaaaataattgttaaacagaggccgcaactcgaaataaacagggcgttgagtgaatatgcgcctggaagacaaatcgttgttgataagaaaacgtaccgaattggtggagtttatgttccaaatccacaagatccattaaaacctgctagagatttatcgatcgatagtttgccgactgtcacatattgcgagaaatgctcgttcgtttctttagacatgattaaggatactaattgcaccgtttgtggaaatgaattgaggagaagcccgttgttacgaccaacaggcttttctccggagaaagggaaggaggtaaaagaaggagatcgtgatcaagagtttacgtacgcaatgccgccgcaattaccaattcctatatcaggggaaaagttagaattgaagccttatctaaattcaaaaagactccagtatgccaatgaaatgaataaacaacttatagtgatgaataaaggtacagaaaatcaagaaggatttgagatatgtacagattgtggagcgatttggctagctggagaaaaagaaaacaaatcagtgcatgaagttccgtatcgattaaaaacacatcttggtcaaaaagaatctctatgtcgtggaaatattaaaaaggtatttattgggaatatattcaattctgatttattgctactgagaatgagctttgacgagcaaattgactttcatccagggaatcaatgggttcatgatggactgaagacgattggagaagcaatggttttagctgcgagtagggtgttggatattgattacaatgaattattatccgggtaccgtattttacctctggaatcaaaagattcgaaacatatgtatcaggccgatgtttatttgtttgatactttatcagggggagcaggctattcgcatgttgcaggtgaagttttgccagatatcattgaaaccgctagagagattttgatgaattgtgaaaataactgtgaaacttcatgctataagtgcttaagacattattctaaccagttttatcatagtcagttaaatcgttttgttgctctcgaattgcttgattatgtagcaaaaggggagttgaaaaaattaacattacaggagcagaaaaaagtattgtcacctattaaacgaatgatggaaatacacaacgaaaaatttgaagaaattcaagtaggtaaccaatacttcattagaatggggtcgaaagggagatatttgattggtgcaaaaaacaatattgaaaagattgtaactaaaactagtgacgactccacagttgtgtacgtttctgcatatgaagttttacatgatttaccgaatgtatatttaaattatgaaagaaagcagcagctgctggtttag

SEQ ID NO: 27176 - DNA, 2037 bp, Aureimonas sp. Leaf427
atgaagggagggatgatggcgaaaaatgacagcgatccttccgacctccggaagttcgctcccttcctggcacccaaagagcgcgaccaactccacggattgctgaacttcgccgggccgacgcccgcggggttcgcggagagcctgcgacagctggcgcgcagctacatcgacgacggcgacagcgcgaaactgcgcgctatatgcctcctcgtcgcagacctgctcgaacagggctggcgcgtgtcgttcgagtccgagggcctgcacttcaagccgcccggcatcgcgaccggcagcggccagtcggtcgaggacgtgaagggccgaatccgcgctgcacttcaggccgcgcggcgccggcaactcgcagaaccttccgtcagggccttcatcgcccggatggagcgccggaccctgcgcgcccccggcgtccggagctcgatcttcgacctaatcgacgatggcgccgccctggccgatgaccttgcggcgatcgcggcgctgcccgaagcggatcgcgacatggcgctggcgaggctcgtcgacccggtcgtcgagatttgccaagcgggcacgcgctgcccggacacaggcctgccgctgaacgacatctggcgctacttccgccacacctgggcccacgagtaccggcccatcccgggccgccagcttctcgtgctggtgaggaacgcggcccggccgaaccgtcccgtcatgggcatcgcgatgctcgccagccccgtgatgagggtgtccgtccgggacaactggatcggctggctccgggaggccgccgaggcgaacctccgcgaagggcgctggcggcccgatcgcctcgcccgcgccatgaccgacaggatagagatctcgatcggcgccgtgcgctgggacgacctcgcgcggccggatgagatcgaggcgcccgtcgacaacaccgtgctgagactcgagcagaaggcggcgggcgccgcgttcgcccgcgacctcgaactccgcgcccactaccaagccaacgtagaagcgggcggccgcgtgaagcccatgcgcggagcggtcaaggtggctggagcaggcacggactggcggacggcttccgaggacgtgctgttcgtccgcaagcgagccgaactgctggcgcagttgctgttcgccaagcaggtgttccgggccgccgacctcgagggcgacccagccgccgcgctcgatcaactgctgtccgcgaagacgggtcagcgcgccatcgacatcgtcctgacggagttccgcaaggccggactttccagccgcgtcgccgacgtcagcatctgcggcgcggtcgcaccctacaacgaacttctcggcgggaagctggtcgccctgctgctggcctccagtgaggtccacgaccattacgcgcggcgctacggaggacaggtgagcgtcatcgcgtcgcagatggcggggcgcgccatctcgaagccggcggacctgcgggtgctgaccacgacgagcctctacggcgtcggctcgagccagtacaaccggctgaccctgcgcgcctccgagcacgagggactcgaactggacatccgatgggattccattgggcgaagcaagacgggcgggttcgggacgctgcacctcggggcggacaccgcccacgccctcaggcagatggcgcaggacctgcacacctccaggcgggtgaacaaccggttcggcgaggggacgagcccccggctccgacagatccgcgagggcctggacgccctgggcatcgcgagcgacagcgtcctgcaccacgccacgccgcgcctgttctacgcgtgcaaactcgggggggacgcgagggcttcgctcctcggcatggcgggggaggaggcgcagccctcgccggcggcggccatcgcccaggcatggcggcggcggtggctcgacggccggagccgacggccggagaccttggacgcaatgagggcgcagggtcccgagagcgtcagccggtcgttgctcgaccagcccaggggggacctcctggccgacctggagggctag

SEQ ID NO: 27177 - DNA, 1077 bp, Aureimonas sp. Leaf427
gtgatcgaggtcgtcgatcaggggtccgtgataggcgccgcctgcgcgtccctcggcgtcgaactcgacgcggaaggcgtgctgggcaccacctatctctccgcggcggtcaggcggcttgccgggttcctgtgtccgtgctcaccgcgcacgctcgtccggcgcatggtcgagagtcacgtcgggctggtggacgacgtgccgatgctcgaggagcgcgtcgaatcttcgatcgaggggctgattgcgatcggcgacctgctcgagttgtccgacgtcgcgcttgagggcgagcatgtgcgcggcacctggctcgtcgcggcgccgcccgcgttcgtcgtcaggccgagcgggagcgcgttcatcctcggcctatccgccgacgagcagacgccgctgccgactgagatgcggtcaaggatcgtgagccgtcagggggtcaggtcgatagaccccgtgcctccagaggatctgtcgactatgctgggcgatctggggctgcgcgagttgtcggccgcgggatggctccggagcccgaaggctacgcgcccggccgacctcgccgcctcctacgatgccaagctcgcggcgcagcagcattcgggcgaggtggccgaactgctggtgctcgacggcacccgacgcacccggagctacagggctcgttggacgaagcccggaaccctgtccgggaactacgtcgtccgtaggccgcaggccttcgggtccgacctctggggctacgcccagatctcgaacggcgttccggtcaaactgctcgacctaccgctgcacggagaccggtggcgtggctgcgatgcggcttggcgggtccagatggcgatcgacgcgatcgcctgccggccgcaggaatacaggttgcgcgccgtcgagggtggcgcgatcttggacctgttctcgccgatcccgaagtgggcccgccgcaggctcgcgatcatcgggagcgaggtccagccggccgggtgcctcatgtcgttcctcgtcccagaggcggagatcgcgacggaggaggagtttctgagggatctgctgttcctttcgcgggtggcgggatga

SEQ ID NO: 27178 - DNA, 5544 bp, Aureimonas sp. Leaf427
atgtcgacgacgatccaggagaccatcgaccgtctccactcctcgctgaaggagtacatcgaggcgacctaccacatcggtgcgccttcgctcatcgaccagcggcggatcctgctggaccgcacgggggtcacgcaccaggaacccttcctggagactacgccccgctaccaggtgggcgcgcgcttcggcgatgtcgacggcctgccgccggccgcccggacgatcttcgagaagctgtccagcgtccgcgccgaccgtccccgcctgctgttcgacccgccctaccggcatcagggagacgccgtccgccacgcgctcatcgacggacgcaaccttgtcatcatgaccgggacgggctcgggcaagaccgagtccttcctcctgcccatcctcggcaagttcgcccgcgaggcgtccgagagcccgtggtccttcgcgcagccggcgatgcgggcgctcctcctctatccgatgaacgcgctcgtgaacgaccagttggggcgtcttcgggcgatcttcggcgatccggacctcgtcgagcggttcacggcgtgggctggccgtccgccccgcttcgcccgctacaccagccggacgccctacgccggggtccgctcgggcaagaaggacgggcgcaagctcgcgtcgttcgaggagttctacgtagacatcgagcgccaggccgccggccccgagtccgacgagcagagacgggcgtccaggctgcggagccagttgcaggagcgcggcaagtggccggcgaagccggacctggaccggtggttcggatcgaaggggtcgcgctggtacgatccgaagaccgcggagttcctgcgcgccaccacacttcccgaggattcggaactcatcacgcgccacgaggtccaggcgtcctgccccgacttgatggtcaccaactactcgatgctcgagtacatgatgatgcggcccatcgagcggccaatcttcgacagcaccagggcgtggctcgccgccaatccggccgagaagttcacggtcgtcctcgatgaggcccatctctaccgaggggctgcgggggccgaggtcggcctcctcctgaggaggctgcgcgaccgcctggacataccggtcgagcggttccaggtgatctgcgcgacggccagcttcgacagcaaggtctacgcggccgagttcggcgcccagctttcgggcgtgcccgccgagactttcgtcgccgtcaccggcgacctcgaccaccgagcgcacgccgcggtcggcagcaaggcggacgcccaggtgctcgccgctctcgaccttggccagttctattcgcccgacgaggcggacagggccggcgccgtcgcaccgttcctcgcgcaccgcggcgtggcgccgacgcacggtgtcgagcgcgacctcttcgaggcactcaaggacttctcgccgctgggtcggctggtcaacaccacgatgggctccgcgcagccggtggccgaactgggcgccgaactcttccccgatacgcccgatctcgccgacgcggcggtgaccgccctgctggcgatcggcagcgtcgcgcgggagcagccggacgcctcggggccgctgccgtgccgggtccacaacttctaccgaggcctgccggggctgtgggtatgcatggacccggaatgcgccgagatcgtcgaggaggagcgcaccggcatatgcggtcgaatgtatagccagccccgcgaagtctgcggctgcgggtcgcgggtcctcgaattcttcacgtgccgcagttgcggctccggctacgcgcgtgcgtactccgacgacctcgatgcgccggacgcgctctggtcggagccgggacggaggttgcgcatgtccggcggcgagaccctgccgctgctggacctcgacctgctgctggagaagccgaagcgtccggacgccggcgagttggcggagtacgacctcgacaccgggcggctctctgccgggcagcgcacgcggaccgtctacatacggaaggaccggatcacgccgcccgtcggcgacgacggcgaggtcgacaccaattcggagcggcggggccagttcgtgccgtgcggcgtgtgcggccagacggcacgcggccggactactgtgcaggaccaccagacgaagggcgaccagccgttccaggcgctcgtgtcgaggcagttggcagtccagcctccggggaagcaggcggccacccgcttcgcgcccctgcgcgggcgcaaggtcctcgtcttctccgactcccgtcaggtcgccgcccggctcgcgccgaacctccagatgtactccgtccgcgacgcgctgcgctcgctcatcatctggggacacggtgtgctgtcgaagccgcagatggtccagcagatgctgagcctcgaggaactctacctcgccgtcctgctcgcctcgcaggggctgggcgtccgcctgaggccggagcgcaagtcgggcgagaacttctccgccgccgaggagatggtcgccaagggcctcgccgagaacgcgctctcggacgaggcccgcctgacgatgctgtggatggaggtgcgcggcgagacgccgccggcggccctcctcgacgacatcgtgaagactgtccaggacaagtacctcggcctggaggcgctcgcgctggcgtcgctgcgcgagcgggcgaacaagactaaggaactgcacgcgcttccttccatccccggcatcgccgagaacgacgaggacaaggtcgccctggcgcgggcttggctgcggtgctggcgctcggtgggcttctggctgaacacgatgccgacgacctggtacaagcgccccgccggcaagggcaccaccgtcaattcccgaaagggcatgtttaaggcgatggacgtggtgctgaaggacgcggccgcgcgcaaggcgttcaaggcctggacgccgctgctgctcaacatcttcacgacggacatggacggcggcttccgcaggctcgcgggccagaacctctcgctcgaactcgagggcgactggcggcgatgcgcagattgcaagtcggtccataggccggtgcggaccatagcccactgcctcgactgcggtagcgaccaggtcgtggcgctccatcccgaggaggacaccgtgttcaccgcccgcaagggctactaccggtcgccggtgcttggggcactgtcggacccgcccgaggttccgatggcgctcatcgccgcggagcacaccgcacagctcaacgcgccgcagagcgacgacgtgttctcgatggcggaggtcaacgaactcttgttccaggacgtcgatctcgactggggcgcgacggccggcaactcgaccgccatcgacgtgctctccagcaccacgacgatggaggtaggcatcgacatcggcgccctgtccggcgtcgcgctgcgcaacatgccgcctggcagggccaactaccagcagcgcgcgggccgcgccgggcgccggggcaacgcggtggccaccgtcgtcgcgttcgggagcgccgacagccacgacgagcactacttcagcgagccgagggagatgatctcgggcaaggtgatcgatcccaagcttacgctggacaaccccgacatcgttaagcgccacatccgcgcctacctgctgcagtcataccaccaagtgcggctgccgacgttcgatcccatggccaatcccgacctgttctcggtcctgggctcggtgcaggacttcaagactgcgggtgcccagttgaacgcggccgacttcaggcagtggctcatagacaacgaggccgcgctcaaggcccgggtgtccggatggattccgcacgaggtagccggcgaggtcaggcaggctctcctcgacgggatggtcgtggactgcgtgaccgcggttgagacggcgatcgccaacgattccgtcgccggggcgaaggtggagaaggacgatgagtccgacggcgcggacgccggcgccgaggtccaggaggaagttggcgaggaggcgccgcctcagaaggccgtgaccggaacgctgctcgaccggctcctctacaagggcgtccttccgcgatacgccttcccgacggacgtcgcgacgttcagcgtcttcgatctggagcgctccacccagtacaagccggtaatgcgcttcgcgccctcgcaggggctgcccgtggcgttgtcgcaatacgcccccggcaagcaggtgtggatatccggcaagtgctacacgtccggggcgatctactccccaatgtcggaggaccgctacgacgcatggcggaaccgccggctctaccgggaatgcagcgagtgcggtttcgccgagaccgtgaagatcgacgaggggctcgagcgcgacgcggtcacggactgccatgcttgcgggtccgaggagacgttcggccccacgcggtactggctgcggcccccgggcttcgcccaccgcgtggaccaagaggaggtgacctcgcccgacgacatgccggaaaccagctacgcaacccgcgcgaagctcgtgatgcctacgcccgcggacgacgagaagtggacgctcgtgaacgaccgcatccgtgtgatgccgaaccgcgagcacctgctcgtgtccaacaccggcccgaagcacgagggctacaactactgcaccctgtgcggccgcatcgagtcatcggctgagggcacggcgtcgatgttctcgccgcaccccaagccgtttcccgacaaggagcccacctgtcccggcacggggaccacgaggcacctcgtgctcgggaccgacttcatcacggacatcgccctcttctccctgcgggtggaggcgccgctcaagctgaagccgggccgctacccgacggacgttgcgctccggaccgtgagcgaggcgatggcgaaggccgcgtgcagcctgctggaggtcgagcctggcgagatgatggcggaataccgtccggcactgacgccggcggggatggctggcctcgaggcggagatcttcctttacgacacgctgccgggaggtgccggcttcgcgcggcaactcgccgaccgcagcctcgagttgttccagcgcgccctcaaggtcatgaagacctgcgaggaggactgcgattcgtcctgctaccgctgtctgcgcagcttcaagaacaagttcgagcacggccagttggaccgtcacgtcggcgccgaactcgtcgagttcctcctgaccgaccagatgcagccgttcagcccccagcgggtcgcggcgtcaaccaaggttctcctcttggacctgcagcggaacacgggcaacggcatgacctattcgggcgaagcctcggtcatggtgtccggcatgggtgatgtcccggtgccgatcctcgccactcggtcagacggcgcggtgagcgtgatcgcgatcgcgggtccgttgaccgccgaccacccggcggacccgctcatcgccgaactgcgcgagaggtgggacggcggcgcggtgatcccggtcaacgagcttcttgtcaggggcaacctgcctgcggccacgcgggctgtcgaggaggaggtactccgttga

SEQ ID NO: 27179 - DNA, 2037 bp, Aureimonas sp. Leaf460; identical to SEQ ID NO: 27176

SEQ ID NO: 27180 - DNA, 1077 bp, Aureimonas sp. Leaf460; identical to SEQ ID NO: 27177

SEQ ID NO: 27181 - DNA, 5544 bp, Aureimonas sp. Leaf460; identical to SEQ ID NO: 27178

SEQ ID NO: 27182 - DNA, 1509 bp, Bacillus cereus
atgaaaaaagcgtttgatagagttggtaatcttgttcatgcgaaagatgctcataagggcattaatggatatacatgcccttgttgtagggaagaagtaacgaaggcagagggagtaagacaatcggctcattttcgtcatagggggcgtcagaagagagaatattgcgatttatatgtacaaggtttagggaattttgatagttttaatgactatgcaactaaaatgcgcatcccatatataacatttgaagagaatgagggtgattgggatttttatgctaggtttcctaaaataagaagaggacttacaagtatgtttgaggatttccaactatattttaatgtgacgtgtcttgaaatgggttctcgaatttcagctataaagcttaggcatgattctgaagataataaaatgaaaatttcaccaagggattcgtaccattttaatatagatgataaggaagccgcgaaaaaattagaattgcattggcccataaaaatcattggttttacaagggggatatatatattccgttttattcatggtgaatttattcgggtagagcaagaatttttaacgttaagcgatgtgttctatgttgtggcaaaacgaaaaattatatttcctgagaagataatggtgcaaaagttaaaacctaaaaatggatggtttgcttatagaatacagttacctaaggtgatggatgataaattaattggatctttttatagagaaacagggcatagattgcaaaatccattttattatttagatttattaacaccgtctacgtatggaaggaaggactatgcgtatatgatttattctagtatgtgtagtatggctattacctttcagacatttcgaaagaatgagtttacagtggttcatataagtcctgatatgacatcaaaacaatacgagaaatgtaaagaaatggtagatatttcaaatttagagcaaggatttcacacgttttacataaaaaatcatgaggggaaaattttgaatttatacgtagatagaaaagctaaccagcatagcgttattgaatatgaagccccctttataattaatggagagaatataaccgtttttaaggataaaaaaatgaatatacaggggagattgaatataccggctgattaccctcttcctttattgaaaaaagaaattgataaatttccttatgttttaagccgaagtgtaagtgaacataatgtgagtgaaggtgaaaggttatatacaccaggtgtatggagtgttgaatttgtaggaaatgggatagatgacaatttagaaataaattggtcagatttaatactagcatatttaaaaatagaaagtagaagaacatttattattacaaataaaaaatatcaaggtcttcttaatttagttgatacgatagtagacgagagtaagaaaaagaaattgaaattttttctgaatatgtatcgtaatagggttcctaaagatgttaaagatttactagatcacatttaa

SEQ ID NO: 27183 - DNA, 1989 bp, Bacillus cereus
ttgaaagttatctttggtgctatagattggataaatgagaggaagcaaacgtttataaaagtactagcaaaagtacagaataatcacttgtgtagattagaagatagtatcgaggaatttccaaacacggggaaagtgttttattacaaagtaccatcagatgcttataaagggaaattaggtttttatacggtagttgaaagtaatacctatgatattaatataccagtctcttctaagtatgtagtttcacaagaagcttctaatattggatatgttgaaattgttaaggtggattattctgttgaaaggcatgaactagagcttgtgtctctcattaagaatgggatagtgaaaactcatgaattcacttctaaaatagtacttttaactgcagatgggtatttgataggcccttattcaccaaagcttaacaaagaaaatcaatggattgccgaacttaatgataacgggttgttggatgtaagaaagaataatgttgatatcattgaatattatgatgttaattttggagttgaaagatattttatttctacagcttttataaatacaaaagtggatcattatttagattgttcaaataatgataggatagtacgagatgctttaaaaatattgaaagatgagaaagagacccatgagattactaggaaaataacaaagatgctagttgatttagttagtgaaattcctgaagaagtaagaaaaggtcgtatttctcgagctgttaatttattgcaaaatcatttgatttcaccagaagagatggaactatttgaaaaagaattattgcaatatggaccggttataaaaaaaattaatgaagaggtagataaggatttagtagtagcccgaaaaaaaatagaaagtgattataaaaaagttattaacgaaacaaaaaaattaaagcttgaaaacgaaaatttaaaagtagaattaaagaatatgacagataaaaaaaatcgaatagatgaccatataaaaaaggctgaagaggcgttgcaattaaagttacgagagatgcaacaaaatgtgtatcaaacaatgttgaatctattgcctttaccaatgaccttgtccacaggcaatgaagcagagtctagtgttactaatgtaagaagttcacaatggtttgttagagagcaagaaaaagaaattatgataggtgggatagaaatactaattcgtaatattattacgaacttagaacgaattcatgtggagaaggaaagggcagagcttatagcattaactactatcggggccattttatttagaaatccaatcattatagaaggtgcaaatagttttgatatagcacaaattctaggatggacaattgcaggtaacgatcatattactatttttcctgatataaaggagtattcaaatgaggtattaacatcttattttactcaatataatcgaatagataagattaagtcactacatttatcaaatatcgagagttcatctgctgagttgtacattccttcgtttattgattactggagtgtgtcaacaaatggtagatatcctgaattattaatagttagtatgaaagatataacggaagtaagtaatgattttataggaaagttaaactatgctccggttattaatacagattctataggaataaaaggcgaattgcgcaaggcacgcttattgggagaaattaagtttggctttatttcgatagaggattttgtagagaatgagctattagttggaaaatcaaaagcgtttcgtgaatttaaagatgtagtagaagaaataggtatgcaacctaaaatgattgtacatacatttaaacagtggttttgtttatttgagaaggtagagtatgatgaggaaatgatcataaattgggttttacaagtgtttttacagaagtatattgatatagagcagttcaattttattgcagaggaactagatgtggaagtaagtgtatctttaccatag

SEQ ID NO: 27184 - DNA, 951 bp, Bacillus cereus
atggagttattagaattaaagcaaaaagttgatatcttaaacactcttaataatcatgtgaaatctcaaattatattttacgcgttagagaatggggcaatacagaaggttcatttctcgaagctatatcctcttgttcaacggatgcttggaatggcaatgtttcaagagattatatatttatttgataaagaggaaaatatgacaattgcaaagcaagttttaaatatgctaagtagtttaggcgagattgcgaagcttcctaatggttactatttacccttgccagaacgagtggtagagttgccggtctcaaagagtcgaattttattaagctcaacacaaggtcaggaaaaaagaacgaattatatagggtttggaagcggatacagttcagatgcggttgacttgccgaagttaatgttagaggaatggatgccttctgttggaataaaagagttttttcgaatattaaatcaatctcagatgtgtaatttatatgataaaccagatcaaatatttataggtcgaaaaaaaagagaatggatgagttatgagaagggaataaatcactgtaatagtgctgctatagttaaatactatatagctcaagggccagcaagttattattggctgaaaaaaattaggaatcggatgagttattataagattcctaatgagtatgttaacgtagctaaattcgctttagaaaaacaagctggaattagtaggaaagtggaatgttttgagataaatgatacattctttaaagcgaaatttttccatcgtcttcctgaagatgagcggaatatgcttatgttatttggatttccagaaaatgtgtatgacccgttctgctggattatacctactgtacactatgacgactttgtttacgttattaatagattaggaatgaaagtcgattctctatctatcactagtaggtaa

SEQ ID NO: 27185 - DNA, 5328 bp, Bacillus cereus
ttgactgattatacgatcaaatcgatatcaaaacgattgcaccaaaagcttcaagaatatattgaggcccaatacccaataagtgaaacgtctttattacttgagcgtaggaggttattagaatcccaaggtgttatttcaaaagagccatatatagaagctacaccggtatacgaaccaggtgagatatatacggatattaaaatgcctaagcattgtcaagaaatgatgatgtccctttctaaaatgattcctgatgtaggcgtattcccgcgaccttatgttcatcaaaaggaagctttagaatcttttcttgaggagcaaaaagatttagttattgcaacagggactggatctggtaaaacagaatcctttttacatcctattttaaattcgttattggatgagggatataaaagacctgaacaatataaaagaaatgctgtaagagcattaattttatatccaatgaacgctttagtgagtgatcaaattacgaggctacgaaaattatttggagataaaagggtttctaattattttgaagagaaatgtggaagacatcctttatttggaatgtatacatcgcgtactccatatccgggagagcgtacagaaaagaaagataaatatcaacttgctgaaattattaaatactacaatgaaattgaagagaatgatccaaatttaggagaggaaatgaagaagaggggaaagtggatagcaaaagatttaaagaaatttagtcgtggtaagcgtggtgaatgggaatcaaaatatgtaacggtttctggtgatcgagagctttttacaagacatgaaatgcagcaaacacctccagatattttagttacgaattactcgatgttagagtatatgttaatgcgccctattgaacgttctatatgggaagaaacaaaagaatggttagcacaagataaagaaaataaatttattctagtattagacgaagctcatatgtaccgtgggacaagtggtgctgaagtagccctactaattaggcgtctgcaagctaggttgggaattgatcgagatcgcttacaatgtattttaacgagtgcaagtttaggtagtgacaaggatgataatgcagcaactgagtttgcaaagcagttgacaggaaaagcagaaacaagggaatttaagcttattaaaggtacaagagagaagcggaaagcgggacgtataggtacaacggaagaagcaaacatatttgccaatataaatagtgatctatttacaaaaagaatttaccaatatcgagggttgaaaaaacatttggatgaattattaatgcaattagactggaaagaaacgccttatgatattgaagatttatcatcatatttgtacaaacagttggatggttttggtccgttagaaactgttatagcttccataagtggaaacgctaagaagtttacagaaatcgcagaaagcatatttccaaaagtagagagagaagttgctgagaaagctactagtaatttactgatgttagcaaatgcagcaaaagaaaaaggaagagttttattaccagttcggattcacttgttcttcaaaggagtctcggggatttatgtttgtacaaatgcaagctgtaatgtgaaaaggaaaaataatgagcagtctttactagggaaaatgtatgattcgtcaaaattaaaatgtagttgtgatgaaggggcaagggtgtatgaattattgacacatcgaaagtgtggatcctctttcattcgcgggtatgtagcaaaaaacaaccaaaactatttatgggcagagaagggttttggaattgttggggatgaattgacagaaatacatttgttagtagaaaagcctcattcaaaagtttgggatagttctaatccacctaatcgtgtttggttagatattaagactggcttcttagcatacaatcaaccgagtgaagaggaagagtatttacagctatatattccgaatcagaaaagtcaagggaagaagaaaaataaaaaacaatctgtaattactttcgatcaatgtccttgttgtatgaggaaaataaatggtacacttcaagatttaaaaacaaaaggggagcaaccatttgccaatatagttcgcgagcaatttatgttacaacaacctattaaaaaagatagtagtttgccaaacgagggacgtaaagttttgctattttcagacggtcgtcaaaaagcagcaaggcttgctcgtgatataccatatgaagtagaactagattctttcagacaagtaatactattagcggcacaaaagttaattaatgagggcgaagaagcgaaattaagtggctcgttatatactgctgttttggacgtgatagataaacacaaggtacatttttttgaagatgaagatagaaaatctattatgaagaatgtgcaagtatttaaagaaaattttgatgatgactatgatgagttaatagatgatggtgatgtggaagtattaaagagatttaaaacggaactgttacgtcaaatttgccatccgttatattcaatatacgctactgctacaggatttattgagccgatggacaaagaaaaaaagaagatgaaaaaagcattaaagggaattttgagtgaagatgatatttatacaattgtagcagtgtttattcaagaattattagatagtgtagcaattgatacaactattgaatctcatgaacgtattaaggtgaagggatttaaccaagggacttggggagtagatagaggttatagatcgagaaagctaaataaagttattgatatgtatattgaaaaagaagaggaaaaggagcaagttgttgaaacactttataaattatgtgtagaacatgaagcgaaatgttatttaactccgaaaaaattgaaactagtacctggaattgaagtggattggtataagtgcaatcgttgtaaggaattgaatatggttgtagcaaaagggaaatgtataaattgtttatctgatgaaattgaaatactaagccctgagagcacaattttagattcagaaaaaggattttggcgctctcctattaatggggttataaataaaaatgagaaaatttctaatttgacagtggaagaacataccgcacagctatctcaaaaggatccgaaagtcgcacttgcaacaaccgaagagtatgaactgcgttttcaagacattattttggatgatttagacggagcagtagacgtactaagctgtacaacgactatggaagttggagttgatattggttcattaacagctgttggattgagaaatgtaccaccgcaaagggaaaattatcagcagcgagcaggacgagcgggacgccgtggttcagcattatcgacagtactcacatattcgcaaggtggacctcatgatcattattattttaaacaaccggatatgataattagtggggcgagtagaaaaccgattatatatattgataatgaaaaaattgctaaacgtcatctaaatgcgttctttattcaaacttattttcatgagtatgttttaaaagatggtagaacagatggtgttttaaatagttctctaggagatacaaaagcattttttgaaagctcatcagtcccaagtatggatggatttgatgagtggttaaagtttgtaactagcgatttacctatttattctcctgtgatttttaatattatcccagatgaggttatttcaaagatggaaggctcagaaacagctgctataacattaaaaattaaaataataaaggaagctgcctctcaattaattaatgatttacgagaaaattatgagggaattaaacataccttaatagatatagaagatgaggatactgagcataattctaataataagtttttagatttcttatttaatcatggtatgttacctacatatgcttttccaaaagatttgagtagtctttatattgaagaatgggatcatatttcaaaaaaggtaatcacaaaacaaagaccacaactggaaataaatagagccttgagtgaatacgctccaggaaaacaagttgttgtagacaaaaaaacatataggataggcggtatttttgtcccaacccctagaaatcgattaaaaccagcaagagatttgaaaatagaaggattgaagaaggtcacatattgtgattcttgtttatttgtatcattagatgaatttgataataatcaatgtcctgtgtgctgcagtaagctgaaaaaagactcatttctaaggccaactggtttttctccagaaaagggtagagaagtaagggaaggtgatagagaacaagagtttacatatgcgatgccgcctcaattaccaataccagtgagtgaagaaagtctaaatttacatacttttgaagattcctctttactaaaatataccaatgctttagataaaaagcttattgtcatgaataaaggtatagatgggaagtcgggatttgaaatatgcgtagattgtggtgctatctgggtagcaggagaaaaagaacgtaagtcttttcatgatgtcccttatcgtttgaaaaaagagtttggtcaaaaagattcgcaatgtagcggagaaacacgaaaagtatttcttgggaatgtatttcattcagatttattattactacgattacaatttggtagtgaaatagattttaattctgaaaaacaatgggtacatgacgggttaaaaacaataggggaagctttagtgttggcagcaagtagagtcctggatattgactataatgagctatcagcagggtatcgtttattgccattatccataggtggagcggatatatatttatttgatacactttcaggtggcgctggatacgctcatattgcagggactgtattaaaagaaataataaaagaagctcgctatattctagctgattgtgaaaataattgtgaaaaatcatgttataaatgtttgcgtcattatgcgaatcaattttatcataatcaattaaatcgtttcgttgcattagaactacttgattatgtagtaagcgggactttgaaacaattatcattagaagaacaaaaagaaattttagcacctgttaaaagaatgatggaaattcataatgaagtatacgaagaaattgaacaagacggtaagtactttataaagaaagtcgatggaaatcttatcggtgccaaaaataatatagagtgtagaatagagaatcaaataccaaccagatatgtttcagcctatgaggtattatatgatctgccgaatgtgtacttaggcagtgaagatggaagtaaagtgacgagttaa

SEQ ID NO: 27186 - DNA, 1509 bp, Bacillus cereus HuB5-5
atgaaaaaagcatttgatagagttggtaatcttgttcatgctaaagatgctcataagggtattaatggatatacatgtccttgttgtagggaagaagtaacgaaggcagagggagtgagacaatcggctcattttcgccataggggtcgtcaaaagagagaatattgcgatttatatgtacaaggtttagggaattttgatagttttaatgactatgcaactaagatgcgcatcccatatataacatttgaagagaatgagaatgattgggatttttatgttaggtttcctaaaataagaagaggacttacaagtatgtttgaagattttcagctatattttaatgtttcatgtcttgaaatggggtctcaaatttcagctataaagcttaggcatgattctgacaataataaaatgaaaatttcaccaaaggattcgtatcattttgatatagatgataaggaagccgcaaagaaattagaattgcattggccaataaaaattattggttttacaaaagggatatatatatttcgttttattcatggtgaatttgttcgggtagagcaagaatctgtaacgataagtgatgtgttttatgttgtggcaaaacgaacaatcatatttcctgagaagataatggtacaagagttgaagtctaaaaatggatggcttgcctataggatacagttacctgaggtgatggatgatagattaatcagctcattttatagagaaacagggtatagattacagaatccattttattatttagatttattaacaccgtctacgtatggaaggaaggactatgcgtatatgatttattctagtatgtgtagtatggctattacctttcagacatttcgaaagaatgattttacagtggtccatataagtcctgatatgacatcaaaacaatatggaaaatgtaaagaaatagtagatgttccaaatttggagcaaggatttcacacgttttatataaaaaatcatgaggggaaaatgttggatttatatgtagatagaaaagctaaacagcatgaagttattgaatatgaagccccttttataattaatagtggaaaggtaagtatttttgaggacaaaaaaatgaatatacagggcagggtgaatattcagagtgattatcctcttcctttttataaaaaagaaattgataaatttccttatattttaagccaaagtataagtgatcataatgtgagtgaaggtgacaggttatatacaccaggtgtatggagtgttgagtttgtaggaaatgaaataaatgacaacttagaaataaattggtcagatttaatactagcatatttgaaaatagaaagtacaaaaacatttattattacaaataaaaaatatcaaggttttcttaaattagttgagacgatagtggatgagagtaagaaaaagaaattgaaattttttctgactatgtatcgtaatagagttcctaaagtggttaaagatttattagatcacatttaa

SEQ ID NO: 27187 - DNA, 1989 bp, Bacillus cereus HuB5-5
ttgaaaattatttttggtgctatagattggataaatgagaggaatcaaacgtttataaaagtgctagcaaaagtacagaataaccacttgtgtagattagaagatagtatcgaggaatttccaaacacagggaaagtgttttattacaaagtaccatcagatgcttacaaagggaaattaggtttttatacggtagttgaaagtaatagctatgatattaacataccaatctcttctaagtatgtggtttcacaagaagcttctaatattggatatgttgaaattgttaaagtggattattctgttgaaatgcatgagctagagcttgtgtctctcattaagaatgggatagtgaaaactcatgaattcacttctaaaatagtacttttaactgcagatggttatttgataggcccatattcaccaaagcttaataaagaaaatcaatggattgccgaacttaatgataacgggttgttggacgtaagaaagaataatgttgatatcattgaatattatgatgttaattttggcgttgaaagatattttatttctacagcttttataaatacaaaagtggatcgttatttagattgttcaaataatgataggatagtacgagatgctttgaaaatattgaaagatgagaaagagacacatgagattactcggaaaataacaaagatgctagttgatttagttagtgaaattcctgaagaagtaagaaaaggtcgtatttcccgatctgttaatttattacaaaatcatttgatttcacaagaagagatggagctttttgaaaaagaattattgcaatatggaccagttataaaaaaaattaatgaagagatagacaaggatttattagtagcccgaaaaaaactagaaagtgatcataaaaaagttattaacgaaacaaaaaaattaaagcttgaaaaagaaaatttaaaagtagaattaaagaatatgacagataaaaaaaatcgaatagatgacgatataaaaaaggctggagaggcgttgcaattaaagttaagagagatgcaacaaaatgtgtatcaaacaatgttgaatctattgcctttaccagtggccttgtccacaggcaataaagcagagtctggtgttactaatgtaagaagttcacaatggcttgttagagagcaagaaaaagaaataatgatagataggatagaaatactaattcgtaatattattacgaatttagaacgaattcatgttgaaaaggaaagggcagagcttatagcattaactactatcggggccattttatttagaaatccaatcattatagaaggtgaaaatagttttgatatagcacaaattctagggtggacaattgcaggtaacgatcatattactgtttttcctgatataaaggagtattcaaatgaggtattaacatcttattttacccaatataatcgaatagataagattaaatcattacatttatcaaatatcgagagttcatctgctgagctgtacattccttcgtttattgattactggagtgtgtcaacaaattgtagatatcctgaattattaatagttagtatgaaagatataacggaagtaagtaatgattttataggaaagttaaaatatgctccggttattaatacagattctataggaataaaaggcgaattgcgcaaggcacgcttattgggagaaattaagtttggctttatttcaatagaggattttgtagagaatgagctattagttggaaaatcaaaagcgtttcgtgaatttaaagatgtggtagaagaaataggtatgcaacctaaaatgattgtacatacatttaaacagtggttttgtttatttgagaaggtagattgtgatgaggaaatgatcataaattgggttttacaagtgtttttacagaagtatattgatatagagcagtttaattttattgcagaggaattagatgtggaagtgagtgtatctttacaatag

SEQ ID NO: 27188 - DNA, 951 bp, Bacillus cereus HuB5-5
atggagttattagaatcaaagcaaaaatttgatattttaaacactcttaataatcatgttaaatctcaaattatattttacgcgttagagaatggggcaatacagaaggttcatttctcaaggttatatccttttgttcaacggatgcttggaatggcaatgtttcaagagattatatatttatttgataaagagaaaaatatgacaattgcaaagcaagttctaaacatgctaagtagtttaggtgaggttgcaaaactgcctaatggttactatttacctttgccagagcgagtggtagagttgccggtctcaaagagacaagttttattaagttcaacacaaggtcgggaaaaaaatactaattatataggagttggaagcggatacggttcagatgaggttgacttgccaaagctaatgttagaggaatggatgccttctgttggaataaaagagttttgtcagatactaaatcaatctcaagtgtgtaatttatatgataaaccagatcaaatatttataggtcgaaaaaaaagggaatggatgagttatgagaatggaataactcaatgtaatggtgcggctatagttaaatgccatatagctcaaggtccagcaagttattattggctgaaaaaaattaggaatcggataagttattataagattcctaatgagtatgttggcatagctaaatttgctttagaaaaacaagctggaattagtaggacagcggaatgttttgagatagatgctacattctttaaggtgaaattcttccagcgtattcctgaaaacgagcggaatatgcttatgttatttgggtttccagagaatgtgtatgatccattttcctggattatacctactgtacactatggcgactttgtttacgttattaatagattaggaatgaaagttgattctctatctatcactagtaggtaa

SEQ ID NO: 27189 - DNA, 5334 bp, Bacillus cereus HuB5-5
ttgactgattatacgatcaaatcgatatcaaaacgattgcaccaaaagcttcaagaatatattgaggcccaatacccaataagtgaaacgtctttattacttgagcgtaggaggttattagaatcccaaggtgttatttcaaaagagccatatatagaagctacaccggtatacgaaccaggtgagatatatacggatattaaaatgcctaagcattgtcaagaaatgatgatgtccctttctaaaatgattcctgatgtaggcgtattcccgcgaccttatgttcatcaaaaggaagctttagaaggttttcttgaggagaaaaaagatttagttattgcaacagggactggatctggtaaaaccgaatcctttttacatcctattttaaattcattattggatgagggatataaaagacctgaacaatataaaagaaatgctgtaagagcattaattttatatccaatgaacgctttagtgagtgatcaaattacgaggctacgaaaattgtttggagataaaagggtttctaattattttgaagagaaatgtggaagacatcctttatttggaatgtatacatcgcgtactccatatccgggagagcgtacagaaaagaaagataaatatcaacttgctgaaattattaaatactacaatgaaattgaagagaatgatccaaatttaggagaggaaatgaagaagaggggaaagtggatagcaaaagatttaaagaaatttagtcgtggtaagcgtggtgaatgggaatcaaaatatgtaacggttcctggtgatcgagagctttttacaagacatgaaatgcagcaaacacctccagatattttagttacgaattactcgatgttagagtatatgttaatgcgtcctattgaacgttctatatgggaagaaacaaaagaatggttagcacaagataaagaaaataaatttattttagtattagacgaagcccatatgtaccgtgggacaagtggtgctgaagtagccctactaattaggcgtctgcaagctaggttgggaattgaccgagatcgcttacactgtattttaacgagtgcaagtttaggtagtgacaaggatgataatgcagcaaccgagtttgcaaagcagttgacaggaaaagcagaaacaagggaatttaagcttattaaaggtacaagagagaagcggaaagcgggatgtataggtacaacggaagaagcaaacatatttgccaatataaatagtgatctatttacaaaaagaatttaccaatatcgagagttaaaaaaacatttggatgaattattaatgcaattagattgggaagaaacaccttatgatattgaagatttatcttcatatttgtacaaacagttagatggttttggtccgttagaaactgttatagcttctataagtggaaacgctaagaagtttacagaaatcgcagaaagcatatttccaaaagtagagagagaagttgctgagaaagctactagtaatttacttatgttagcaaatgcagcaaaaaaaaaaggaagagttttattaccagttcggattcacttgttcttcaaaggggtctcggggatttatgtttgtacaaatgcaagctgtaatgtgaaaaggaaaaatgatgagcagtctttactagggaaaatgtatgattcgtcaaaattaaaatgtagttgtgatgaaggggcaagggtgtatgaattattgacacatcgaaagtgtggatcctctttcattcgggggtatgtagcgaaaaacaaccaaaactatttatgggcagagaagggttttggaattgttggggatgaattgacagaaatacatttgttagtagaaaagcctcattcaaaagtttgggatagttctaatccacctaatcgtgtttggttggatattaagactggcttcttagcatacaatcaaccgagtgaagaggaagagtatttacagctatatattcctaataagaaaagtcaaggaaagaagaaaaataaaaaacaagctgtaattactttcgatcaatgtccttgttgtatgaggaaaattaatggtacacttcaagatctaaaaacaaaaggggagcaaccatttgctaatatagttcgcgagcaatttatgttacaacaacctattaaaaaagatagtcgtttgccaaacgaggggcgtaaagtcttgctattttcagatggtcgtcaaaaagcagctaggcttgctcgtgatataccatatgaagtagaactagattctttcaggcaagtaatactattagcggcacaaaagctaattagtggggatgaagaagcgaaattaagtggctcgttatatactgctgttttggacgtgatagataaacacaaggtacatttttttgaagatgaagatagaaaatctattatgaagaatgtacaagtatttaaagaaaattttgatgatgactatgacgagttaattgatgatggtgatgtggaagtattaaatagatttaaaaccgaactattacgtcaaatttgtcatccattatattcaatatacgctactgcaacaggatttattgagccgatggaaaaagaaaaaaggaagatgaaaaaagcattaaaagaaattttgagtgaaagtaatatttatacaattacagcagtgtttattcaagaattattagatagtgtagcaattgatacaactattgaatctcatgaacgtattaaagtgaagggatttaaccaagggacttggggagtagatagaggttatagatcgagaaagctaaataaagttattgatatgtatattgaaaaagaagaggaaaaggagcaagttgttgaaacactttataaattatgtgtagaacatgaagcgaaatgttatttaactcctaaaaaattgaaaatagtacccggaattgaagtggattggtataagtgcaatcgttgtaaggaattgaatatggttgtagcaaaagggaaatgtataaattgtttatctgatgaaattgaaatactaagtcctgagagcacaattttagattcagaaaaaggattttggcgctctcctattaatggggttataaataaaaatgagaaaatttctaatttaacagttgaagaacataccgcacagttatctcaaaaggatccgaaggttgcacttgcaacaactgaagagtatgaactgcgttttcaagatattattttgaacgatttagacggagcggtagacgtattaagctgtacaacgactatggaagttggggttgatattggttcattaacagctgttggattgagaaatgtaccaccgcaaagggaaaattatcaacagcgagcaggaagagcgggacgccgtggttcagcattatcgacagtactcacatattctcaaggtggtcctcatgatcattattattttaaacaaccggatatgataattagtggtgcgagtaggaaaccgattatatatattgataatgaaaaaattgctaaacgtcatctaaatgcgttctttattcaaacttattttcatgagcatgttttaaaagatggtagaacagatggtgttttaaatagttctttaggagatacaaaagcattttttgaaagctcatcagtcccaagtatggatggatttgatgagtggttaaagtttgtaactagcgatttacctatttattctcctgtgatttttaatattatcccagatgaggttatttcaaagatggaaggctcagaaacagctgctataacattaaaaattaaaataataaaggaagctgcctctcaattaattaatgatttacgagaaaattatgagggaattaaacataccttaatagatatagaagatgaggatactgagcataattctaataataagtttttagatttcttatttaatcatggtatgttacctacatatgcttttccaaaagatttgagtagtctttatattgaagaatgggatcatatttcaaaaaagataatcacaaaacagaggccacaactggaaataaatagagccttgagtgaatacgctccaggaaaacaagttgttgtagacaaaaaaacatataggataggtggtgtttttgtcccaacccctagaaatcgattaaaaccagcaagagatttgaaaatagaaggattgaagaaggtcacatattgtgattcttgtttatttgtatcattagatgaatttgataataatcaatgtcctgtgtgctgcagtaagctgaaaaaagactcatttctaagaccaactggtttttctccagaaaagggtagagaagtaagagaaggtgatagagaacaagagtttacatatgcgatgccacctcaattaccaataccagtgagtgaagaaggtttaaatctaaatacttttgaagattcctccttactaaaatatacaaatgctttagataagaagcttattgtcatgaataaaggtatagatgggaagtcgggatttgaaatatgcgtagactgtggtgctatttgggtagcaggagaaaaagagcgtaaaccttttcatgatgtcccttatcgtttgaaaaaagagtttggtcaaaaagagtcgcaatgtagaggagaaacacgaaaagtatttcttgggaatgtatttcattcggatttattattactacggttacaatttggtagtgatatagattttaattctgaaaaacaatgggtacatgacgggttaaaaacaataggagaagctttagtgttggcagcaagtagagttctagatattgactataatgagctatcagcagggtatcgtttgttgccattatctataggtggagcggacatatatttatttgatacactttcaggcggcgctggatacgctcatattgcagggacggtattaaaagaaataataaaagaagctcgctatattttagctgattgtgaaaataattgtgaaaaatcatgttataaatgtttgcgtcattatgcgaatcaattttatcataatcaattaaatcgtttcgttgcattggaactacttgattatgtagtaagcgggactttaaaacaattatcattagaagaacaaaaagaaattttagcacctgttaaaagaatgatggagattcacaatgaagtatacgaagaaattgaacaagacggtaagtactttataaagaaagctaatggacatcttataggtgccaaaaataatatagagtgtaaaatagagaagcagaataaaataccaaccagatatgtttcagcctatgaggtattatatgatctaccgaatgtgtacttaggcagtgaagatggaagtaaagtgacgagttaa

SEQ ID NO: 27190 - DNA, 1446 bp, Bacillus sp. LF1
atgtttgtagcattagataaagattatcatttagtagatgtgaagcaagggatagagaaatctattttttattgcccctgctgtttagaacctgtgcattttgttcgttcacagaagaaagtatggtattttaggcataacaagttgataggggagaaaaaacgacaagaatgtgagttattcagtagtaatctttctttctcatatgaaattgatttagaggaagagtgcaatcgaaagatacgactacaactacatagaggtgataaaacacatttttctttacttttcccaaaacttacgaaggggcaaacgttacgtcaagaggataataagagttattttcatgtgactatagaagagacaaagcaacaaattagctctgtgaatttaatgcataattgtgaaacaaattttttaccagtttcgttatgtgattcatatacaatttcgatttctgaagaagtgatagataatgctattacagaaatatatcaagggggttactatcctcttcaaaagcctgctctttttaaaccaattgcaggtagaattattcacattccatatgttgatattaccatccaagatgaattttatattctgtcgagacaaatgttattttttgcacaagacattcatgtacttgaaacagaaaaacttaatacattcactttatataagtgtgtgatgaatgacgcattttcaacggattgtatttcctggttcaaacgtgttctcagcaaaaacttactaccctcgagttaccatctcgatgttataaaacctgtaaagtttattcgaggtgatggcttgtttcaaattcaacaggcaaaccttgagttaaacctcgcttttacaggaaaacaaaacgagcagcaattattgaaaattaagcatcctaatgagcaaatcacgtaccaaaaggtgacacctggtattgtaaaattacaacttccacagtacggtatctatcagatatccgtcgccttacagcgtggtccttggttaactattaatcaagtcaagaaattgacgacctttgatgtagtttcaccgagctggcttattaataatgaggaagtaatttttcgacaaaacattataaaaggtgagcaatttgtaaccaaaagcgttttcccaatatgttattacagtggttccactaagagtcacggtaaaaaaacagtgtttgattttaaagaagaaatggttgcgagtatcccatatctatggagtgttaagctccgaaaaccaaagctagacataaaattagattttcaagaacttctctttttctataaaacacaagcagaacttgtgaaagtagattcggttacgtaccaaagtattttagcgagaattgaggcatcgaaacatcgacaattattgacttttgttagaagctatccaaacatgattccaaaaagatttatagataggtga

SEQ ID NO: 27191 - DNA, 1923 bp, Bacillus sp. LF1
atgattgtattaggaagaacaaagtctttatcctttgccaacactgatatacctgaacgacttgtaattgatgttgtgggaactttatcagataacagtttaattccacttcatgcggatgtccgtcaacaagctctacccaataacggaagagtcttcattccgaattacttctcagtgcctgaggaacatcaatataaactgtgggaactgaatgaaagccttacttacgaaccgtcattggcaaattctagcaaatatgttttgggtaaggaggtgcataatgtcccactttatgaagtgattactttacaaggtaatttcgaaactcaaaaaaatttaattgaaacaaagcttcgtaattcaattaattctaaagaaacaccacttcccaacgttttatttactaccgaagacggatatgtcattggccctgtaaaaataaaacacttggtagatgaagcttacacgttagtagaagataattttgttgcagtttacaaaatagacatctcgctaacaatgatacacaatcgtttattcacaattgcaaagttattagaagatgattttgtaggttttattgatgtagcaaatgatgagcgtgctgtgcgcgctgcgttgaaaattttaaaagagcaatatgaatacggcgatctctctcgcaaggtcattgcccggttatcacagatttatacctcgacaagcggagaaatgaatcaacgtttaactcgtgtacagcaaatcattcaatcgaaaacatttaatgaagaaacagaattgtttttccgtaatcaatttttagatttaccttatgtacaacaaatgatagaagcaaataaaaatgatgcttttgaaaaattacttgtggactttaaagtaaagcatcgtgacttaataaaagaagttgaaataacggaacacgcattagaaaacaaaaatcttgaacttacacatactgaagaagtaatacaacaaaaaattgctctcttacaaaatattgaggaaagtttttccgtaaaacttacgcagctggagaagcaattcgcagatgtatatgtagagcactttttacgacaaggaattaatgtccaacaacaaataccacaaactaatcattcacaaaaagtaacagaaattccacaagcttgtgtaaaagtaattactaataatgaaccatttgcttctatagataaaacactagaaatctttcatactagtcgcaagcgtttgcatattcgagatcgttatgaaacactccataaaacagtattaggggctattttatttcgcgatccagtcattatagcggggactcatagctttgagcttgcacagtttattggacgaacatatagtgcaaatcagttttattcgattgtaccagaggtgaatttgtttagctttgcggcactggaaaatttaacaccacacgcagaggatatattaagcgcagttcatatccataacttgcactttacgcaaggagaatttgcactaaaaagttatgtggaactaatgaagtggaatgacaaggcaacacagttacttatcctaacatttgatgacgttcagcaggcaaaaacatgtattacttcacttagctgtacaccattactttatgctgaagattttctaaactttgcagtacttccaaggaaatttatcacggtcaactttgctcaaattgacctttctgaagttgaagatttagaactagaggattgttcaacatttaatagagaatttgaagcatggtttgaagaaaaatttggttacaaatttgaacaatcctttgttttagataattggttaagcattctcacttcagatttagacggctcaaatgaaagtgagctcgagcacatatacaaattatttgagcattatattactagcttaaagcgagacggaaaatcatga

SEQ ID NO: 27192 - DNA, 879 bp, Bacillus sp. LF1
atgaactggatacagtacttaacagaaaaatcgttatatgtgaaaagtatactatcctctcaaaagcaaatgggcatcgacaaggtacatttccggcaacttacgcctgtgcttaaccgtttactagaatatgcaccacaagaagcacaagagtttcttaagcacaaaacagatacatcggctcaatgtttacttacttggctagctactattggagaaattattaagctagataatggatactacgctatttggccagcttgtaatttggtgcttcctagaacaaagcaacaaattggagtacgttatgtccttgaccatgagatacaaccaattacgattactagtaaacctaataaaacaaagcctattttagccatgacagattatttgtatacatcttctttacaagaaacactaaatgactataagtcgtttactaaaagcaatgatatagacacgatttaccgattcacgaaacatggcaaacaacaggtaacgaaaaattttaccccaaatgaattgtatttcgcagagaagaaacaagtatttgtacatggtgggcataaaactgaccgtttccttgcaaaatttcaaaatggttggcatattcagcaggtggcagaacgaaatgtcaggagagtttattatgcattgaatgcacgggcaggtcgctattatacgtatagtttaaaaaagcatacggtgtatacagaactagagttacaattttgcttaccgcatgaggaatttgcaatgatttctttaattgggatgccaaaaatatttaaaaatgcgaagaccttttatatcccaaatatgtatgtagaagatatgattgcaattttacaaaggttagagatgaaagagagatgttaa

SEQ ID NO: 27193 - DNA, 5259 bp, Bacillus sp. LF1
atggattacacattaaataaagtagccgatcgcttacaaaaaaggttagttgaatatattgaaacgcgttatgtgatcagtaacgatattttacaaaaaaaacgtcattctttgcttgaaacacctggaacattgcgtacagcaccgtatattgaagcaactcctgtttacgagcttgggagtacgtatcaagagatgaatattctagcaagtacgaaatcgctgatgaatgagcttgccgagtatggcatcggtgtattcccacgtccatatgtccatcagcaaacagcgatggaagcattcttaactgacaataaagatttgatagtttcaacaggtactggttctggtaaaacggaatcatttttacatccaatgcttgctactctttacgaagaagctgtgacaagaccagcatcttttgctcggcgcggtgtgcgagcacttattttatatccgatgaatgctcttgtaagtgaccaaatgacacgtcttcgtaaattaatgggggatgagcgtgtcaaatcacgctttcatgtacatggtcgtaatccgcaattcgggatgtatacgtctagaacgccgtatgctggggctcctaacaaatttaaagataaattacagttgcaaccaattttaatgcattatttggaagtggagaaaaataatccagatatcgctaagcaattaaaagagcgtggtaaatggtatgctaaggatttacaagcatttaaagactcaaaaatgccaaaaacatttcgctatacaactagccctaatgatgctgaactattaacccgtcatgaaatgcatgaaacacctccagatattttagttacaaactattccatgcttgaatacatgctcatgcgtccaattgagcacacaatttggcaggatacgaaggactggctagcgagtgattcagccaatcaatttgtccttgtactagacgaagctcacatgtaccgtggtacaagtggtgctgaagttgctttactaatacgtcgcttgcaagcaagacttggtatctcacgcgaccgtatgaaagtaatcttaacatcagcatcactcggcaaagaaggagacacagaaacaccaattcgctttgcacaacaactaacaggagcggctgaatcccgtaaatttaagttaattactggtaaaaaagaaactcgtccacaaggcaaaacaatgacacctgatgaagcatctcattgggcaaacattgactatccgcttgttgctgaatggaataaaaaatataaagatatagtagagcatttacagccaatttttgaagcactaaaatttgatacacttccagcagacaaaaatgaattccaagaatttgtattcaaacagttaaatggatatggtccagttgaacaagtaattaagaaaattagtggtaatgcaacatcagttgaggagcttgttgaaactgtttgcccaaaagtatactttccaacagctgaaaaagcaattagtaatctattacttctagcaaatatggccgttaaaaacggacgggttttattaccggcacgtttgcatttgttctttagaggattatcgggtgtgtttatttgtatgaatccgaactgtgataattcaggattcctaggaaagatctatgatgcataccgagagcagtgtacatgtggtagtcgggtatttgaattatatacacatatgttatgtggtgccgcttttattaaagcgttttgtgaaaaggatacaaattttccaacgtatttatggagtgaaccaggaagcgacattgttggtgagccactagaagaaattcatttactaatagaaaagccgaacgatcgtgcgcttgaaggtaaaacattaaaacccctatggataaatgtgaaaacgggatatatagttgactcacctcagcaagacacaaattttattcgtgtttatatgtccttggaaagaccgaagaaaaatcgtaaacagaaatactattcttctgctaaatcatttaatacttgtccttgttgtttaaagaaatcacaatataatattcgcgatctacgtacaaaaggtgaccagccattcggtgagattgtgcgtgagcaatttgcaattcagccaccagtcagtggtaaagaaaagctaccaaacgagggccgtaaagtattaatattctcagacggacgtcaaaaagccgcacgtttagcacgtgatatcccgttagaaatggaaaaggacgttattcgtcagctaattctacaagcaactacattaaaaaaaggtagtattaaaattgacaattatctctataacacattactttatttgcttaatgaaaatcgtgtccaaattttagaaggcgatgagcgaaaaagtgttcaaaatgatgccgattatttaaagaaagaatacgataatgatcttgattatatttttgaagaagcgttagaaccatctaaaactttaattaaacgcatctatcaagttataggtaatcccggcttttccatttacgatacagcaacaggttacgtcacattaagtgcaccgatactaaaacgtaagtatcaaaaggttgaggactatatttcaaaagaagattttgaaacaattgtcatcttatttattaaggaaatgctagcggatgtatcgatatttgacgctgtactaacaccaaatgatcgtaaagaaattcttggacaatatcgttctgaagaggattggagccgaaattacgggggattaagccgtagtttaaagaaactaatcgaacaccttgctccaggtcatgtacaagaaattatagatgaactgtacagtctttgccaaatgcaaaatgaacgctacttgctaaaaaaggatccacttattattaagcatgcactagaagagacttggtattactgttcagactgtcgtgagattcatttacgaacagccaataatctttgtgttaactgcttaagcgataacttgaaagagttgacaccgaatagcgaagattttaatgctttaaaaggattctggcgctctccaattcaagaagttcttgataatcgacgtattaaaaatatccgagtagaagaacatactgcacaactttcacaaaaagatgttcgccatgcacttgcaacaactgaaaagtatgagcttggctttcaagatattgaaatggacaaaggtatgggtgttgtcgatattttaagctccacaacaacaatggaggtaggaattgatataggttccttaacggcagtcagcctccgcaacatgccaccgcaacgagagaactatcagcagcgggctgggcggtcgggccgtcgtggatcgtcattatcaacagttatcacatatgctcaggatagtcctcatgatcattactacttcgacaatccgaagaaaatgattagcggtgacacacgtgatgcgttaatttatattaacaataaaaaaattgtccaacgtcatatcaatgccttatttatccaaacatactttcataaagtagtgcacaccagcttaaaacacgaaaagtatacaaaaatcaatgaatcactgggctttacagtggacttctttgaaggagagccaccgttcaattttgaatcatttgatgaatggcttagcgaacaaaattataggaaattcaaaggtattccaggaatatatgatattatccctcaagatatggttgctgaagaagatgatccaatacgtgtgaaggaaatgctcattcgtgaaacgatggacatcctattagaaaagcttagagcgaaatatgaggaaaacatcgactctttaaaattagctgatgaagatgaagcggaagaacatgtagccacaagaatgttcattgaattcttattcaattatggattcttaccatcatatgcgtttccagtcgatttaacaagcttctatatacaaaagaaagaaaataaagaaattgtgctagaacaacaaccacaactacagctaaatcgtgctttaagtgaatatgcaccaggccgcatgcttgttgtgaataaaaagaaataccgtgtgggtggaattttcaacccatacttgaaaaacccgtttagcgacgaagttaatcatcagctcgatgaagtcgtttattgcgatcgatgtcattttacaaagcttgagcactacactgaaacaagatgtccaacatgtaatgcaaaactaaaacgtatgccatatatgcgaccaacaggtttctcaccagagatgggtagagaactacaggattttgatttagagcaagattacagttatacaaatgatccgcaattaccgtttactcatagccatgaatccttagagttctcaatactctacaatggcaatattcagtatgcgacaaaattaaatgatgaactcatcatcatgaatcgtggcgtacagcgtcaaaccggatttaatatgtgtaaagattgcggctttattcaacctgtatatgaaggcatagagccaccagcaagtcatttaaaaccttttttaacagttggtcgtgataatgagtgtagaggggaattactccaagtctttttagcaaacagattcaattcagatttattattcattcgactccatctctcaaaacagcttgacgtaggcgatatcaaaccctggttaaataattctctaacaacgattggtgaagcatttagcttagcagctggtcgtgttttagacattgatgcacaagaactttctgtcggtcatcgctttgtacgaggagaagacaatgaactgtacgcagatatatacgtcttcgatacactggaaggaggtgcaggctattcgttaatggcaggagaaaaaatgcaagacatcctagaggaaacattaaaagtccttaacgtatgtccaaacgattgtgactcgtcatgttataaatgcttgcgtcactacaataatcagtttaaacataagtctctccatcgtaagcttggttacgagctgcttcattatttaatgaccaaccaaattaaatcttatgatgaaactgaccaacaactatggcttagtcgcattatagaaacgcatcagctattctcaggaacaatttctattccgttcaataagcaaaataacatcgtctacattgagctttttggtcagaaaatagcgttgaaaaataatatcattgcaatgaataatgacgactttttatatttctcaccatttgagattcaattcgacttgccaaatgtctatttgaaagtaaagggagcgaaggaagagagcaaccagttctaa

SEQ ID NO: 27194 - DNA, 1560 bp, Bifidobacterium pseudocatenulatum IPLA36007
atggatcgggcgaagacattaaaagatggcaaagagataactgtcttcgctcatgatctcagcagtaaagggagaaagcgcatcgcccatggcgctcgtttcaaatgcccttactgtggtcgtccagtcgatctcgccgcattggactccacaaaagtcacaacttatttcaagcatcaccgaaatgatgaactcgcaaaattctgtgacgagtatgtcagcggtaacggatccggaaacctcctcatgaggaatccggtcgttcccatcttccttgatctcgaagaagaatccacaaaacggtacgtgctgaaggcaggactgtatggcatcggacgaaaactacgtgatgatctcaaaaagaacgcagaggcttatatgtcggtcaatggtcgaacgtaccagttatggcagatggcagcggaatctttgagtattcccattcggaaacttccaacgctggaactaagcaatgagataacggtaatagctcctgaatccatacgcagaagagtcggggaagctgaagattgtgaatccggcatggtattcaccagcgactacagcggcgctccgccaaatcatgccaaccatattggaatccgaatccgacgtggaaatgacgtgtatgtgggacgacgttattatcttgtaatcgattcaagggagccgaaactgtccaagtcagttgccacatccttcgatacggcgaaaaaagtcggggctcttacagcaaacagctgtttcactgtttggcgtgtgtctgttgccgcgtcatcctctaagagagagaccgctgcgaatatgttcgcccatttcggctgccgccttactgacaaggaaagaacagtcgatttgctttggcctccatctctcacctccaatggaatcgatcagccattgttcgagaacacatccgtcatatatcacgaaccggagggaaacgccagccacaaagatactggaaccgttcaactcacgcatcccgcagaaatctatgcgctgggagacaactacttatttccattcggatatattggaacaggaaaacatgaacgtccaatttatgaattggataccggttttttggtgtcccgaccggatgaattccacacatggcgaatgatcagccaagatcaaatcgatttgtcggcattctcgacatcagagtgtgacgaagcgtcagtgagcctaacatcagaggacaagccggatctgacttgcttattccctgtaaacgtggaaatacgctcgaaaacagggaacgtccagaacgaaaacctccttgcaaacgagaaaacgcttcctgcgaggcgaaaagatctggttctggctgcagcagcaaggaagacattcccaaggtctttcctgctatgcgtcaacaatgccggcatgacagtaaagtcagcatcctgccccgtcactgggcttgattcaaagttacaactacgaaaagtaagccatggcatgtcaatcacaatgagacgcgccggcatcacaaccaggaaaaataacacatcaaaaaacaaaatactaatccaagcaaggagaggggaataa

SEQ ID NO: 27195 - DNA, 1002 bp, Bifidobacterium pseudocatenulatum IPLA36007
atgaagcatgacgacttgctcaagattatgggcgcggaccttggaatcagtcgatatcgaaatgaatcggatgaatcgttcggtatcagaacggtttattccgcttcgagattctggatcgaagccttttgcctggacgatggacggatgggtgctgacggatgccagcccggcatcatttcacgaagactgaacctttggctcgacaggatttcatccatatatccgtttatagggcagtggattagaagccaacagcattatacgccattttccaaactcctctacaacagactcatcatggtcggtgacatcatctccgagaacaacggcggaacatacagatgttcttcccgtcatacgattcaaatcggcaatgacttgcaagcgctcttgggcgtctacgatacgacaggcaacgacacatccctgccgatttcgggaatgatgctctcgaaacgcgaacaggcggaaccacggatcaaatgtgacccggaatggtggaatctgccacgagaatactatgcctggtcgtcttgctccgacgaaggaatcaacgaatacgccgacccatcccgaaagagcgtcagggactgttggacttcgaaacccgttttaccggatggaatcggtcttgggaggagacgggagacccataaatacacatacttcctcttacatagccaccagaacactatcgaagcgagaatcatcgacaactaccgatggccgtcgctatacacgcatctgaggaacatagtgggtaatccctattgggcggacgtggaaaaactagatgatgcccattccagaatcgaagcgcctttcagcctgcttccacccgagacatccagatggcttgatttcatgacatggcctgagaaaacccccgatgattgcgtctttcgaatcatccgcaccgaattattgaaaaccgccacggatatgcttgaatcctgcggaatcaaagtaaggaacagcaaaacatgccagtccaactaa

SEQ ID NO: 27196 - DNA, 5232 bp, Bifidobacterium pseudocatenulatum IPLA36007
atgccagtccaactaagtatcgccgacgccgagaaagccatctcgaatagactcatcgaatacatcgagaccgaatacttcggcaagacacgggagcttctttccagatgcaaggaaacactcgccgctcctggaacactgttccagaaaccgtatttggaggcggcgaaagcctatcagcttgccgaaggaggtatcggcaatgccaagattccggaacgaatcagaatccttctccagactatggcggagaaagacaagggcgtgttcaccaaaccttacagtcaccaaatcgaatccctcgaatcattctggaacggctatgatgtcctagtctccacgggaaccggttccggaaagacggaatgcttcatgtggccgctcgtatccaaaatggcgggagaagccataggattgaccggcgaccgtcggtcgtgggaaggaagccgggcggtcagagcattgattctgtatccgatgaacgcgcttgtatccgatcaggtcggccgtctgcgcaaaatggtcggcgacaagcaaggaagtttccttgacatatggaaaagtgccgtcggggatgtacgacgtccccaattcggcatgtataccggcaggacaccttatgcaggtgacgcaaggagcaagcgacgcgacaaggaatatgccgaaacgctgcggcgcgatttcggtgaactcagtgaggaggacaagcttcatctgtcggaaacgggacgtttcccggaaaagcaggatattctcgcctatgccgatgtgatcgcggaaggtagagatggatggagtccactggatgcggaaatgctgatgcgttttgaaatgcaacggcatacgccggacatcttggtgaccaactactccatgctgcagtatatgcttatccgatccacggaaaacggtatctggaagaatacctcgaaatggttggaacggaatccaaaggaacaaatgctgctcgttctcgatgaggcgcatatgtataaaggcgctgctggaggcgaggtcgccctgctgctgaaacgccttgcggcaaagctcggtgtcgggatggatcgtttccaattcatactgacttccgcttccattcctgaaaaccatgagccggtcgcacacttcttcgaggacatggcaggcagaacagcctcaaagctgcgcatcatcacaggcagagaacagaaagtcacacgtggctcccgaatcctttctgcgaaagacgtagtagccactgccggagctgacgacggatcggatacgtcgatgatgcgtcttcgacgattcctatcggggatcggacggtccgtgccggaggacatggatgaacaagcgttgcgggaactggctggagatgaactccaaaagattgagcagttcggaacgttggaggagattctccgccaaagaacaatgactttggacgaaatcgcaaaagagatcttcaaggacgagcccgaagccgtcaaggcgaccgacatcctgctgaacatcgccgcactggccttgaacgaaggacggccactcttgccgacgcgcatgcatcttttcatcagaggaatccagtcactcacggtctgcgccgatcccggatgtcctcatgtggagaaaagagatgatctgccactcggcaaggcgttcattaacagatcggttggacgttgttcctacggcgcaaagacctacgaactggccaccgaccgtacctgcggagctctgtttcttaaaggctacgccaatcccggtgaagacggcttcttcttctggaacgagaaacctgtcgggaacagtgagatcaaagaaatcattgtcatgccgatagcagaagattcctgtccagacgacgtcaagacaggatggctcaatacgatatctggcaagatataccgtgacgatcatcgcggacagcctcatttctcgcatgtggccttctctttcgaccaacccaaagacctggacggcaaaaagatgcagttcaccacctgtccgaaatgcaatggccgtctttccgtcagcgatttcacgaccaagggcaacgaaccgttctacaatgttgtcgctgaacaattctcactgcaagagccttcgagtgacccggaaaagttaagaaggaatccgaatgccggaaagaaagtgatcctcttctccgacagcagacaagccgccgccagaatagcgctcgacctgaccgaatcctccgataaggacctgatgcgaaagctgttgtgccgggcggcatacgacctataccagcagtacgaagacgaggcaacggtcagtgcgatttatccgatgttcctaaaaaccgtctcggaacacaaatcacgcatcttctatggcgctgatcgcacaactatcatggagaaaataaggaaaaaccagagaagattttcccggcacttcgataggttcctaaatgaaggagacgaaggcgccccgcaagaatattattaccttcttttatcactcatctgtgaccgctatcgttccctcagtgatatgacaatcggttggattgaaccatccgattatcacatggatcttatctatgatgatcttgatgagatcggaatttccgattctgaattcaaatccgtcttctatgcatggagcgaatacctacttatccataacgccgccttgaatccgaatattgaatggtctactcgagatagggcaatgcctttctccacggaatacggagtagatcacgacaacatcttcaaaggccaaatgcaggggaaacgttcgctgtatgaattcttgaagaaacgttttaatgccaatgaaatgacatatctcgaaagtgcattagaccattttttggaaacgtccaccaaaaatatccgatacaaatatctgaatccacactatgttacgttgagaatcgatccggatgccaattggaaagcttgtgatcgatgcggtaaaaacgcaccatataatttatggggcaaatgcccccattgccggcaaggcgacatgcatgaactcacggatttcagttccgttgcgttctggcgcgatccaataataaagattctccaaggtgacgatgattccctgcgtgcaagaatcaacaccgaggagcatacagcccagctatcccataaagatggtcagaatgagagctggtccaccaccgaggaatatgagatgcggttccaagacatctatacgtccgataatgaggagcccgtggatgttctctcctgcacgacaacgatggaagtcggcatcgacatcggctcccttaccgcagtggcgcttcgcaacattccaccgatgcgtgagaactaccagcaaagagcgggacgcgcgggtcgtcgtggctcttcgatatccaccatcgtgacatatgtcgatgcccgtccattcgacaaccactacttcgagcacccggatcacattgttcgcggagagttgagagagccacacatcgacgtggataatgagaagctaatcagacggcatctggcgaccatcctactcactgatttcagcgccgaacatggattctcaatggagaacatcaccattgagaatttcttcgaaaactattggaaggaatggaattccttcctcgaatcgtacgatttcggcaccatcgtccagcaacagataatcccacagaattggaatctggattccaaaggattccgtcgggctctatctgcggaattgaacaatcttaaagaagatttcgggaaatacagagaaaattatctgtccgcagataataaaacctgcaaaagtcttttggatagtctccttgaggcagccatacttccaacgtattccttccctcgtaacgtcaccggattcgatatcgaggattcatccgatgccaagacactcgagcaacgtccggaacgatcactcgatatggccatcagcgaatatgctccaggacgggaactcattgtgaataagaaacgatacatttctggcggaatctactcgcattcgtcgagattcgccaaaaaacagggagaatctttcgaaccagcaaagaaatatttcaacaacaaggattaccgcaacgaggtacttctctgcacaaacccgacctgtggatggttcggatacgaaaaagaattgagagaacccgaccgttgcccattctgcaaagaacccgggcttgagcacaaaccattcctcaagccatggggattcgcgccaaaggacggaaggccttccccatcagcaagcgagcgctccgaattatcctttgcggagccacccttctattccgcaacgccttccgaagagatgacggatgccggttatgctcatatcaagtacagcgaaaggcatgactgctccctcatggtcattaataaaggaccgaacagcgaaggattcacaatttgctcccggtgcggagccgctttcccgacaacggattcagcaggtatagccaagcgcatcaaggcgccttatactaagactccgcagaaccggcagcctgactgcgcgcacgactttgacagcggaatatatattggagacgtgttcaatacggatatgatcatattcgctctccacctaaatcctagcgaagtgagtgttggtcaatcgaatagatggctgaaaagggctcgcgtatcgcttgccgaagcgatgcgtcttgccgccgtcgacctgttggacatcgatttcaatgaattatgcgtcggcagccgctcacgtcttgacggaagtggcgaatccgcattcgcagacgtgttccttttcgattctctctccagcggagccggatactcgtccacactttccaaaggacataatctcgagaaactcttcggcaagactagaggcatactcaccaactgcgattgcgaagatgcatgcttctcctgtctgaagcattactataacaagcaattccacaatcagctcgatcgtcacgcagcacttgatttgcttgactatgcgatgaatgggacagtgagaaatcacgtgtctgatgatgatgcacgggatgcctttgcttcgcttgcagaagtaatccaggatgacgcaaaggcaacatgttcattcgaaagcgacaagatgactttcatgttggatggcaaagagaccactctcacttgccttccggatatgaagcccaaatcatccatgtcagcagtgaatgaatattggcagtacgagatgaagcacaacgtcccgggaatcgtcgaaacgctcatcaaggaacaatcaggagattccacgttgttttga

SEQ ID NO: 27197 - DNA, 1542 bp, Bifidobacterium sp. MSTE12
atgatgaaagatagtagagagataatcgtcttcgcacatgaaatcgatgacagaagcaaaaaacatgttccttggggagcgcgtttcaaatgtccctattgtgatcgtccagtcgaccttgccgccttggactccaagaaggtcagaacgtatttcaaacatcatcggaatgatgatcttgcgaagttctgcgatgaatatgtcagcggtagcggatccgaaagtctccttgcgcgaaatccggtcattcccatcttcctcgaacgagaaggcggatccgcgaatcgttacgtactgaaagcaggcctgtgcggaatcggacaaagattgcgtgatgatctgaggaaaaccgtagaagcttatatgtcggtcaatggacgagcgtattcgctatggcaaatggcggcggaatccctgaaggcccccatccggaaactgttaacgctggaactcagcaaggtggtaacggtaacagcttccgaatccatactcagcagaatcgggacagtcgaagactgcagaaccggcatggtattcaccagcaactacgacggcatcccaacggatcatgctgttcatatcggagtcaggattcggcacggaaacgacgtatacgcaggacggcactattgccttgtccttgattcgggagagccgaaactgacccagtcagtcgtgaaatccttcgataccgcgaaaaagataggaagtctcgcggccaacaaccgttttaccgtttggctggtttctgtctccacgtcatcctccaaaagagacgatgctgcgaatatgtttgcctctttcggctgccgtcttaccgatgaggagaaaacggttgacctgctttggcctccgtccctcacttccaacggaatggatcagccactgttcgaaagcacacctgtcatataccatgagccggaggggaacgctcgtcccgaagacgctgggatggttcggatcatgcaccctgcggcgacctatgggctgggagacgactacatatccccgttcggatatatcggaacgggcaagaacgagtatatttacgaattggataccggttttctggtatcccggccagatgaattccacacatggcggacaataatccgagacagaatcgactggtcggcattcgcgacatcgggatacgacgagtcatccgtgagtttgacatcgggtgacaagccgattcttaccggctcattccccgtggacgtagagatacggtcaaggacgggaaaaatctggagtgaaagtctgtttaaaagcgagagaacgctcccggcgcggcggaaagacttggttctaatcagagccgcgaaaggagctttcccaaagacgttcctgttgcgttttaatgatgtcggcaaggcagaagagtctgccgcacgatcaaccgccaaaaccgatacgaggttgctgttgcgaaagacaaatcttggcacgtcaatcgcaatgaaacgtactggaatcaaggttggaaagacgaatacgtcgagaagcgaaacggtagtccgagcgagaagaggagaatga

SEQ ID NO: 27198 - DNA, 993 bp, Bifidobacterium sp. MSTE12
atgaagtatgacaatctgctcagcattatggctacggaccttggcgtcaggcgatacctgaatgagacggacgaatcatttggcattagaacggtttattccgcatcacggttctggatcgaagccttttgtctggatgacggacgaatgggggctgacggatgccggcctggcactatctcgagaaggctgaacctttggctcaggcgaatctccctcatatatccgttcattgagcaatggttcggggacccgccggcctccaaactcctttacgacaagctcatcatggtcggagacatcatctctgaaaacagcggcggaacgtacaggtgtccttcccgccatacgattcaaatcagcgatgacttgaaagcactcctgggcgtctacgacatgacaggtaacgtcatgtctctgccgatttcgggaatgatgctttcagcacgtgaacatgggaaaccacaggttgaacgcaacccagcatggtggaatctaccgcgggagtaccatgtctggtcatcctgcacggacgaacgggtctacgaatacgccgacccgttccgacaaaacgtcagggactgttgggcggcgaatcccatcctattgaatgggattggaatcggaagaagagaggaagcctataggcgcagcacgtattttctgctacgcgaccgacgaggcgacatcgaggcgagaatcatcgacggctcccagtggaagccgctgtacacccatctaaggagcgtcgcggggaatccttactgggcggagctggaaccgctgggagaatcccacaccaggatcaagacaccttttggcatgcttccaacggaaatatccagatggctggatttcatgacctggcctgaaaaagcccccgacgacgaaaacatgcggataatccgcaacgaactgttagaaactgctgtggatatgcttgaatcctgcggaatcaaagtgaggagcaaccgaatatgccagtccaactga

SEQ ID NO: 27199 - DNA, 5244 bp, Bifidobacterium sp. MSTE12
atgccagtccaactgagtatcgccgataccgagaaagccatttcgaacagactcgtcaaatacatcgagaccgaatacttcggcaaaacgcccgagctcctctccagatgcgagaaaacactcgctgctcctggaacgctgtttcagaaaccgtatctggaagccacgaaagcctatcagcttgccgatggaggtatcggaaacgctgcggttccggaacgaatcaagacttttcttcagagtatggcggaaaaggacaagggagtgttcgccaaaccatacagccatcaggtcgaatccctcgagtcgttctggaacggttgcgacgtcttggtctccacaggaacaggttccggaaagacggagtgctttatgtggccgctcgtatccaaaatggcgggagaggccatgggattgaccgatagacggtcctcatgggaggaaagccatgcggtcagagcactggtcctgtatccgatgaacgcgctcgtgtccgaccaggtcggtcgtctgcgcaggatgatcggcgacaagcaaggcagtttccttgacatatgggagggcgtcgtcggaaacgcgcggcgcccccagttcggcatgtataccggcaggaccccttatgccggcgatacaaggagcacgcgacgtgacaaggaatacgccgaaacgttgcggcatgatttcggcgagcttggcgaggaggacaggtttcatctgtcggaaacgggccgtttcccggagaagaaagacatcctctcctatgccgatatagtcacggagggcgaagacgggtggagtcccctggacgcggagatgctgatgcgttttgagatgcagcgacatacgccggatatcctcgtgaccaactattccatgctgcagtacatgctcatccgggccacggaaaacggtatctgggagaacaccgcgaaatggctggaacggaatccgaaagaacggattctactcgtactcgacgaggcacacatgtacaaaggtgccgccggaggcgaggtcgcactacttctgaaacgtctcgcggcaagactcggagtcggaatggatcggttccagttcatcatgacttccgcttccattccagaggaccacgagccggttgaacgcttcttcgaggacatggcaggcagaccagcctcgaacctgcgcatcatcacgggtaaggagcagaaggtcgtccacgggtcccggattctttccgcgaaggacatagtggccgccgtcggaaccggtgatgattcgaacacgtcgatgatgcgtatgaggcggttcctgtcgggaatcggccaaccaataccggacaacatggctgaacgggcgatccgtgagcgggccggggaagaactccagaaaatagaacggttcggagcggtggaggagattctccgtcgaaaaacactgacattggaggaggccgcgaaggaaatcttcaaagacgattctgaagccgtcagagcgaccgatatcctgttgaatctcgccgcattggccttggacggaggacggccgctcctaccgacacgcatgcatctgttcatcaggggaatccaatcgttcatggtctgcgccgaccctaaatgtcctcatgcggaagaaaaggatggtctttccctcggcaaaacgcttattaacggctcggccggacgctgctcctgcggcgcaaagacctacgaattggccactgaccgcacctgcggagcattgttccttaaaggctatgccaatcccaaagaggatgatttcttcttctggaacgaagaaccggcaggaaacagcgaaatcaaagaactcatcgtcatgccaatagcggaggactcccgcccggacgacgtcaaaacaggatggctcaacacgatatccggcaagatataccgtgacgaccatcacggacaagcccatttctcgcacgtggcattctccttcgaccaacccaaagacatggacggcaaaaagatgcagttcatcacctgtccgaaatgcaatggccgtctttcagtcagcgacttcacgaccaaaggcaacgagcctttctacaacgtcgtcgccgaacagttttcgctgcaagaaccctcaaacgacccggagaaactgcggaggaacccaaacgccggaaaaaaggtgatcctcttctccgacagcaggcagaccgccgccaggatagcgctcgacctgaccgaatcctccgacaaagacttgatgcgcaaactactgtgccgggcggcatacgacctataccgacagcacagcaatgacgcaacggtcagtgcaatctatccgatgttcctgaaaaccgtatcggaacatgggtcgcatattttttacggtgccgatcgcacagccattatggagaaaatcgagaagagtcagagaaaattcgaagaccctcgacgtttcgccaaattcctaggtgaaggtgacgaaggcgcaccgcaggaataccattaccttcttttgtcactcatctgtgatcgctatcgttctctcagtgatatgacagtcggatggatcgagccgtttgatgacgacatgtgcgatatccatgatgatctcgatgagatgggaatttccgaggacgaattcaagtcggttttctatgcatggagcgagtatttgctcattcacaacgctgctttgaacccaaacatcgaatggtccactcgtgacagggcaatgcctttctccgcggaatatggggtagaccacgacaacatcttcaaagggcagactcaggggaaacgatcgctgtacgagtttctgaagaaacgtttcaatgcggatgaaatggcacatcttgagaacgcactggaccatttcctcggaacatcagcaaaatatgtccggtacaagtacctgaatccgcgtagcgtcacgctgagaatcgaaccagatgcgcggtggaaagcctgcgaccggtgtggcaagaacgccccgtatgatttgtgggggaaatgccctcattgccggcaaggcaatatgcgggagcttacggatttcagttccgtcgccttctggcgagatccgatagtgaggattcttcaaggtgatgatgattccctgcgcgcgaggatcaataccgaggagcatacagctcagctgtctcataaggatggacagaacgaaagctggtccaccaccgaggaatatgagatgcggttccaggacatctacacgttcgacgacgaggatcccgtggacgtcctttcctgcacgacgacaatggaggtcggcatcgatatcggctccctcacagcggtggcactccgtaacattccgccgatgcgtgaaaactaccagcagagggccggacgcgcgggacgtcgcggctcgtcgatatccaccatcgtgacatatgtcgatgccagaccgttcgacaaccattacttcgagcatccggacagtatagttcgcggcgaattgagggagccacacgttgacgtggacaacgagaagctaatcagacggcatctagcaaccatactgctcaccaacttcagcgccgagcaagacttctccatggaaaacatcagcatcgaggatttcttcgaaatgtattggaagaaatggaattccttccttaaagcatatgactttggcaccatcatccaccaacagctgattccacgggactggaagttggacaccgatagattccgccgcatcctgtccaaagaactggctgaccttaaagaggatttcagggaatacagggagaactacctatccaccgacaataaaaactgcaaaagccttttggatagtctcctcgaagcggccatactcccgacgtactcattcccccgcaacgtcaccggattcgacattgaagatccatccgaggtcaagaagctcgagcagcggccggaacggtccctcgatatggccatcagcgaatatgctccagggcgagaactcatcgtgaacaaaaaaaggtacatttctggtggaatctacgcgcattcgtcgagattcgccaaagggcagggtacctcattcgagccagcgaagaagtacttcgataacaaggattaccacaacgaagtgttcctctgcacgaacccgacttgtggatggttcggattcgaaaaggagctacgtaaacccggccgttgcccgttctgtaaagaacccggactggaacacaaaccgttccttaagccatggggcttctctccaaaggacggaagaccgtccccgtcggcgagcgagcgctccgaattgtcctttgcggaaccgcccttttactctgcgacaccttccgagaagatgacggatgccggttacgcacatgtcgagtacagtgagagacacgactgttccctcatggtgatcaacaaagggccgaacggtgaaggattcacggtctgctcccggtgcggagccgccttcccgacgacggattcggcaggaatcgccaaacgtatcaaagcaccttacacgaagactccgcagaaccggcagcccgactgcgcacatgacttcgctaacagttccgggctatatatcggagacgtgttcaacacggacatgatcatattcgccctccatcttaatccgaacgaggtgagcgtcagccagtcgaacaaatggcttaaacgggcacgcgtatcgctcgccgaggcgatgcggcttgccgccgttaatctattggacatcgatttcaacgaattatgcgtcggcagccgcacacgtcttgacggaagcggcgaatctgccttcgccgacgtgttccttttcgattccctctccagtggagctgggtattcgtccgctctgtccaagaggcataatctcaaaaaactcttcaacaagaccagaagcatcctcaacggctgcgattgtgaagaggcttgtttctcctgcctgaagcactactataacaagcaattccataaccagctcgaccgtcacgcagcgctcgatctgcttgactatgcaatgagcggaacagtaaagggccgtgtgtccgacgaggacgcacggattgccttcacggcccttgcagaggtgattcagaatgatacacggtccatgtgttcgttcaaaggtgacaagatgaccttcatgtttgacgggaaggaaacagttcttacctgtcttccggatatgaagcccaaatcatccgcttccgcggtgaatgaatgctggcaatatcagctaaagcataacgtcccaggaatcgttgatgcacttgcaaaagaacggacagggaacctcacattgttttaa

SEQ ID NO: 27200 - DNA, 1257 bp, Blastochloris viridis
atgacaaagtcaaaaaatgcgctcccgaaccgcaatcgttcgggcgtggctcggcccttcagcgcggatgccctgctcaagcggagcatccgaagccattttacccggctcgggtttgcccgcgccaatgacggcacactcatcctgcccggcacggggaaggacgatgtgcgaaccctccatgctgagcagcgtgctgaacgcctcgaacgcagttctcagttcctgaaactcgtcctaccggatgccctgaagtattttgcggacggcgccgaactcgacccgtcgaaaatcaaacttcaactaaagcgtgtaagaagcggtagtgaggcagccgacctgtttcgtatcgcgacgttaacgtggtcggttcctgtgtcggctggctacggccggcggctccgttatcttgtgtgggacgcgcatcacgagaaagtcgcgggcgtcatcgcgctgggcgatcctgttttcaatctgcgggtgcgggatgagctgatcggatgggacgccgaagcgcgcggcaagcgcctcgtggggctcctggacgcctatgtccttggagcggtacctccctatagcatgcttctttgcggcaaggccgtggcatgcctcgtgcgtagccgcgaggtattcgacgacttcaagaaaacatatggaggcgctgtcggcattatctccgggcgcaagaaacgggcgaagctcctggcggtaacaaccacgtcgtcgatggggcgttcctcgatctacaaccgcctgaagctcggcaagcagactttctttgagcgtatcggatatacgatcgggtggggccattttcacattacagaccgcctctttgccgacatcagggaattcctgcgcctgaggcgcgatccctatgccggcaaccaccaatttggagacggcccgagttggcggttgcggacgatacgccgcgcgctcgacattcttgaaatcaaccagtccgtactgaagcacggaatccagcgtgaagtgttcatctgtccgttcggagctaacgctttcgagattctcaagacggggaacggcgaactcgacctctcaacattgcagaccgtcgaggaaatttccgacttggcgcgcgcgcgatggatcgagcctcgcgcgcttcggcgcccggaattccgagaatggaaacgcgaggggattcttgacctaatcaagggcaaaccgccatccgctgcaaaacccagcatccaagtccaacctgggcgaggtgcagccgtcggacgttag

SEQ ID NO: 27201 - DNA, 1083 bp, Blastochloris viridis
atgacgacgttgatcacctcacgagaggccattgcgagcgtggcgaaggcgctggggatgcgcaccgatcccgcgcccacgcagcttggtgacgaactcatcgcccaggcgctgcggcgcgccgcatttatcctcgccccctgcgctgcgcacgaactggcgcacgccgtctctggatcactcgcttcgcttgccctggaggatcccgagtttgccggccgcgtcgagacaatccttgagagcctcgttacctacggcgacatcctggagatgagagcggatgcggagaacccgtgggtgaccagcacggcctacacgcttcgctctgcgccgccatcatttgtggcgcgaaagaacggctctatttttctccttggcgttgcgggcgatcaaatcagcgctttgacggaggacctaggtgcgagaattgtccatcgcggcttgctacgcgttctcttgccgctctccggagaggaactcccgttgtacctcaaagaactaggcttgctcccactctcggagcgaacctggctgcggcttccaaggagcgaacctgcttccgcttacgccgggcacattcggtcgctcgtggcggcagagccacgcgcgggaagcatggacggattgacgatactcgatacgtcccgacccgtgaatttctaccgagaccgttgggttgaaccgcgcaaccagcacaccggcttctatgtcgcgcgccgcccgcagaaatatggcgcggccatttggtgtgtggccgaccttgaagccggccgagtcaatcgcttcacggatttgagcgaacccggagaccgtatccggcccagcgatatggcgtggcggattcaggctgcgtttgacgcgctggcaggacacccgcagcgataccgctcaagtcccagaggggcgacgacgctggttcgcttctacgcaccgatcccatcctgggccgaacgcaggctgaccctcgccggcaccaagactagggcggagcgctgcctcttttcatacgatatcccgaatgaggaatggccgggcgaacgcgctttcctgaacgaagcgttgtggatgaatccaatcgactga

SEQ ID NO: 27202 - DNA, 5565 bp, Blastochloris viridis
atgagcgcgacaacaatccagcaaacaatcgacgaactgcgtcaaaccctgaccgaatatctggaagcaacgtatcacattggccatccggcaatggtggcgcaacgcaatcgcctcctgaaagaactcggaggcatctaccagaatccatacattgaatcgacgccgcgctatgtcacggacgagcgctatgaagacatgacggcgcttccgacagccgtgcgtggcacgctggttgctctgtcgggttcgcaggacggaaaggcaatcctattcaatcccccctacaaacatcaggcgcaatctctgaaggagagtttggcaaacaaaaagaacctgatgattatgaccggaacaggctcgggcaagacggaatcgttcctcctcccgatccttggcaagctggctatcgaagcgcgcgggaatccgacgggctttcgagaccatagcgcggtacgggcgattgtcctctatcccatgaacgcgctcgtgaacgaccaactcgggcgtctgcgccttctttttgggaatccgcgagtcgtttccatgttcaagcaatggaccggacgacccgcgcggttcgcgcgatacaccagtcgcacaccttatgccggagtgcggacgccgaacaaggacagcaaccgcctcggttcgattggcgacttcttttcggagattgaaaacgccgcggcgcgatacgcggccggccgaccccgcataccggaggaggatgagaaagcctcggctcttcgtgacaagttggcgaagaaaggaaaatggcctgcgaaggaaaatattgcgtcgtggttcggcacaccgggctcgcaatggcgcgaccgggacgggcgttacaaacgcgccgttgttcagcccgacgacgccgaattgttgacccggcacgaggttcaggagaacccacccgatctcctcataacaaactactcaatgctcgaatacatgatgatgcgcccgatcgaacggccgatctttgacaagacgcgggaatggctccaagcgtttcccgaggagcgcattcttgtggtgctcgatgaggcgcacctttaccgcggcgctcaaggcgcggaagtcggccttttgctccggcggctgcgagagcggtttaacatcggccctgagcgctttcaggttatttgcgcgacagccagttttagcgcggagaacaaagaggcagccggcacatttggagcgcagctttcaggcgttcccgctgacacattcgtcccgatcacgggcacactaagaatgcgttcgccggcaacgcgcggttcggatctggatgtggcggttctgaaggacattgacctcgcaaagttctattcgcccgatcctgcggatcagatgagcgcggccgaaccattcctgagatttcgcggggtcaaaccggagggcgatgtcagcgctgcgttgcttgccgcactcgatagctatgcgccgctcaatctcctcatcaatgagacgatgaaggccgcgctgcccgtcaaagaactgagcgctttggtgttcggcacccccgatgaagaagcgtccgcccgcgcggtgagttcgctgttggccttcggcagtcgcgcgcgaagagcacccgacgaaccgagcttgctgccgtgccgcgtccactccttcttccgtggtctgcccggattgtgggtctgcatggattcggactgcgccgcgcttcccgctaacgaacggggcgggccggcgggcaagctctacgggcaaccgcaggagcgatgctcttgcggcgcgcccgtattggaatatttcacctgccggtactgcggcacgtcttatgcccgcgcctacaccaatgaccttgccaatccgcgcttcgtttgggcaaattcaggcgaacggctccaaaccggcggcgggatgtttgagacgctgaagcatcttgatctgctacttgaagaaccctcgcgacccgaccgcggccgtcctgcaatctacgatctgcggagcggccgacttgatccagaccagcccggtgatcggacgcgaacggtatatctgcgtcccgagggcgacatagcgcttgatgaggaggaagaagcgcgggcacagccgggagaatttgcaccgtgtggctgctgcgggaggctgttcatgttcgggcagtcgagcgtccaggatcaccagacaaagggcgaccagccgtttcaggctttgctttcgacgcaaatcagagtccagccgccggggccgcagcccgcgacggagttcgctccgctgcgtgggcgcaaggttctaattttctcggactcccgccagatggcggcgcggcttgcgccgacccttcaatcgtattccttgcgtgacagcatccgggcgctgctgccggtcggctaccgaatgctgagccaggaccagcaattcactagcgtccttacgctcaatcacgctttcctcgccgtcgtcatcgcggggcatcgctttggagtacggatcagacccgaactcgaccaaagcgaatccatgcccacaatcgacggagtccctccgggacaggcgccaagcggtaccaagcttttcgatctgatgagcgcgcgatgcccggccaacctcatgcgggccatcgtcaacgtcattcgggacactggcctcgcccttgagccgctggccgtcgcgtcattgagggaaagcccgcaactgacggcgcggattgcaggtcttccgcctctatccggccttgccgaaacggagcccgaaaaactggcggtcgccagggcgtggatcagagcctgggcgcgcggccccggcatttggttttcggacatgcctccggaatggtggacaaatgaagtccgcactcacaaaggcgaattcaagccgatggaaaccgtgctggtttcaaaggaagccaagcgggtgttcaagaaggactggctctcgcggctcctgcaagcctttaccgagcggctgtcggatggcggcacccggctgcttgccagcaaattggctctagagcttggcggatcatgggtgcgatgcaccacctgcaagtccgtgcatcggcccatcccgaacgtgaccacgtgcctcgactgccgcgctccaacaatccagatgttcgatcccgtgtctgatcccgtctttgtggcgcggcggggcttttaccggggccccgtggccgcggcgctcgaacagagcgagcccaatttcatttcgctcatcgccgcggaacacacggcgcagctcaacgctgcacagccagaggatgtgttctcacaggcggaaaggcacgaagtccgctttcaggacattaatctggcgtggcgggacacggacgagcgggagcccgcgattgatgttctgtccagcaccacgacaatggaggtcggtatcgacattggcgaattgtccggggtagcgttgcgaaacatgccgcccggccgcgctaattatcagcagcgcgcgggacgcgcgggacggcgcgggacggcggtcgcaacggtggtcgccttcggaagttcggacagccacgacgatcactacttcgtcgctcccgacgagatgattagagggccggtcgtcgacccacggctcaccctcgaaaaccgggatatcgcttgccggcatcttcgagcctacttgttgcagcgttatcacgaagctcggattccgggggtcgatcctcaggccgatccgaatcttttttcggttctcggcagggttcgggatttccggtctggcacaggcgtcctcaaccgcgaagatttccgacattggctgacggacaacagcgatgagttgaaggtatcggcggatcgatggctccccatcgaactgtcagccaccgatcgcgccgatctcatcgagacaatgatctccgacgtgacgaaggcggttgatgatgccatcggatttgttcagtccgatggcgcgaccgctgccgaagaaaacggggactctgaaaatgcggaggaggaagaatcggaaaaggacgagtccgctatgcaagaagtggtcgaggcggcggatgaaacgggggagtatgacgaagaaacggaattcgttgacccctcagcggacaaattgctcgacaggctcctctattggggtgtgctgccgcgctatgcgtttccgaccgacgtggcaccgttctatgtgttcaatccggctttatcaacgccgttccggcccaagatggagttcgcaccctctcagggtttaaatatcgctctgtctcaatatgctcccaacaagcaaatctggatcaagggaaagcaatacacttcgaaggcgatctattcgccgtatcgcaaagaacgtaaggatgcctggggacgccgaaaattgtattttgaatgcagtcggtgcggtcacgcaagaacggaggaatactctgatgagcgccggaacgccgtcatccaatgcgaagcctgccgttcacccgcaacgttcggcccagcgaaaccatggttccgcccgcccggctttgcccatcccatcgacaaaccgcccgtgacgacgccggacgcaccaaacgaaacggcctatgcgacccgggcaaaactcgtcatgccgacgccggcccccgacaccggctggattcaggctgggccgcgcatccgggcctttccaacccgaaagcatctcctcgtgtcgaactcaggccccgacggagacggttacaactactgcgtcctctgtgggaggatcgagacggcggttgatccagaagtcatcctgcaacaaccacattcccgcccctatccgtcggacgaagacggcccgtgcccgggcagggtctcgccacgcgtcgtgctgggaaccgattttcggaccgacattgcgctcttttcacttcccatagacgatcccttctgcgtgtttccgggaaacgacgaaacagcgtcagcgttacgaacggtctgcgaggcgcttgccaaggcggcatgccgccttcttgaaatagagtctggcgaaatcctcgctgaatatcgtcccgcccttaccgacgcaggcgcaatcgggcgtgaggccgagatatttgtctacgacacgttggcgggcggcgcaggcttttccccacaactcgcggcgcggggagaaaaactgttcaccgaggcactcgacatcctggaatcttgtcctgcggaatgcgatgcctcctgctatcgctgcttgcgtaacttcaggaacaagatcgaacaccgacttttggaccgaaagctcggtcagcaattgcttcgccatgcaatgtatggcggataccagccttacccccctgaccggatgcagtcgtccaatgacatcctggctgatgatctggcccgccagttcccgaatttcagggttgaaaaaaatgccccccgccgcgtgggaaacacggaccttacggtggatatcgttatgacgaacgcccggggagcagagacatggatagccttgagttcgccggtcgcccctgacgtcgccgccaccgccgaacttcgtgagctagcggaggaacaagttcaacctatcgtgtatgtcgacgatctgctggttcgtcgtaaccttccggccgcagtcgagattgtgcggcagatgctccaatag

SEQ ID NO: 27203 - DNA, 1257 bp, Blastochloris viridis; identical to SEQ ID NO: 27200

SEQ ID NO: 27204 - DNA, 1083 bp, Blastochloris viridis; identical to SEQ ID NO: 27201

SEQ ID NO: 27205 - DNA, 5565 bp, Blastochloris viridis; identical to SEQ ID NO: 27202

SEQ ID NO: 27206 - DNA, 1203 bp, Burkholderia pseudomallei
atgaagacggggttggtcatatccttgccggggaacgaagcgcggctcaagcggaaggtacgagcccatttcaaacgtctgggctttttgaaggctcccgacggcacgctgatgccgcccaacctcgacaagcagagctatcgcgacatgcatgcgcatcagcgtgactctcggcttaacgacaaccgtgcatggatcgctaaccggtctgcgcgcctgatccagcacttcgcgtccggagcggagcttgacgtcgagcgcatccgtccccgcatcgaggtcgttcgctcgggcacttggcagggcgatctgtttcgattcgcgacctatttttggagaataccgatctcggagggctacggtcgccgcatgcgcttcttggtgtgggatgagcatcacgagaaggtgatgggactgttcgcgttgggggacgcggtattcaacctgcgtgccagagacgaattcatcggctgggaccaccatcggcgagcggatgcgatggtgaacctcatggatgcctacgcgctcggggctgtgccgccgtacaacatgttgcttggaggaaagctggtcgcgtcactcattcgcagccaggatgttgtggataccttccaggcgaagtatcacgagtcggtcggggtgatctcagggcaaagcaagcacgccaaacttgtcgcggtcaccacgacatcggcgctcgggcgctcgtccttgtacaaccgcctaaagattggcggacagtcgattttcgagccgatcggctcgacttcggggtgggggcatttccacatttccgacgaactgttcagcgacttgcgggactatcttcgatcattggaccatcactatgccgactcgcacggttacggacaggggcccaattatcggcttcggttgatacgcaaggctctcggattgttgggccttgatccagatatggcgaggcacggtcttatgcgagaagtattcttctgttcgcttgcgagcaacgcgcttcagtttcttcgaggtgagcacaagcgagcaaggtacggccatctgccgacggtcgcgcagatgggagaggccgccaagctgcgctgggttatccctcgggcggagcgaatgcccgagtttcgcacttggcgtagcgaacagtttctccgagagctcgatggcacggcggggcgcatgcagcgcagacggcttgaacaggtcggatag

SEQ ID NO: 27207 - DNA, 1518 bp, Burkholderia pseudomallei
atgtcggggttcggtttaacgtgcccgtcctgcggtgaacccgtgcgtcgacgggcgggtgcagaacgtcggccgcatttcgcgcattacagccatcgcgctaagcccgagtgcgacaactattttccgtcgcagggccgccttgtggcgacagggccgggatctggcgtcaggctacctccaagccgatggaagagggagtcgttggggtgcgggctctttctgaccgccgaaccggggcaaacctcgctgacgctgtggctgcggatcccgcccatggaacctgaaacgacctccgcggggcgccttgagcttcaatcgggactaggacaccgtacttaccatcttgccgacctttccgttgctcgtctcgttcctatggcgccgcaagtcccattggcagtggtcgccggggtcggaagcatgctacccgttgccgctcatatcgcgacgcagatcagagcgtttgtcgcaggtcgcaactttttctacgctgaagagaaggggggccggttcgtctttagcgatgaaccattggaattggggtgccagtatcgactcctctcgatagatgacgtggtgccaccgctggacctcggcgctgcgctggattggagaccggagggcaagttcggaagctggaacatctacgcaatggcactgccttcgtccttcgtcgttggtgcacagcggaatttgctccgggaaattgctgaatttcttggtcgcggcatccgcagcaggcgtccgcgagtttatgttgttgatcccttgccgcatcacgtcgaagtcgatggaacgtgcatctatccggagttgccaacgtcacttctgctacgcagaacgggtatttgcgctgtggacgtaacagcgtcgggcggcatggcggtagctcgcgtcatcgaacagagcgatgaatgggtacgactcgaagaattcaggccgggtgagcaggagttcacggtagcggtggacggcgacgagcagatgatcattcgtaccgagcactgcgcgctatttcggcctggtggcatcgcgattagcaccgacgaggtgacatgggacttgtgcaccgatccgccgctagctggatcagagctcttgcggcacgagctcacgatcgattgcgaaaacgatcggatcgccacgcacctcgccagccttaacgacggctggcttcttgagaagacacgactgttatcgccggctggctcgccgaaaaacttatacgcaggcggctttggtgaacttcgagggatggtccagactccgcagcaagagccagagaagcagggtgagaagaatgccgcaatcaagcagctaggcggcgcgctgaactggctcgagcaccttgtggcccgtagtttcggcgctgatggagcacgccgtgtgaagagctacttagcggaccccacccctgcaaacttacgccggctcggccccattatgacgagtcgtctgatgccatacatccgggcagcacagcatcaacagcaggaacggactgagggaaactga

SEQ ID NO: 27208 - DNA, 2565 bp, Burkholderia pseudomallei
atgacgtatgagggaatcgatagaaggcggttcatccaattgctcgaatggggtgctgccgacgacgaactgcggcggttcttcgccgactgccgtattcaactgattcagaggggcgcccgggtacagaatcctcctcgcggtaagcccgctcgtgtccgcatgctggcgcaggggctgcctccggcgaccgatcgaatagtccaaaggtggtttaacgagcacttgacgatgctcgatccgaagcctgctagcgatctggtggcggaactgcggctttacgaggagatgggtgagagcccaccggaggacgaggcgaagcgactggctcgctcttgccttgtacatctgttttccagcgacccacctgctgatctagtttcatttctgcgccctgcgcaagcaggaaatgccgccgaaccttccaaagtgcaggccgaagccgtgaacgggcagaattccgatgcatttccggtggccctcggccaggcgctcgtggcgttggctgaagggcgcgatccagacgagtacctgtcgtccttatcgtctacagctgcgtcgtttgtggggggattgcaggcagtgcgtagcgggcgcgatgacgaggcgaagatcgcgctggaggcgctggatcacgaaccggaagtgcgcgcattgctgctcgagtacgcagtcaggagtgcgtccgcgcgtacaggtaacacagttcgtgggctgcagatgctgcgcttcgcgagtcccgatgaggccttcagcttcgatttcgaccgcgatgaagttctcgcggtttgtacgcgcgactacccagagacaacggtcttcttacatccgttcgccattcgtgctgcggacggatcatggattgacttgtccaacgacaccgattgccagaagctcttttacacttccggtgatctcatcgccttcccagggcgagatactccgcggcaaccgaagcgtggggagatcggcatctggcgagtggccgagaacaagggggcgaacacgggtcatcgcacaaactttcatatcgcatcggagatgactccggtctacgaagtgcgcgatgtgccattcccgtcgaccgactacgactccgttcgggagtacatcaagcatcaattcgagcagggcgaggtgctccttgccacgaaaccgctatttgtcttgcgcgaccaattggtggtcggttgtcccccgggcaaggacttatcgagagacgaaggtttcgaatccggtctgccatgttggcaaacgctttccgcctgtcgatttgagggccgcgtgcttgttcctggccccttgccacctccggggacgtacgaatgtgaagcgctgggaaccagtctgcggaagctcttcgccaagggagaatggggcacagacaagccgacgaaggctctagcaaggaagctgcaagaattgatcgcgtccggggagccgggactcagctctgcgcgtgtcgctcggctgcgtgcagagctgtccttcattgaccagcatgaaggtgccatggacgctttgctcgaagagatcatgcgtgatccgtcaatcagcgcgcgagtcgatgagcaggttaatgcccgggtagaagccctcgtcgagcagcaggagcaactcaaaaatagtgtccagcaactggagcagaagaagcgcgatttgcaggagcagcagcgtaaagccgaaagggatcaaaaggccgttgcgccagcgatcgcgagggcgattcgcgaagccttcgacaaggcgcgcagtgacgccttggggacacttgggcaagttgcagtgttcaaggcgctgatagacgaactgatcgagaggccagcagcaccgggaggaggtgctgggccagcccatccggatccgacttatgcgggtttccgtcccgcagcgtctgtagttcgtttacctcatggtgggcctttgccagtcatcgaaacattgcgagcactcggcgtgaccccaaagtccgcacgcgcgattgaacttgtcggtcagatggcgcatcaatgtgggctgatactcatcatcgatggtctcgctgggcggcttgctgcggagctatggctgagcgggaatgagacctctggcaaggtattcgaatgcggctttggggaggttgaggatcaccaaattcggagcatcgttgccgatgctccagagaccttggcaattttggacgcgaatctctctcccttggatctgtatgcaagaccgttgatcgacgcggtgcaacggcgattggcggggatagacggaggaacatttgctacaaggattctgatgtcggtgtccgacgatacggcatcgcttcctatgccggcgacggtagagtccctttcgttgcgcgtgtcattggaccgtattcccatgttcgctcaagacaacgaggtcgcaagacaactggaagagattgattcgaccgatacgtctgctgggtggtttgcccggatttggaagccggcacggccgcgagtgctaagtcatctgcgctcggtgccaattgaggacgtggcgttcatttttgcggcgctcgaagccgctgagattaaggggacagactaa

SEQ ID NO: 27209 - DNA, 783 bp, Burkholderia pseudomallei
atggccgacgcgcttgggaccatgcagtttctgcgtgaggcggagtcgctcggcgggggatactggattcctactcctgtgcgcactgttgatcttggcttcggtcgctgcctcttggtggggccgcagccgacttccgagctgcagcgacactttgccggcgtgcgccgagcaggtgccggccgcgtgacggatcgtgccgccgtgccggacttgcctagtcagtcgcaggacgcttggcggggcagcgacggaagcgatgcctgcacgtggacgcagtccgccgttgattcggcgttgaaacagttggcgtcgtcgctagttcccgacagtctgcaggtcttcggtacccggatcgcgagcgggcggcgtcgcgaacctgcatgggtaaagccggggagcagtgccgcgtgtgaatggcatggcattggcctcttccgcgctccgacgggggctacacgctatcgctatttctttggaaagtacggggccggcaagcaatttctggaaggaccgccagttcaggatgcggcgcgtttgcagttcgggttcgcggctttgcagcgtcagccgatgaccgcgacgattacggcggtgtccggcacaacgtcgatttctctgcctctggctccgccccgaaacgtgaggcgcctgctggtggcgctctgcgatgcccatcccagatcgtttgggcgcgtttggacttgccgcgagccggtcaatttgccggttcttctgggagcgatacaagaactcaaatgcgaaattgcacaccatgagtga

SEQ ID NO: 27210 - DNA, 5259 bp, Burkholderia pseudomallei
atgagtgaaccgaaaatctactccgcgcgcgccgtcttcgaagggatgaaggggacgttgcatcggtatcttgaagcgcagtaccacatctgggatgaggggttgatcgaggcgcgcaagcgacttctggagtccgagggcgtcacgtttcaggagccccgtatcgaggcgacaccgttctacgccacgggtagcacgtactcccagatgcagatcccagcggcggccagggcggtgctcgaactcgcagccaaacacgccggaacgggcattcccgaacggccctacaaacatcaggcggatgcgctcgaatcgttccttggtcgcggtgaggaaatcatcgtcgccaccggcaccgggtccggcaagactgagtgcttcctcatgccgattctgggatcgctggcagccgagtcttccgagcgaccggaatcgtggctgaatccggggtgccgggcgttgctgctctatccgatgaatgcattggtcaacgatcaactctctcggctgcggcggctgatgggtcaacgagacgttgccgagtacattcgcggccggcggctagggcgggcgacgttcgggatgtacacgagccgaacaccgtatcccggagtcacgagcagagcgcgcgatcaatcgcgtctccggccacttgtgcaacatgcatatcttgaccttccgccggatgccaaggagcggcttgatcgggaaggtaagtggccgaccaaggatcttgatggcttcattgcctcctcctttgtgacgggcgccaacgactcggaaatgctgtcgcgcggcgagatgcaggctcgctgccccgacctgcttatcaccaactattcgatgctggagtacatgctgctgcggccgatcgagcggagcatctttaatcagacggcggcgtggctggcagccgacaaatcgaattatttcaccgttgtgctcgacgaggcccacatgtatcgcggctcgggcggcgccgaggtcgcgtatctcctgcggcggcttcatgcgcgcctcggcgtcggccgcgaccgagtgcggtatatcctgaccagcgcaagccttggcaagtcgcccgaggcggtcgcgcggatgaagtctttcgccgcggacctgagcggtcttggtgctagtcagcgggagttcacgcttatccggggcgagcagttaaagaaatcaggggaacggcctgctactcgagaagaggcggccgccttggcacgatttgatatcgcagcgctactcgattccgcgatcaacccgggcaaagcgatacaagggttcgcctcgctgctagaagcgctgggccaagaagcaatgaaggctgcgggagacgagcagacagcgcttcagcacaccgtctacaaatggctcgagtcgtttgggccggcatcacttgttgcaaatttggtgacggcacatccgcaaaagctaggggccgttgcggccttggcctttcccggagcacccgatgccgaggcagccatggaggcaacgctggcgctcatgtcgttcgcaaaagagcgggatagcggacgagtgttcgcgcctgtgcgctcgcacctgttcttccgtggcatcgcaggcatctatgcctgcaccgatgcgagctgtagcgcgagagatccgtcgatttcctccgggccgctcggaaaactttattcggagccgatgctcaaatgcgagtgtggggcccgcgtctacgaagtgctgacgcatcgcgattgcggcgcggcgttcattcgaggatacattcaggatcagttcggaatgttcctttggcatcagccgtctagtggtctgtggggaaccggcgggttgatggaagcgcatttcctcgtggaggttgagcgccgcgccgccgggacgcatggacgaatggagggcgctcacgtgtggctgcataaggcaaccgggaggctagtcctggcgccgccagccgaagcggagcgcggccaatacctcgcgttacttcggcccgacggggcggtgccgatttcaggacagcgggcattgtcattcaattgtgaatgtcccgtttgcacgcgccgctggcgagctggatcgaccaagatcatggacttggcgacgaaaggcgaagcaccgttcgcgcagttggtccgcacgcaggttgagctacagccaatcacgcatccgaaaacggacagttcccccaacggcggacgcaagtcgcttctgttctcggacgggcggcagaaggcggcgcggctggcgagagacattccgcgcgagatcgagaatgatgtattccggcagttgctactcctcgctgcgagggaactgcgcggactcgggcgcgaggccacactgggcgaccacatctacgttgcgttgttgcatgtactcgcaaagaatgctctgttgttgttcgacggtgccgaccgggaacgactgcagcgagatgtgcttgatcatcgccgccactatctcggcgagctccgagatgcgctcgatgagtcaccgcctgccaagccaccacgtttctcttcgctcctattgcggcatctgggttcgcccttttactcactgagcgcgctgacgctggcacacgtcgttcctatcgcacgtgtgcgtcgacagatcgttgccgcccttcctggaatggacgaagcacatctgcgcgccgtgtggacagcatggattcaaagcttcgcaagtgattttgccgtggatgcggatctcccacagggcgtcagatctcaggcagcgggctatcccgtcggcggagggctagaccggaatggcggcttctcggcgaggcagcaggcttttttgcgcgctcgcgtgccggaactggaccggattttcgatacgttgaccgcgttgctttgccaggcgcggccgggaagtccgggattcttcatcgtccctcggtttctcgccttggaactggcatcggaccaacacgactggtatcaatgcgggcagtgcgccaccgtgtcgccggtggagtggtggggccactgtcccaactgtctggcgggagaggtgaccgccgttcgccccggggccacgcaatacttgcgcgcgcgcaaggcgttcttccgagatccggttaacgagattttggaggggaaggcgagcccattcaacttgtcagtggaggagcacacggcccagctctcctatcgggacgtggacgattccacgacgacgatcgaagaattcgagcgccgcttccgggacatcctggtcgaacgcaacgacacgtcgattgacgttctcagcagcacgacgacgatggaggtcggcatagacattggttccctgatcgcggtggggctgcgaaatgtgccgccgctgcgacagaactaccaacagcgtgccggacgtgccgggcgaagaggttcggccgtttctaccgtcgtgacttacgcgcagaacagtcctcacgacaaccactactttggtaatcccgagccgatcatttccggcgagcccaccctgccaggcgtggataccgcaaatcccaagatcgttgagcggcacatccgcgcgcagcttatccaggcgtacttccattcgcaaccgttgaactcggcgagcggggacgtgttttcggtgctgggagagacgatggatttctacactgggacgggcccgttcagcctgtcttcgttcaacgattggctttccggttcgcaagcggtacaagcgtgctacacggcaatgaggcagtggttgccggcgtcgttcaggaagtcgccctcagacgtggcgaccgaattcgtcgcgcggctggagcaggtgcggccgagggccgcacacgaactagacccggcagatgagaggttgatcgagttcctgtttgacaggggcttcttgccttcatacgccttcccgcgcgatctgtgtgcactgcaaatcgaagggttggagagacgcggcaatttcacgcagccgaagattgttcagcgtcctcagcaagggctgaatgttgcgttgtctgagtacgcgccgggccgtctcgtcgtcgtagataagaagacctaccgcgtaggaactgttgctgccgatggttcgacggccgtcgtcgatcgagcccagcggctgttcgatgagcgccgctactatgttcattgcccggagtgcgaatacacctccgggttcaagattgcggcgccggtaggcgagcagtgtccactgtgccgtacagccgtgctgcaggcgacgtcggtgatcgaaccgcaggtcgtcttccccgagggccgaggcgaggtcgatgagttcgacgatgagcagaccttcactaacgcaactagcgcacagttatccgtgccggcggaaagctctgcgtttgacttgcggaaacttggcgttcactgcgagataggattcgcgcgcactcaacagctcgtgatggttaacaaaggggaagaggatgccggtcagtatgtcggtttcttgatctgcaatcggtgcggaaaggcggcgtccgatccgcagcgcgtcggaccgcatgagcgagactactacctttccacgcgagcgcctgggcgttgcacgggccagttcgagcaggtatatctcggttacggcttcgcatccgacgtgctgatcgtgcggcttccaatgtcgccaccgctccgtttcgaccctgtgcgaacgaccgaacgcgagcccatctctaatgcgctgcaatcgcttgccgaggcgttcgtactgggcataagccaggaactggacatcgatatccgcgaaatcaacgcaggcttccggttcgtccgcgttggcgaaaaacacttcgccgacatcttcgtgtacgacacgctgtccggcggtgccggctatgcgacgcaggcagcggaactctttgaagcagtcatggcaaacgccgaggcgctgctgagccggtgcacgtgctcggcctcatgcgacaagtgcctgcgtcactatgggaaccgcttccatcacgcaatactggatcgacatttggcgcttgacctgctgcgctatgcgcgcgacggctacgtaccggtggcgccatcccatgatgaacagcgggttacactgcagcccctgaaggacatgatgctgctcgccggctggtctcaagatccgtcagttgcggcgccctatgtcgtcgagcatcaggggcggcgggtgcagcttttctcgcttccttcgttggttgatccagtgcactacggctttcaaccaacatccaaccgttttgcgttctcagcgtttgaacttgcgcgcgatctgcccggcgcttttggagaggtcgcatga

SEQ ID NO: 27211 - DNA, 1218 bp, Burkholderia pseudomallei MSHR4299
atgagcataaagccggcaagcaaagcgttttcgattgaggggcgtattaagcgccgtctgagagcacacctttcagacctaggcttccagcgagcagatgatgggtcactagtccttccggacgctggtaaagacacagttagagctctgcatcgccagcaacgactcgaaattcttgctcggaacgcatgctttcttgacgctcatatgcccgccctgcagagctattttgcctctggcgaggaagttgtcgtagacaagataaagccagttttgcaaaggattagcgcagacacgtgggagtcgaacctgttccgtcttgcgtcgctgacttggtcggtcccggtatcggcaggcttcggtcgtcgcatgcggtacctagtttgggacgagtttaatggaaagctcatcggcattgcggccattggcgaccccgtgtacaacttgtccgtccgtgacaatttaatcgagtggtcggtagcggatagagccgaaagacttgtatgcctcatggatgcatacgtattaggggcggttccaccctacaacgcgttgcttggcggaaagcttgttgcgtcgctcctgcggacacgcgacgtgtatgacgacttcaagagcagttacggtggcacaacgggcatcatatccggaaggcacaaacaagcacgtctgttggccatcacaacctcatcatcaatggggcgctcgtcggtttacaaccgactgaagctcaacggcacaacctacttccggccaatcggttataccggcgggtgggggcatttccacatccccgacgacttgttcgaggagatgcgtgactatctccggagcatgcaacatgactacgcggactttcatgcattcggccaaggaccaaactggcgacttcgcaccataagagcggcgctgaatgcattgggttttaagcaggacatgttgaagcatggaatacagcgagaagtcttcttatgcgaaatggctcaaaatagtttgcagatactcgcaggagaacagaagcgtccgaatttgaggacgcttctgacagccgaagaagtcggacaagcagccatcgagcgttggatggtcgggcgagctcagcgtatgccggagtttaggcaatggcgcaacgacgacttgctgagtgttattcatgcggtgactcactgtgactacgtgaaatctacctcgactagtttgaaggcacgacgtaagtga

SEQ ID NO: 27212 - DNA, 1080 bp, Burkholderia pseudomallei MSHR4299
atgattattcagctagggagggatgacgtcattcgaacagcaagagagaatgtgggattgcctttggctctgggcgaggctgtgcacattgatgaagagtttcttgccgcctgtctgcgccgaattgctggattccattgtccgtgttcgccattgacgcttcgcactatgctagcggaaagcttgagtgcgttggttgcggatgaaacagccctcgcggccaacatcgaccgtgccatcgaatgtacgtacgtcacgggtgacttactcgagctctcgcaagttgctgtagcggacaatacgacccctagtacgtgggtattcgcggcgccaccatcattcgtgtcccgtgcgcgaggagtatttcacatcttcggactgggaacggaggagccgacacctttgccactggcgttgaaggcgcgtctccgactgttcggcgctaatcgattgcttgacgcggaaccggacgaagatattcgttcaatactactcgacgccggctttcaagaacaatcaatcgaagtttggttgaagctaccgaagaaggagagccctcaagaatacctctgtcgtaccgaggctcttcttaccggaaaggcacaatgcggtgagctcgaacaattgcgtatctttgacgctgacgagcgaggcggctcctacacgaggaggtgggtacggcctacccgtcaaaccggtcgattcgtgtgccggcgagcccaggcgtatggggcggacctttggggatacgttgagctttcagtcgggcaacctatcaagcttctcgacctgccaatgaccagcagccgttacagagggtgcgacgagggctggcgcttgcagatggccatcgatgccgcgtcgggccgccctcaacaatatcgagtgcgccgattcgatgacagcatcgcgctggcatttgaccgtccaataccgatgtgggcaactcgacggcttgaaaccgtgggaagacaagtcgttgatagcggggcgctgctggaatatatggtgccgccgcaatttgcggaagaggaaagaaagtatttggaagagacattaggactcgtttcgacatcttag

SEQ ID NO: 27213 - DNA, 5571 bp, Burkholderia pseudomallei MSHR4299
atggcggatacgattcaacagtccatagagcagctccacgcggcgctgcgcgactatatcgaagcaacgtatcacatcagtcatccagcactaatagcccaaaggcgggcgctgttagaccagccgggggtcatccggcaaatcccatatctcgaatcaactccgcgataccaaagcggcagcagcttcagctctatccacggactctcgtcgggggccgtgagcgtattaactgccctttcggaggccacaaagtccgagccacaaatcttgcacaacccgccttatgtgcatcaaagcgaagcgttaaggctgtccttggtcgaaggaaagaacttggtcgtcgtgacagggacaggctctggtaagaccgaatcattcctgatgccaatactcgccaaattggcgacggaggcaagcgaaagaccacagtctttcggtaattatagtgcaatgcgcgcgatgattctctacccgatgaacgcactcgtgaatgaccagttgggccggctacgttcaatctttagcgatagtcgagtagtcgagttgttctctaagtggagcgggcgccctccacgattcgctcgttacacgagcaggacaccatacgccggtattcgcacaccgaaacgagaccaaagaaagctgaagtcgttcgagtccttcttcgtggaagctgaacgtctggcccatggcgcggtatcggatgagcaagtaagagctgcgcaattatgctctgacctgaaggctaagggcaagtggccggcaaaacctagtctagcaagttggtttggtgataagggcgaacggtgggtcgataaagaagggaattttaaaagagcggtgacgttaccaaacgactccgagctaattactcgccacgaggtccaagccacgccgccggaccttctagtaaccaactattcgatgcttgagtatatgctcatgcgtccaatcgaacgcagtatcttcgacaggacgagcgaatggctcagagcaaatcccaacgaaaagttcttggtagtactcgatgaggcccatctgtacagaggagccgccggagcggaggtcgggttacttcttcgccggctgcgagaccgactcgatatagacgaaagccggtttcaaatcatctgcgcgaccgcaagtttcacagacaaaaactacgcgccggagtttggttctcagctttccggcattgcgaaggatagcttcgttgcggtcacaggaacactgagattagcggaggtcgataagcctggcagtgttgaagatgcccggtccctcgcgtcagtgcagctttccgactactactcgagtgtggaagaaactcgtaagcgtgcggttcgggaatttcttctttaccgcaacgttgagcctacggatgacgtagtagtcgacctgtataaagctctaaaggacttcggccccctaggacgcctaataaacgccacaatgcgagaggcattagccgtcgtcgaacttgtcgacatagtctttccaggcgtaagcgaagaactcgcgaacgcggcattgacatcactgatgagtatcgccagtgtcgctagggaaaaccaagatggcacttcgttactcccctctcgcatacataatttcttccggggcttacctggattgtgggtatgcaccaatcctgactgcagcgagattgtcgacccgagccaccagagtcgggtttgcgggcgcctctacagtcagccgcgacaacgttgcgggtgtggttcacaagtgctggagctgtttacgtgccgcaattgcggggccgcgtatggacgagcctacgccgatgttgttgaggaaccgcaggcgctatggaatgacccagggaagccgctacggatggaaagcggcgaggtgtcggcattgaatccgctggaccttctccttgaagagcctcgacaactcgacaacgtcgagccagcttcgtacgacatggatactggtcgcatgaacccccctgttctgtctgaccgtgcccggcaggtgttcataagaaaggaccgcctacaaggcgtgacgaacgaagatggcgaacgggatgaccggctcgaagcccggggtctgttcattccctgcggtgtatgtggcacgactgctgcatttgggcggacaagtgttcaggaccatcaaaccaaaggggaccagccgttccagtcacttgtgtcaaagcagattcagattcaacctccaaattcgaaacccgccacggcctttgcgcctctaagaggccgaaaagtgcttgtcttctcggactctcgccaggttgctgcgaggcttgcgccgaacctgcagatgtattcgactcgcgactctttgcggccattggtcatgtgggggtttgaaaaactcaagacctttgcgccaatccggccaaagttaagtctcgatgacctgtatctatcggtactcctggctgcaaacgtcatggacatcaggcttagacctgaaatgtcatcgggtgagtctatggctgcaaagtcgacggtagatgctgctatacgcgaccaagacctcttcgatgacccaggggcgatgcagtcactgtgggtggagctaaaaggcgaacgaccaccggccgcactactagatgacatttataagacggtcacggataggcatttgggactggaagcactcgccttggcatcaatcgctgttcgcgaagacaaacaagcaattgttggcgcactgccctcgattccaggagtggccgagtgcctcgatgataaggtaatgctggttgaggcttggcttcgctgttggcatcggcgaggattttggttgaattccatgccagacgcgtggtggcttcgaagccatccaagcgggactaatattcgagggcaaaagtcgaagttcaaagcaatgaacagggtgctgcccgacgcgagttcgcgaaggctcttcgacagtaaatggttgccttccttgctagccgaattcacttccgagcaaggcggaggtttgagacggctagaaggtaagagtctaaccctcagactagacggcgcttgggtgcgctgcagtgcttgcaaatccgtgcatcggcctgtgtctacgctcaagcactgtctcgactgtggaagctcggacatcatagaactgaagccagatagtgacattgtatttaaagcgcgcaaggggtattaccgagaccgagtgatggcagcgttcgccactcctcccctttatccgcaggcattgattgctgctgaacacacggctcaattgaacgcgcctcaaagtgaggatgtcttttcaaaggcggaagagaacgaactactctttcaggacgttgaaatatcattgccgggagaaaagtcgaatcgcaccgctatcgatgtactttctagcacaacgaccatggaggtgggcattgatatcggcgcgttgaccggcgttgcgctcaggaacatgcctccagcacggtccaactatcagcaacgcgcagggcgagccggccgcagaggtaacgcagtcgcgactgtcatcgcgttcggcagttccgacagtcacgatgagcattacttctcgaatgccaaagagatgatacgtggagctgtcgttgacccggccctaacactcgacaatccagagctagccaaaagacatatccgcgcttatcttctccaggcatatcatcgagaccgcatcccagaatttgacgcggggagcccttctaatctcttctcagtgcttggaacggtcgcggcgtttaggtcaagcacgggtagactcaatcgagacgacttcgaagcttggctgttacaaaacgaatcgttgctacgcgcgaggatagagcagtggcttccgaccgagctcgcttctgcagactcggagaaacttctcgatgagatggttgcggactgtctagacgctgtcgacggggcaatcaatatcgacggtgatgcagttaaagcgacaaaggacgtccacgcgtcggaagatgacgaggaattggaaatgcctgcagaggcgggggatgagtcgcctgcacaaatcgacgccgaagacaaactgctagaccgattgctctattgcggcgtattgccacgatatgcgtttccgacggatgtggcgaccttttcggttttcgatagagagaagtcaacaagcttcaagcacgtaatgaggtttgcgccgtctcagagcctgcctgtcgcattgactcaatacgctccaggtaagcaggtttggatttcagggaaatgttatacctctggtgccatctactcaccaataatttcggagcgcttcgaggcattcaagaaacgcaggctataccgtgagtgtgacaggtgcggtttcgcagacacaaagccgttcggcgcaggtgttgagcgaggtgccatctctgactgtccagcttgcggcggtcacgagagttttggcccagcgagacaatggctacggccgccgggattcgcacacccggtctttgagcaggaggtaacttcacccgacgacatcccaccgacgagttacgcgacgcgcgctaagctcacgatggtgacgcctgccgacactgcggactgggaacgcatcaatcctcggctgcgggtcatgacctcccggcagcatctcttggtttcaaacactggtccgaaaaaattaggttacacgcattgcgtcgcatgtggctgcatagaagccgatgttacgcccgagccgaagctgttcatgccacatctcaagccgtatccagataatgagtcaacgtgcccaggagactatgcacataagcacttggtgctcggcacggactttatttcagatgtggcattgttctcgcttcgagtcgaatatccgatgattctgcggccgggcacttacccgacttcagtcgcactgagaacggtcagcgaggcgctcgcaaaggccgcgtgccagctcctcgatatcgaaccgtccgaaatcatggctgagtatcggcccgcattaacaaaagactccgcaggaagggacggtctgcaagctgagatatttctctatgacacacttcctggtggtgctggcttttccactcaggcggcacggcttggcggcgctttattcgagcgtacgatgcagatgctgactgaatgtccagagaagtgtgattcttcttgctatcgctgcctgcgcagctttaagaacaagattgagcaccatctgctggaccgacatatcggctcggaacttatcgactatctactgacagggaggattcccgagttcaacgctcaacggattgcagcttcagcgcatcttcttatggcggacttgcgacgtcagcactcggacggtattcagtttgagggcgacgttaccatagaactccccggtggcggcaatgcccacatccctatcctttgcagcacgacggatggtcgaagggtggctgtattcatatccgcaccactcaccgaggacgatgtggaggtaaattcgacggctaaacgcgtggccgaagagttgagcttgtcggtcgtatttgtgaatgaactgctggtgagggaaaatcttcctgcagcgacagccattgtgcagtccgaactcgggcagccatag

SEQ ID NO: 27214 - DNA, 1203 bp, Burkholderia pseudomallei Pasteur 52237
atgaagacgggcttggtcatatcgttgccggggaatgaagcgcggctcaagcggaaggtacgagctcatttcaaacgtctcggctttttgaaggctcccgacggcacgctgatgccacccaacctcgacaaacagagctatcgcgacatgcatgcgcatcagcgcgactctcggcttaacgacaaccgtgcatgggtcgcggagcggtctgcgcgcctgatccagcacttcgcgtccggagcggagcttgatgtcgagcacatccgtccccgcatcgaggtcgttcgctccggcacttggcagggcgatctgtttcgattcgcgacctactattggagaataccgatctcggagggctacgggcgccgcatgcgattcctggtgtgggatgaccatcacgagaaggtgatgggactgttcgcattgggggacgcggtattcaacctgcgtgcccgcgacgaattcatcggctgggatcaccagcggcgagcggacgcgatggtgaacctcatggatgcctacgcactaggggccgtaccgccgtacaacatgttgcttggaggaaagttggttgcgtcactcattcgcagccaggatgttgtggatactttccgggcgaagtatcacgactccgtcggggtgatttcagggcaaagcaagcgggccaaacttgttgcggtcacaacgacatcggcgctcgggcgctcgtctttatacaaccgcctaaagatcagcggacaggcgattttcgagccgatcggctcgacttcgggttgggggcatttccacatttccgacgaactgttcgatgacttgcgggactatctccgatcagtggggcatcgctatgccgactcgcacggctacgggcagggccccaattatcggcttcggctgatacgcaaggcgctcggattgttgggccttaatccagatatggcgaggcacggccttacgcgagaagtgttcttctgttcgctcgcgagcaacgcgctccagtttcttcgaggtgagcacaagcgggcaaggtacgaccatctgccgacggtcgcgcagatgggagaggccgccaagctgcggtggattatccctcgggcggagcgaatgcccgagtttcgcacctggcgtagcgaacagtttctccaagagcttgatggcacgggcgtgcgcatgcagcgcagacggcttgaacaggtcggatag

SEQ ID NO: 27215 - DNA, 1572 bp, Burkholderia pseudomallei Pasteur 52237
gtggactgggctcgtgattacctaggcaacgatgtgccggcttggctgggcggcatgtcggggttcggtttaacgtgcccatcctgcggcgaacccgtgcgtcgacgggcgggtgcagaacgtcggccgcatttcgcgcattacagccaccgcgccaagcccgagtgcgagaactatttcccgtcccagggcagcctcatggcgacagggccggaggccggcgtcagggtacctcggagccggtggaagagggagtcgttgggttgcgggctttttctaaccgctgaaccggggcgaacttcgcagacgctgtggctgcgaatcccgcccatggatcctgaaacaatctctgcggggcgcctcgagcttcagtcgggactaggacaccgtacttacgatcttgccgacctttccgttgcgcgtctcgttcctatggcgccgcaagtcccattggcagtggtcgtcggggtcggaagcatgctaccggttgccgcgcatatcgcgaggcagatcggtgcgtttgtcgcagatcgcaactttttctacgccgaagagaaggggggcaggttcgtttttagcgatgaaccgttggaattggggtgccggtatcgactcctctcgatagatgacgtggtgccaccgctggatcttggcgcggcgctgaactggaggccggagggcaagttcggaggctggaatagctacgcaatggcactgccttcgtccttcttcgttggtgcacagcggaatttgctccgggaaattgccgaatttctcggccgcggcattcgtagcagccgtccgcgaatttatgttgttgatcccttgccgcatcacgtcgaagtcgatggaacgtgtatctatccggagtttccggagtcacttctgctgcgcagaacgggtatttgcactgtggacgtaacagcgtcgggcggcacgccagtacctcgcgtcatcgaacaaagcgatgaatgggtacgactcgaagagttcggcccgggcgagcaggagttcaccgtagcggtagacggcgacgagcagatgatcattcgtaccgaggactgcccgctgtttcggcccggtggcatcgctattagcaccgacgacgtgacatgggacctgtgcaccgatccgccgctagctggatcagaactcttgcggcacgaggtcactatcgactgcggaaacgatcggattgccatgcatatcgcccacctcaacgatggctgggtgcttgagaagacgcaactgtcatcgccggctggctcgccgaaaaacttatttgcaggcggcttcggcgaacttcgagcgattgtccagacttcgctgcaagagccagaggagcgggttggcgagagtgccgcaatccagcagctaggcgccgcgcggaactggcttgagcatatggtggcccgtagtttcggcgctgacggagcacgccgtgtaaggagctacctagccgaccccacccctgcaaacttgcgccggctcggccccatcatggcgagccgtctgatgccatatatccgggcagcacagcatcaacaccaggaatggactgagggaaactga

SEQ ID NO: 27216 - DNA, 2577 bp, Burkholderia pseudomallei Pasteur 52237
atgacgtatgcgggaatcgataggaggcggttcatccaattgctcgaatggggtgctgccgacgacgaactgcggcggttcttcgccgactgccgtgttcaactgattcagaagggcgcccgggtacagaatcctcctcgcggtaagtccactcgtgtccgcatgctggcgcaggggctgcctccggcgaccgatcgactggtccaacggtggtttaaagagcacctgacgatgcttgatccgaagcctgccagcgatctggtggcggaactgcggctgtacgaggagatgggtgagagcccaccggaggacgaggcgaagcgactggcccgctcttgccttgtacatctgttttccagcgatccacctgctgacctagtttcgtttctccgccctgcgcaagcaggaaatgccgccgaaccttccgacgcgaaggacgggcaggccggagacgtgaacgggcagagttccgatgcatttccggtagccctcggccaggcgctcgtggcgttggctgaaggacgcgatccagacgagtacctgtcgtcgttatcgtctaccactgcgtcgtttgtcgcgggattgcaggccgtgcgtagcgggcgcgatgacgaggcgaagatcgcgctggaggcactggatcacgagccggaagtgcgcgctttgctgctcgagtacgccgccaggagcgcgtcggcgcgtacaggtaacgcagcgcgtgggctgcagatgctgcgcttcgcgagtcccgacgaggcgttcagcttcgatttcgaccgcgatgaagttctcgcagtttgtacgcgagactacccagagacaacggtcttcttacatccgttcgccattcgtgctgcggacggatcatggattgacttgtccaacgacaccgattgccagaagctcttctactcttccggcgatctcatcgccttcccgggggggcgagatactccgcggcaaccgaggcgcggtgagatcggcatctggcgagtggccgagaacaagggggcgaacacgggtcaccgcacaaactttcacatcgcatcggagatgactccggtctacgaagtgcgcgatgtgccattcccgtcaaccgactacgactccgttcgggagtacatcaagcatcaattccagcagggcggggtgctccttgccacgaaaccgctatttgtcctgcgcgaccaattggtggtcggttgtcctccgggcaaggacttatcgagagacgaaggtttcgaagcgggtcttccatgttggcaaacgctttctgcctgtcgatttgagggccgcgtgcttgttcctggccccttgccaccttccgagacttacgaatgcgaagcgctgggaaccagtctgaggaagctcttcacaaagggaggatggggcgcagacaagccgacgaaggccctagcaaggaagctgcaagaattgatcgcatccggcgaactgggactcaactctgcgcgcgtcgctcggctgcgcgcagagctgtcctttatcgatcagcatgaaggtgccatggacgctttgcttgaagagatcatgcgtgatccgtcaatcagcgcgcgagtcgacgagcaggtgaatgcccgggtagaagccctcgtcgcgcagaaggagcaactcaaaaatagtgtccagcaactggagcagaagcagcgcgatttgcaggagcagcagcgcaaagctgagagggatcaaaaggccattgcgccggcggtcgcgaaggcgattcgcggagccttcgacaaggcgcgtggtgacgccttggggacacttgggcaggttgcagtgttcaaggcgctgatagacgaactgattgagaggccagccgcaccaggaggaggcgttgggccagcccagccggctccggcttatgcgggtttccgtaacgcagcatccgtagtccgttcacctcatggtgggcttttgccggtcgtcgaaacattgcgtgcactcggcgtgaccccaaagtacgcacgtgcgattgaactggtcggtcagatggcgcatcaatgcgggctgatactcatcatcgatggtctcgccggacgccttgctgcggaggtatggacgagcgggaacgagatgtctagcaaggtgttcgagtgcggatttggcgaggttgaggatcacgagattcgcagcatccttgctgatgctccggataccttggcaattttggacgcgaacctctctcccttggatctgtatgcgagaccgttgatcgtcgcggtgcaacggcgattggcggggatagacggaggaacatttgcgacaaggattctgatgtcggtgtccgacgataccgctgcgcttcctgtgccggcgacggtggagtccctttcgttgcgcgtgtcgttggaccgtattcccgtgttctctcaagacagcgaggttggaaggcagctcgaagaaattgattcgaccgatacgtctgctgggtggtttgcccggatttggaagccggcgcggccgcgagtgttaagtcatctgcgctcgataccaatggaggatgtggcgttcatttttgcggcgctcgaagtcgcagagttcgaggggagagactaa

SEQ ID NO: 27217 - DNA, 5364 bp, Burkholderia pseudomallei Pasteur 52237
atgccaatcccagatcgttcgggcgcgtctggacttgccgcgagccggtctatttgccggttctcctcggagcgatacaagacctcaaatgcgaaactgcacaccatgagtgaaccgaaaatctactccgcgcgcgccgtcttcgaagggatgaaggggacgttgcatcggtatcttgaagcgcagtaccacatctgggatgaggggttgatcgaggcgcgtaagcgactcctggaatccgagggcgtcacgtttcaggagccccgtatcgaggcgacaccgttctacgtcgcgggtagcacgtactcccaaatgcagattcctgcggcggccaaggcggtgcttgaactcgcggccaaacaggccggaacgggcattcccgaacggccctacaaacatcaggcggatgcgctcgaatcgttccttggtcgcggtgaggaagtcatcgtcgccaccggcaccggctccggcaagactgagtgcttcctcatgccgattctgggatcgctggcaaccgagtcttccgagcggccggaatcatggctgaatccaggctgccgggcgctgctgctctatccgatgaatgcattagtcaacgatcagctttcgcggctgcggcggctaatgggtcaacgagacgttgccgaatacattcgcggcaggcggccagggcgggcgacgttcgggatgtacacgagccgaacaccttatgcgggagtcacgagcagagcgcgtgaccaatcgcgtctccggccacttgtgcagcatgcatatcttgaccttccgccggatgccaaggagcggctcgatcgggaaggtaagtggccgaccaaggatcttgatggcttcatcgcctcctcctttgtgacgggcgccaacgactcggaaatgctgtcgcgcggcgagatgcagactcgctgccccgacctgcttatcaccaactattcgatgctcgagtacatgctgctgcggccgatcgagcggagcatctttaatcagacggcggcgtggctggcagccgacaaatcgaattatttcaccgtcgtgctcgacgaggcccacatgtatcgcggctcggggggcgccgaggtcgcgtatctcctgcggcggcttcatgcgcgcctcggcgtaggccgcgaccgagtgcggtatatcctgaccagcgcaagccttggcaagtcggccgaggcggtcgcgcggatgaagtctttcgccgcggacttgagcggtcttggtgctggtcagcgggagttcacgcttattcggggcgagcagttaaagaaatcaggggaaaggccggctactcgagaagaggcggccgccttggcgcgattcgatatcgctgcactacacgattccgcgatcaacccgggcaaggcgatacaagggttcgcctcgctgctagaagcgctgggcctagaagcgatgaatgttgcaggagccgagcaggtagcgcttcggcaggccgtctacgaatggctccagtcgtttgggccggcatcacttgttgcgaatttggtgacggcacatccgcagaagctacgggccgttgcggctttggcctttcccggagcgcccgatgccgaggcggccatggaggcaacgctggcgcttatgtcgttcgcaaaagagcgggatagcggacgagtgttcgcgcctgtccgctcgcatctgttcttccgcggcatcgcgggcatttatgcctgcaccgatgcgaactgcagtgctagagatccttcgattccttccgggccgctcggaaagctctattcggagccgatgctcaaatgcgagtgtggggcccgcgtctacgaagtgctgacacatcgcgattgcggcgcggcgttcattcgaggatacattcaggaccagttcggaatgttcctttggcatcagccgtctagtggtctgtggggaacgggcggattgatggaagcgcatttcctcgtcgaggtcgaccgccgcgccgccgggacgcatgggcgcatggagggcgctcaagtgtggctccacaaggccaccgggaggctggtcctgacacccccagccgaagcggagcttgggcaatacctcgcgctgcttcgtcccgacggggcggtgccgatttcaggacagcaggcgctgtcattcaattgtgaatgtcccgtttgcacgcgccgctggcgaactggatcgaccaagattatggacttggcgacgaagggcgaagcaccgttcgcgcagttggtccgcacgcaggtcgagctacagccgatcacgcatccgaaaacggacagttcccccaacggcggacgcaagtcgcttctgttctcagacgggcggcagaaggctgcacggctggcgagagacatcccgcgcgagatcgagaatgatgtattccggcagttgctactcctcgctgcgaaggaactgcgcggactcgggcgcgaggccacgctaggcgatcatatctacgttgccttgttgcatgtactcgcaaagaacgctctgctgttgttcgacggcgccgacagggaacgattgcagcgagatgtgcttgatcatcgccgccactatctcggcgagcttcgagatgcgctcgatgagtcaccgcctgccaagccaccacgcttctcctcgctcctcttgcggcatttgggttcgcccttttattcactgagcgcgctgacgctggcacacgtcgttcctatcgcacgtctgcgtcggcagatcgttgccgaccttcctggaatggacgaagcgcatctgcgtgcagtgtggacggcgtggattcaaagctttgcaagtgactttgccgtggatgcggacctgccacagggcgtcagatctcaggcagcgggctatcccatcggcggaggcttggaccggaatggcggcttctcggcgaggcagcaggcttttttgcgtgctcgcgtgccggaactggaccggattttcgatacgttgaccgcgttgctttgtcaggcgcggccgggaagtccgggattcttcatcgtccctcggtttctcgccttggaactggcatcggaccagcacgactggtatcaatgcgggcagtgcgccaccgtgtcgccggtggagtggtggggccactgtcccaactgtctggcgggagaggtgaccgccgttcgccccggggctacgcaatacttgcgcgcgcgcaaggcgttcttccgagatccggtcaatgagattttggaggggaaggcgagcccattcaacttgtcagtggaggaacacacggcccagctctcctatcgggacgtggacgattccacgacgacgatcgaagaattcgagcgccgcttccgggacatcttggtcgaacgcaacgacacgtcgattgacgtgctcagcagcacgacgacgatggaggtcggcatcgacattggttccctgatcgcggtggggctgcgaaatgtgccgccgctgcgacagaactaccagcagcgagccggacgtgccgggcgaagaggttcggccgtttctaccgtcgtgacttacgcgcagaacagtcctcacgacaaccactactttggtaatcccgagccgatcatctccggcgagcccaccctgccaggtgtggataccgcaaatcccaagatcgttgagcggcacatccgcgcgcaacttatccaggcgtacttccattcgcaaccgttgaactcggcaagcggggacgtgttttcggtactgggagagacgatggatttctacaacgggacgggcccgttcagcctgtctgcgttcaacgattggctttccggttcgcaagcggtagaagcgtgttacacggcaatgaggcagtggttgccggcgtcgttcaggaagtcgccctcagacgtggcgaccgaattcgtcgcgtgtctggagcaggtgcggccgagggccgcgcacgaactagacccggcagacgagaggctgatcgagttcctgtttgacaggggcttcctgccttcatacgccttcccgcgcgatctgtgtgcactgcaaatcgaaaggtcggagagacgcggcaatttcacgcagccgaagattattcagcgtcctcagcaagggctgaatgttgcgctgtctgagtacgcgccgggccgtctcgtcgttgtagataagaagacctaccgcgtgggaactgtcgctgccaatggttcgacggccgtcgtcgatcgagccgtgcggctattcgatgagcgccgctactatgttcattgcccggagtgcgaatacacctccgggttcaggattgcggcgccggtaggcgagcagtgtccactttgccgtacagccgtgctgcaggcggcgtcggtcatcgaaccgcaggtcgtcttccccgagggccgaggcgaggtcgatgagttcgacgatgagcagaccttcacgaacgcaactagcgcacagttatccgtgccggcggaaagctctgcgtttgacttgcagaaactgggcgttcactgcgagataggattcgcgcggactcaacagctcgtgatggttaacaagggggaagaggatgccggtcagtatgtcggtttcttgatctgcaatcggtgcggaaaggcggcgtccgatccgcagcgcgtcggaccgcatgagcgggactactacctttccacgcgcgcgcctgggcgttgcacgggccagttcgagcaggtatatctcggttacggcttcgcgtccgacgtgctgatcgtgcggctaccaatgtcgtcaccgctccgtttcgaccctgtgcgaacgaccgagcgtgagcccatctcaaatgcgctgcaatcgcttgccgaggcgttcgtactgggcataagccaggaactggacatcgatatccgcgaaatcaacgcaggcttccggttcgtccgcgttggcgaaaaacacttcgccgacatcttcgtgtacgacacgctgtccggcggtgccggctatgcgacgcaggcagcggaactctttgaagcggtcatgacaaacgccgaggccctgctgagccggtgcacgtgctcggcctcatgcgacaaatgcttgcgtcactatgggaaccgcttccatcacgcgatactggatcgacatttggggcttgacctgctgcgctatgcgcgcgacggctacataccggtggcgccatcccatgatgaacagcgggccacactgcagcccctgaaggacatgatgctgctcgccggctggtctggagatccgtcagttgcggctccctatgtcgtcgagcataaggggcggcgggtgcagcttttctcgtttccttcgttggttgaaccggtgcactacggctttgaaccaacagccaaccgctttgcgttctcggcgtttgaacttgcgcgcgatctgcccggcgcttatggagaggtcgcatga

SEQ ID NO: 27218 - DNA, 1203 bp, Burkholderia pseudomallei Pasteur 52237; identical to SEQ ID NO: 27214

SEQ ID NO: 27219 - DNA, 1374 bp, Burkholderia pseudomallei Pasteur 52237
atggcgacagggccggaggccggcgtcagggtacctcggagccggtggaagagggagtcgttgggttgcgggctttttctaaccgctgaaccggggcgaacttcgcagacgctgtggctgcgaatcccgcccatggatcctgaaacaatctctgcggggcgcctcgagcttcagtcgggactaggacaccgtacttacgatcttgccgacctttccgttgcgcgtctcgttcctatggcgccgcaagtcccattggcagtggtcgtcggggtcggaagcatgctaccggttgccgcgcatatcgcgaggcagatcggtgcgtttgtcgcagatcgcaactttttctacgccgaagagaaggggggcaggttcgtttttagcgatgaaccgttggaattggggtgccggtatcgactcctctcgatagatgacgtggtgccaccgctggatcttggcgcggcgctgaactggaggccggagggcaagttcggaggctggaatagctacgcaatggcactgccttcgtccttcttcgttggtgcacagcggaatttgctccgggaaattgccgaatttctcggccgcggcattcgtagcagccgtccgcgaatttatgttgttgatcccttgccgcatcacgtcgaagtcgatggaacgtgtatctatccggagtttccggagtcacttctgctgcgcagaacgggtatttgcactgtggacgtaacagcgtcgggcggcacgccagtacctcgcgtcatcgaacaaagcgatgaatgggtacgactcgaagagttcggcccgggcgagcaggagttcaccgtagcggtagacggcgacgagcagatgatcattcgtaccgaggactgcccgctgtttcggcccggtggcatcgctattagcaccgacgacgtgacatgggacctgtgcaccgatccgccgctagctggatcagaactcttgcggcacgaggtcactatcgactgcggaaacgatcggattgccatgcatatcgcccacctcaacgatggctgggtgcttgagaagacgcaactgtcatcgccggctggctcgccgaaaaacttatttgcaggcggcttcggcgaacttcgagcgattgtccagacttcgctgcaagagccagaggagcgggttggcgagagtgccgcaatccagcagctaggcgccgcgcggaactggcttgagcatatggtggcccgtagtttcggcgctgacggagcacgccgtgtaaggagctacctagccgaccccacccctgcaaacttgcgccggctcggccccatcatggcgagccgtctgatgccatatatccgggcagcacagcatcaacaccaggaatggactgagggaaactga

SEQ ID NO: 27220 - DNA, 2577 bp, Burkholderia pseudomallei Pasteur 52237; identical to SEQ ID NO: 27216

SEQ ID NO: 27221 - DNA, 783 bp, Burkholderia pseudomallei Pasteur 52237
atggccgacgcgcttgggaccatgcattttctacgtgaggcggaaccgctcggcgggggatattggattcctactcctgtgcgcactgttgatctcggctctgatcgctgcctgttggtggggccgcagccgacttccgaactgcagcgacactttgccggcgtgcgccgagcaggtgccggccgcgtgacggatcgtgccgacgtgccggacttgcctagtcagtcgcaggacgcttggcggggcagcgacggaagcgatgcctgcgcgtggacgcagtccgccgtcgattcggcgctgaaacagttggcgtcgtcgctagttgccgacggtctgcaggtcttcggtacccggatcgcgagtgggcggcatcgcgaacctgcatgggtagagccgggaagcggtgccgcgtgtgaatggcgtggcattggcctcttccgcgctcggacgggggcgacacgccatcgctatttctttggaaagtacggggccggcaaggaatttctggaagggccgccagttcaggatgcggcgcgattgcagttcgggttcgcggctttgcagcgtcagccgatgaccgtgacgattacggcggtgtccggcgcaacgtcgatttctctgccgctggctccgccgcgaaacgtgaggcgcctgctggtcgcgctttgcgatgccaatcccagatcgttcgggcgcgtctggacttgccgcgagccggtctatttgccggttctcctcggagcgatacaagacctcaaatgcgaaactgcacaccatgagtga

SEQ ID NO: 27222 - DNA, 5259 bp, Burkholderia pseudomallei Pasteur 52237
atgagtgaaccgaaaatctactccgcgcgcgccgtcttcgaagggatgaaggggacgttgcatcggtatcttgaagcgcagtaccacatctgggatgaggggttgatcgaggcgcgtaagcgactcctggaatccgagggcgtcacgtttcaggagccccgtatcgaggcgacaccgttctacgtcgcgggtagcacgtactcccaaatgcagattcctgcggcggccaaggcggtgcttgaactcgcggccaaacaggccggaacgggcattcccgaacggccctacaaacatcaggcggatgcgctcgaatcgttccttggtcgcggtgaggaagtcatcgtcgccaccggcaccggctccggcaagactgagtgcttcctcatgccgattctgggatcgctggcaaccgagtcttccgagcggccggaatcatggctgaatccaggctgccgggcgctgctgctctatccgatgaatgcattagtcaacgatcagctttcgcggctgcggcggctaatgggtcaacgagacgttgccgaatacattcgcggcaggcggccagggcgggcgacgttcgggatgtacacgagccgaacaccttatgcgggagtcacgagcagagcgcgtgaccaatcgcgtctccggccacttgtgcagcatgcatatcttgaccttccgccggatgccaaggagcggctcgatcgggaaggtaagtggccgaccaaggatcttgatggcttcatcgcctcctcctttgtgacgggcgccaacgactcggaaatgctgtcgcgcggcgagatgcagactcgctgccccgacctgcttatcaccaactattcgatgctcgagtacatgctgctgcggccgatcgagcggagcatctttaatcagacggcggcgtggctggcagccgacaaatcgaattatttcaccgtcgtgctcgacgaggcccacatgtatcgcggctcggggggcgccgaggtcgcgtatctcctgcggcggcttcatgcgcgcctcggcgtaggccgcgaccgagtgcggtatatcctgaccagcgcaagccttggcaagtcggccgaggcggtcgcgcggatgaagtctttcgccgcggacttgagcggtcttggtgctggtcagcgggagttcacgcttattcggggcgagcagttaaagaaatcaggggaaaggccggctactcgagaagaggcggccgccttggcgcgattcgatatcgctgcactacacgattccgcgatcaacccgggcaaggcgatacaagggttcgcctcgctgctagaagcgctgggcctagaagcgatgaatgttgcaggagccgagcaggtagcgcttcggcaggccgtctacgaatggctccagtcgtttgggccggcatcacttgttgcgaatttggtgacggcacatccgcagaagctacgggccgttgcggctttggcctttcccggagcgcccgatgccgaggcggccatggaggcaacgctggcgcttatgtcgttcgcaaaagagcgggatagcggacgagtgttcgcgcctgtccgctcgcatctgttcttccgcggcatcgcgggcatttatgcctgcaccgatgcgaactgcagtgctagagatccttcgattccttccgggccgctcggaaagctctattcggagccgatgctcaaatgcgagtgtggggcccgcgtctacgaagtgctgacacatcgcgattgcggcgcggcgttcattcgaggatacattcaggaccagttcggaatgttcctttggcatcagccgtctagtggtctgtggggaacgggcggattgatggaagcgcatttcctcgtcgaggtcgaccgccgcgccgccgggacgcatgggcgcatggagggcgctcaagtgtggctccacaaggccaccgggaggctggtcctgacacccccagccgaagcggagcttgggcaatacctcgcgctgcttcgtcccgacggggcggtgccgatttcaggacagcaggcgctgtcattcaattgtgaatgtcccgtttgcacgcgccgctggcgaactggatcgaccaagattatggacttggcgacgaagggcgaagcaccgttcgcgcagttggtccgcacgcaggtcgagctacagccgatcacgcatccgaaaacggacagttcccccaacggcggacgcaagtcgcttctgttctcagacgggcggcagaaggctgcacggctggcgagagacatcccgcgcgagatcgagaatgatgtattccggcagttgctactcctcgctgcgaaggaactgcgcggactcgggcgcgaggccacgctaggcgatcatatctacgttgccttgttgcatgtactcgcaaagaacgctctgctgttgttcgacggcgccgacagggaacgattgcagcgagatgtgcttgatcatcgccgccactatctcggcgagcttcgagatgcgctcgatgagtcaccgcctgccaagccaccacgcttctcctcgctcctcttgcggcatttgggttcgcccttttattcactgagcgcgctgacgctggcacacgtcgttcctatcgcacgtctgcgtcggcagatcgttgccgaccttcctggaatggacgaagcgcatctgcgtgcagtgtggacggcgtggattcaaagctttgcaagtgactttgccgtggatgcggacctgccacagggcgtcagatctcaggcagcgggctatcccatcggcggaggcttggaccggaatggcggcttctcggcgaggcagcaggcttttttgcgtgctcgcgtgccggaactggaccggattttcgatacgttgaccgcgttgctttgtcaggcgcggccgggaagtccgggattcttcatcgtccctcggtttctcgccttggaactggcatcggaccagcacgactggtatcaatgcgggcagtgcgccaccgtgtcgccggtggagtggtggggccactgtcccaactgtctggcgggagaggtgaccgccgttcgccccggggctacgcaatacttgcgcgcgcgcaaggcgttcttccgagatccggtcaatgagattttggaggggaaggcgagcccattcaacttgtcagtggaggaacacacggcccagctctcctatcgggacgtggacgattccacgacgacgatcgaagaattcgagcgccgcttccgggacatcttggtcgaacgcaacgacacgtcgattgacgtgctcagcagcacgacgacgatggaggtcggcatcgacattggttccctgatcgcggtggggctgcgaaatgtgccgccgctgcgacagaactaccagcagcgagccggacgtgccgggcgaagaggttcggccgtttctaccgtcgtgacttacgcgcagaacagtcctcacgacaaccactactttggtaatcccgagccgatcatctccggcgagcccaccctgccaggtgtggataccgcaaatcccaagatcgttgagcggcacatccgcgcgcaacttatccaggcgtacttccattcgcaaccgttgaactcggcaagcggggacgtgttttcggtactgggagagacgatggatttctacaacgggacgggcccgttcagcctgtctgcgttcaacgattggctttccggttcgcaagcggtagaagcgtgttacacggcaatgaggcagtggttgccggcgtcgttcaggaagtcgccctcagacgtggcgaccgaattcgtcgcgtgtctggagcaggtgcggccgagggccgcgcacgaactagacccggcagacgagaggctgatcgagttcctgtttgacaggggcttcctgccttcatacgccttcccgcgcgatctgtgtgcactgcaaatcgaaaggtcggagagacgcggcaatttcacgcagccgaagattattcagcgtcctcagcaagggctgaatgttgcgctgtctgagtacgcgccgggccgtctcgtcgttgtagataagaagacctaccgcgtgggaactgtcgctgccaatggttcgacggccgtcgtcgatcgagccgtgcggctattcgatgagcgccgctactatgttcattgcccggagtgcgaatacacctccgggttcaggattgcggcgccggtaggcgagcagtgtccactttgccgtacagccgtgctgcaggcggcgtcggtcatcgaaccgcaggtcgtcttccccgagggccgaggcgaggtcgatgagttcgacgatgagcagaccttcacgaacgcaactagcgcacagttatccgtgccggcggaaagctctgcgtttgacttgcagaaactgggcgttcactgcgagataggattcgcgcggactcaacagctcgtgatggttaacaagggggaagaggatgccggtcagtatgtcggtttcttgatctgcaatcggtgcggaaaggcggcgtccgatccgcagcgcgtcggaccgcatgagcgggactactacctttccacgcgcgcgcctgggcgttgcacgggccagttcgagcaggtatatctcggttacggcttcgcgtccgacgtgctgatcgtgcggctaccaatgtcgtcaccgctccgtttcgaccctgtgcgaacgaccgagcgtgagcccatctcaaatgcgctgcaatcgcttgccgaggcgttcgtactgggcataagccaggaactggacatcgatatccgcgaaatcaacgcaggcttccggttcgtccgcgttggcgaaaaacacttcgccgacatcttcgtgtacgacacgctgtccggcggtgccggctatgcgacgcaggcagcggaactctttgaagcggtcatgacaaacgccgaggccctgctgagccggtgcacgtgctcggcctcatgcgacaaatgcttgcgtcactatgggaaccgcttccatcacgcgatactggatcgacatttggggcttgacctgctgcgctatgcgcgcgacggctacataccggtggcgccatcccatgatgaacagcgggccacactgcagcccctgaaggacatgatgctgctcgccggctggtctggagatccgtcagttgcggctccctatgtcgtcgagcataaggggcggcgggtgcagcttttctcgtttccttcgttggttgaaccggtgcactacggctttgaaccaacagccaaccgctttgcgttctcggcgtttgaacttgcgcgcgatctgcccggcgcttatggagaggtcgcatga

SEQ ID NO: 27223 - DNA, 1203 bp, Burkholderia thailandensis
atgaagacggggttggtcgtatcgttgccggggaacgaagcgcggctcaagcggaaggtacgagcccatttcaaacgtctcggctttttgaaggctcccgacggcacgttgatgccgcccaacctcgacaagcagagctatcgcgacatgcatgcgcatcagcgtgactctcggcttaacgataaccgtgcatggatcgctaaccggtctgcgcgcctgatccagcacttcgcgtccggagcggagcttgacgtggagcgcatccgtccccgcatcgaggtcgttcgctccggcacttggcagggcgatctgtttcgattcgcaacctacttctggagaataccgatctcggagggctacggtcgccgcatgcggttcttggtgtgggatgagcatcacgagaaggtgatgggactgttcgcgttgggggacgcggtattcaacctgcgtgcccgagacgaattcatcggctgggaccaccatcgacgagcggatgcgatggtgaacctcatggatgcctacgcgctcggcgccgtgccgccgtacaacatgttgcttggaggaaagctgatcgcgtcactcattcgcagccaggatgttgtggataccttccaggcgaagtatcacgactcggtcggtgtgatctcagggcaaagcaagcacgccaaacttgtcgcggtcaccacgacatcggcgctcgggcgctcgtctttgtacaaccgcctaaagatcagcggacagtcgattttcgagccgatcggctcgacttcgggctgggggcatttccacatttccgacgaactgttcagcgacttgcgggactatcttcgatcattggaccatcactatgccgactcgcacggctacggacaggggcccaattatcggcttcggttgatacgcaaggcgctcggattgttgggccttgatccagatatggcgaggcacggtcttacgcgagaagtattcttctgttcgcttgctagcaacgcgcttcagtttcttcgaggtgagcacaagcgagcaaggtacggccatctgccgacggtcgcgcagatgggagaggccgccaagctgcgctgggttatccctcgggcggagcgaatgcccgagtttcgcacttggcgtagcgaacagtttctccgagagctcgatggcacgggggagcgcatgcagcgcagacggcttgaacaggtcggatag

SEQ ID NO: 27224 - DNA, 636 bp, Burkholderia thailandensis
atggcggtagctcgcgtcatcgaacagagcgatgaatgggtacgactcgaagaattcagcccgggcgagcaggagttcaccgtagcggtggacggcgacgagcagatgatcattcgtaccgagcactgcgcgctatttcggcctggtggcatcgccattagcaccgacgaggtgacatgggacttgtgcactgatccgccgctagctggatcagagctcttgcggcacgagctcacgatcgattgcgaaaacgatcggattgccacgcacctcgcccgccttaacgacggctggcttcttgagaagacacgactgttatcgccggctggctcgccgaaaaacttatacgcaggcggctttggtgaacttcgagggattgtccagacttcgcagcaagagccagagaagcagggtgagaagaatgccgcaatcaagcagctaggcggcgcgctgaactggctcgagcaccttgtggcccgtagtttcggcgctgacggagcacgccgtgtaaagagctacttagcggaccccacccctgcaaacttacgccggctcggccccattatgacgagtcgtctgatgccatacatccgggcggcacagcatcaacagcaggaacggactgagggaaactga

SEQ ID NO: 27225 - DNA, 5259 bp, Burkholderia thailandensis
atgagtgaaccgaaaatctactccgcgcgcgccgtcttcgaggggatgaaggggacgttgcatcggtatcttgaagcgcagtaccacatctgggacgaggggttgatcgaggcgcgtaagcgactcctggagtccgagggcgtcacgtttcaggagccccgtatcgaggcgacaccgttctacgccacgggtagcacgtactccaagatgcagatcccagcggcggccaaggcggtgcttgaactcgcggccaaacacgccggaacgggcattcccgaacggccctacaagcatcaggcggatgcgctcgaatcgttccttggtcgcggtgaggaaatcatcgtcgccaccggcaccggctccggcaagactgagtgcttcctcatgccgattctgggatcgctggcagccgagtcttccgagcgaccggaatcgtggctgaatccggggtgccgggcgttgctgctctatccaatgaatgcattggtcaacgatcagctttcgcggctgcggcggctgatgggtcaacgagacgttgccgagtacattcgcggccggcggctagggcgggcgacgttcgggatgtacacgagccgaacaccgtatcccggagtcacgagcagagcgcgcgatcaatcgcgtctccggccacttgtgcaacatgcatatcttgaccttccgccggatgccaaggagcggcttgatcgggaaggtaagtggccgaccaaggatcttgatggcttcattgcctcctcctttgtgacgggcgccaacgactcggaaatgctgtcgcgaggcgagatgcaggctcgctgccccgacctgcttatcaccaactattcgatgctggagtacatgctgctgcggccgatcgagcggagcatctttaatcagacggcggcgtggctggcagccgacaaatcgaattatttcaccgtcgtgctcgacgaggcccacatgtatcgcggctcggggggcgccgaggtcgcgtatctcctgcggcggcttcatgcgcgcctcggcgtcggccgcgaccgagtgcgttatatcctgaccagcgcaagccttggcaagtcggccgaggcggtcgcgcggatgaagtctttcgccgcggacttgagcggtcttggtgctagtcagcgggagttcacgcttatccggggcgagcagttaaaaaaatcaggggaacggcctgctactcgagaagaggcggccgccttggcacgatttgatattgcagcgctactggattccgcgatcaacccgtgcaaggcgatacaagggttcgcctcgctgctagaagcgctgggccaagaagcaatgaagactgcgggagacgagcaggtagcgcttcagcaggccgtctacgaatggctccagtcgtttgggccggcatcacttgttgcaaatttggtgacggcacatccgcaaaagctacgggccgttgcggccttggcctttcccggatcgccccatgccgaggcagccatggaggcaacgctggcgctcatgtcgttcgcaaaagagcgggatagcggacgagtgttcgcgcccgtgcgctcgcatctgttcttccgtggcatcgcaggcatctatgcctgcaccgatgcgagctgtagcgcgagagatccgtcgatttcctccgggacgctcggaaaactttattcggagccgatgctcaaatgcgagtgtggagcccgcgtctacgaagtgctgacgcatcgcgattgcggcgcggcgttcattcgaggatacattcaggaccagttcggaatgttcctttggcatcagccgtctagtggtctgtggggaaccggcgggttgatggaagcgcatttcctcgtggaggtcgagcgccgcgccgtcggtacgcatggacgcatggagggcgctcacgtgtggctgcataaggcaaccgggaggctagtcctggcgcccccagccgaagcggagcgcggccaatacctcgcgctgcttcggcccgacggggcggtgccgatttcaggacagcaggcgctgtcattcaattgtgaatgtcccgtttgcacgcgccgctggcgagctggatcgaccaagatcatggacttggcgacgaaaggcgaagcaccgttcgcgcagttggtccgcacgcaggtcgagctacaaccaatcacgcatccgaaaacggacagttcccccaacggcggacgcaagtcgcttctgttctcggacgggcggcagaaggcggcgcggctggcgagagacattccgcgcgagatcgagaatgatgtattccggcagttgctactcctcgctgcgagggaactgcgcggactcgggcgcgaggctacgctgggcgatcacatctacgttgccttgttgcatgtactcgcaaagaatgctctgttgttgttcgacggtgccgaccgggaacgactgcagcgagatgtgcttgatcatcgccgccactatctcggcgagcttcgagatgcgctcgatgagtcaccgcctgccaagccaccacgcttctcctcgctcctattgcggcatctgggctcgcccttttactcactgagcgcgctgacgctggcacacgtcgttcctatcgcacgtctgcgtcgacagatcgttgccgcccttcctggaatggaggaagcacatctgcgcgccgtgtggacggcatggattcaaagctttgcaagtgattttgccgtggatgcggacctgccacagggtgtcagatctcaggcagcaggctatccaatcggcggagggctagaccggaatggcggcttctcggcgaggcagcaggcttttttgcgcgctcgcgtgccggaactggaccggattttcgatacgttgaccgcgttgctttgtcaggcgcggccgggaagtccgggattcttcatcgtccctcggtttctcgccttggaactggcatcggaccagcacgactggtatcaatgcgggcagtgcgccaccgtgtcgccagtggagtggtggggccactgtcccaactgtctggcgggagaggtgaccgccgttcgccccggggctacgcaatatttgcgcgcgcgcaaggcgttcttccgagatccggttaatgagattttggaggggaaggcgagcccattcaacttgtcagtggaggagcacacggcccagctctcctatcgggacgtggacgattctacgacgacgatcgaagaattcgagcgccgcttccgggacatcctggtcgaacgcaacgatacgtcgattgacgttctcagcagcacgacgacgatggaggtcggcatcgacattggttccctgatcgcggtggggctgcgaaatgtgccgccgctgcgacagaactaccagcagcgcgccggacgtgccgggcgaagaggttcggccgtttctaccgtcgtcacttacgcgcaaaacagtcctcacgacaaccactactttggcaatcccgagccgatcatctccggcgagcccaccctgccaggtgtggataccgcaaatcccaagatcgttgagcggcatatccgcgcgcaacttatccaggcgtacttccattcgcaaccgttgaactcggcgagcggggacgtgttttcggtgctgggagagacgatggatttctacaacgggacgggcccgttcagcctgtctgcgttcaacgattggctttccggttcgcaagcggtacaagcgtgctacacggcaatgaggcagtggttgccggcgtccttcaggaagtcgccctcagacgtggcgacagaattcgtcgcgcggctggagcaggtgcggccgagggccgcgcacgaactagacccggcagacgagaggctgatcgagttcctgtttgacaggggcttcctgccttcatacgccttcccgcgcgatttgtgtgcactgcaaatcgaagggttggagagacgcggcaatttcacgcagccgaagattgttcagcgtcctcagcaagggctgaatgttgcgttgtctgagtacgcgccgggccgtctcgtcgtcgtagataagaagacctaccgcgtaggaactgtcgctgccaatggttcgacggccgtcgtcgatcgagcccagcggctgttcgatgagcgccgctactatgttcattgcccggagtgcgaatacacctccggattcaggattacggcgccggtaggcgagcagtgtccactgtgccgtacagccgtgctgcaggcgacgtcggtcatcgaaccgcaggtcgtcttccccgagggtcgaggcgaggtcgatgagttcgacgatgagcagaccttcacgaacgcaactagcgcgcagttatccgtgccggcggaaagctctgcgtttgacttgcgggaactgggcgttcactgcgagataggattcgcgcgcactcaacagctcgtgatggttaacaaaggggaagaggatgccggtcagtatgtcggtttcttgatctgcaatcggtgcggaaaggcggcgtccgatccgcagcgcgtcggaccgcatgagcgggactactacctatccacgcgagcgcctgggcgttgcacgggccagttcgagcaggtatatctcggttacggcttcgcatccgacgtgctgatcgtgcggcttccaatgtcgccaccgctccgtttcgaccctgtgcgaacgaccgagcgtgagcccatctctaatgcgctgcaatcgcttgccgaggcgttcgttctgggcataagccaggaactggacctcgatatccgcgaaatcaacgcaggattccggttcgtccgcgttggcgagcaacacttcgccgacatcttcgtgtacgacacgctgtccggcggtgctggctatgcgacgcaggcagcggaactctttgaagcagtcatgacaaacgccgaggccctgctaagccggtgcacgtgctcggcctcatgcgacaaatgcttgcgtcactatgggaaccgcttccatcacgcgatactggatcgacatttggcgcttgacctgctgcgctatgcgcgcgacggctacgtaccggtggcgccatcccatgatgaccagcgagccacactgcagcccctgaaggacatgatgttgctcgccggctggtctgaagatccgtcagttgcggctccctataccgtcgagcatcaggggcggcgggtgcagcttttctcgtttccttcgttggttgatccggtgcactacggctttcaaccagcagccaaccgctttgcgttctcggcgtttgaacttgcgcgcgatctgcccggcgcttatggagaggtcgcatga

SEQ ID NO: 27226 - DNA, 1203 bp, Burkholderia ubonensis
atgaagacggggttggtcatatccttgccggggaacgaagcgcggctcaagcggaaggtacgagcccatttcaaacgtctgggctttttgaaggctcccgacggcacgctgatgccgcccaacctcgacaagcagagctatcgcgacatgcatgcgcatcagcgtgactctaggcttaacgacaaccgtgcatggatcgctaaccggtctgcgcgcctgatccagcacttcgcgtccggagcggagcttgacgttgagcgcatccgtccccgcatcgaggtcgttcgctcgggcacttggcagggcgatctgtttcgattcgcgacctacttttggagaataccgatctcagagggctacggccgccgcatgcgcttcttggtgtgggatgaccatcacgagaaggtgatgggactattcgcattgggggacgcggtattcaacctgcgtgcccgagacgaatttatcggctgggaccaccatcggcgagcggatgcgatggtgaacctcatggatgcctacgcgctaggggctgtgccgccgtacaacatgttgcttggaggaaagctggttgcgtcactcattcgcagccaagatgttgtggataccttccaggcgaagtatcacgactccgtcggggtgatctcagggcaaagcaagcacgccaaacttgtcgcggtcaccacgacatcggcgctcgggcgctcgtctttgtataaccgcctaaagatcagcggacagtcgattttcgagccgatcggctcgacttcgggttgggggcatttccacatttccgacgaactgttcagcgacttgcgggactatcttcgatcattggaccatcactatgccgactcgcacggctacggacaggggcccaattatcggcttcggttgatacgcaaggcgctcggattgttgggccttgatccagatatggcgaggcacggtcttacgcgagaagtattcttctgttcgcttgcgagcaacgcgcttcagtttcttcgaggtgagcacaagcgagcaaggtacggccatctgccgacggtcgcgcagatgggagaggccgccaagctgcgctgggttatccctcgggcggagcgaatgcccgagtttcgcacttggcgtagcgaacagtttctccgagagctcgatggcacgggggggcgcatgcagcgcagacggctcgaacaggtcggatag

SEQ ID NO: 27227 - DNA, 636 bp, Burkholderia ubonensis
atggcggtagctcgcgtcatcgaacagagcgatgaatgggtgcgactcgaagaattcagcccgggcgagcaggagttcaccgtagcggtggacggcgacgagcagatgatcattcgtaccgagcactgcgcgctatttcggcctggtggcatcgccattagcaccgacgaggtgacatgggacttgtgcgccgatccgccgctagctggatcagagctcttgcggcacgagctcacgatcgattgcgaaaacgatcggattgccatgcacctcgcccgcttcaacgacggctgggttcttgagaagacacgactgttatcgccggctggctcgccgaaaagcatatatgcaggcggcttcggtgaacttcgaggtattgtccagacttcgcagcaagagccagaggagcagggtgacaagaatgccgcgaccaagcagctaggcgccgcgctgaactggcttgatcaccttgtggcccgtagtttcggcgctgacggagcacgccgtgtaaggagctatctagcggaccccacccctgcaaacttacgccggctcggccccattatgacgagtcgtctgatgccatacatccgggcagcacagcatcaacagcaggaacggactgagggaaactga

SEQ ID NO: 27228 - DNA, 2526 bp, Burkholderia ubonensis
ttgctggaatggggtgctgccgacgacgaactgcggcggttcttcgccgactgccgcgttcaactgattcagaggggcgccaaggtacagaatcctcctcgcggtaagtcggctcgtgtccgcatgctggcgcaggggctgcctccggcgaccgatcgactagtccaaaggtggtttaaccagcacctgacgatgctcgatccgaagcctgctagcgatctagtggcggagctgcggctttacgaggagatgggtgagagcccacctgaggacgaggcgaagcgactggctcgctcttgccttgtacatttgttttccagcgacccacctgctgatctagtgtcgtttctgcgccctgcgcaagcaggaaatgccgccgaaccttccgaagcacaggccgaacccgtgaacgggcagagttccgatgcatttccggtggccctcggccaggcgctcgtggcgttggctgaagggcgtgatccagacgagtacctgtcgtccttatcgtctacaaccgcgtcgtttgtggcgggattgcaggccgtgcgtagtgggcgcgaggacgaggcgaagatcgcgctggaggcgctggatcacgaaccggaagtgcgcgcattgctgctcgagtacgccgccaggagtgcatcggcgcgtacaggtaacgcagttcgtgggctgcagatgctgcgcttcgcgagtcccgacgaggccttcagcttcgatttccaccgcgatgaagttctcgcggtttgtacgcgcgactacccagagacaacggtcttcttacatccgttcgccattcgtgctgcggacggatcatggattgacttgtccaacgacaccgattgccagaagctcttttacacttccggtgatctcatcgccttcccagggcgagatactccgcggcaaccgaagcgtggggagatcggcatctggcgagtggccgagaacaagggggcgaacacgggtcatcgcacaaactttcacatcgcatcggagatgactccggtctacgaagtgcgcgatgtgccattcccgtcgaccgactacgactccgttcgggagtacatcaagcatcaattcgagcagggcgaggtgctccttgccacgaaaccgctatttgtcctgcgcgaccaattggtggtcggttgtcctccgggcaaggacttatcgagagacgaaggtttcgaatcgggtctcccatgttggcaaacgctttctgcctgtcgatttgagggccgcgtgcttgttcctggccccttgccacctccggggacgtacgaatgtgaagcgctgggaaccagcctgcggaagctcttcgccaagggagaatggcgcacagacaagccgacgaaggctctagcaaggaagctgcaagaattgatcgcgtccggcgagccgggactcagctctgcgcgcgtcgctcggctgcgcgcagagctgtccttcattgaccagcatgaaggtgccatggacgctttgctcgaagagatcatgcgtgatccgtcaatcagcgcgcgagtcgatgagcaggtgaattcccgggtagagaccctcgtcgagcagcaggagcaactcaaaaatagtgtccagcaactggagcagaagaagcgcgatttgcaggagcagcagcgtaaagctgagagggaccaaaaggccgttgcgccggcgatcgcgaaggcgattcgcggagccttcgacaaggcgcgcagtgacgccttggggacacttgggcaagttgcagtgttcaaggcgctgatagacgaactgatcgagaggccagcagcaccgggaggaggcgctgggccagcccatccggatccgacttatgcgggtttccgtcccgcagcgtctgtagttcgtttacctcatggtgggcctttgccggtcatcgaaacattgcgagcactcggcgtgaccccaaagtccgcacgcgcgattgaacttgtcggtcagatggcgcatcaatgtgggctgatactcatcatcgatggtctcgctgggcggcttgctgcggaggtatggctgagcgggaacgagacttctggcaaggtattcgaatgcggctttggggaggttgaggatcaccaaattcggagcatcgttgccgatgctccagagaccttggcaattttggacgcgaatctctctcccttggatctgtatgcgagaccgttgatcgacgcggtgcaacggcgattggcggggatagacggaggaacatttgctacaaggattctgatgtcggtgtccgacgatacggcatcgcttcctgtgccggcgacggtagagtccctttcgttgcgcgtgtcattggaccgtattcccatgttcgctcaagacaacgaggtcgcaagacaactcgacgagattgattcgaccgatacgtctgctgggtggtttgcccggatttggaagccggcgcggccgcgagtgctaagtcatctgcgctcggtaccaattgaggacgtggcgttcatttttgcggcgctcgaagccgctgagattaaggggacagactaa

SEQ ID NO: 27229 - DNA, 5259 bp, Burkholderia ubonensis
atgagtgaaccgaaaatctactccgcgcgcgccgtcttcgaagggatgaaggggacgttgcatcggtatcttgaagcgcagtaccacatctgggatgaggggttgatcgaggcgcgtaagcgactcctggagtccgagggcgtcacgtttcaggagccccgtatcgaggcgacaccgttctacgccacgggtagcacgtactcccagatgcagatcccagcggcggccaaggcggtgctcgaactcgcggccaaacacgccggaacgggcattcccgaacggccctacaaacatcaggcggatgcgctcgaatcgttccttggtcgcggtgaggaaatcatcgtcgccaccggcaccggctccggcaagactgagtgcttcctcatgccgattctgggatcgctggcagccgagtcttccgagcgaccggaatcgtggctgaatccggggtgccgggcgttgctgctctatccgatgaatgcattggtcaacgatcagctttctcggctgcggcggctgatgggtcaacgagacgttgccgagtacattcgcggccggcggctagggcgggcgacgttcgggatgtacacgagccgaacaccgtatcccggagtcacgagcagagcgcgcgatcaatcgcgtctccggccacttgtgcaacatgcatatcttgaccttccgccggatgccagggagcggcttgatcgggaaggtaagtggccgaccaaggatcttgatggcttcattgcctcctcctttgtgacgggcgccaacgactcggaaatgctgtcgcgcggcgagatgcaggctcgctgccccgacctgcttatcaccaactattcgatgctggagtacatgctgctgcggccgatcgagcggagcatctttaatcagacggcggcgtggctggcagccgacaaatcgaattatttcaccgtcgtgctcgacgaggcccacatgtatcgcggctcgggcggcgccgaggtcgcgtatctcctgcggcggcttcatgcgcgcctcggcgtcggccgcgaccgagtgcggtatatcctgaccagcgcaagccttggcaagtcacccgaggcggtcgcgcggatgaagtctttcgccgcggacttgagcggtcttggtgctagtcagcgggagttcacgcttatccggggcgagcagttaaaaaaatcaggggaacggcctgctactcgagaagaggcggccgccttggcacgatttgatatcgcagcgctactcgattccgcgatcaacccgggcaaggcgatacaagggttcgcctcgctgctagaagcgctgggccaagaagcaatgaaggctgcgggagacgagcagatagcgcttcagcacaccgtctacaaatggctccagtcgtttgggccggcatcatttgttgcaaatttggtgacggcacatccgcaaaagctacgggccgttgcggccttggcctttcccggagcgcccgatgccgaggcagccatggaggcaacgctggcgctcatgtcgttcgcaaaagagcgggatagcggacgagtgttcgcgcctgtgcgctcgcacctgttcttccgtggcatcgcaggcatctatgcctgcaccgatgcgagctgtagcgcgagagatccgtcgatttcctccgggacgctcggaaaactttattcggagccgatgctcaaatgcgagtgtggggcccgcgtctacgaagtgctgacgcatcgcgattgcggcgcggcgttcattcgaggatacattcaggatcagttcggaatgttcctttggcatcagccgtctagtggtctgtggggaaccggcgggttgatggaagcgcatttcctcgtggaggttgagcgccgcgccgccgggacgcatgggcgcatggagggcgctcacgtgtggctgcataaggcaaccgggaggctagtcctggcgcccccagccgaagcggagcgcggccaatacctcgcgctacttcggcccgacggggcggtgccgatttcaggacagcaggcgctgtcattcaattgtgaatgtcccgtttgcacgcgccgctggcgagctggatcgaccaagatcatggacttggcgacgaaaggcgaagcaccgttcgcgcagttggtccgcacgcaggttgagctacagccaatcacgcatccgaaaacggacagttcccccaacggcggacgcaagtcgcttctgttctcggacgggcggcagaaggcggcgcggctggcgagagacattccgcgcgagatcgagaatgatgtattccggcagttgctactcctcgctgcgagggaactgcgcggactcgggcgcgaggctacgctgggcgatcacatctacgttgccttgttgcatgtactcgcaaagaatgctctgttgttgttcgacggtgccgaccgggaacgattgcagcgagatgtgcttgatcatcgccgccactatctcggcgaacttcgagatgcgctcgatgagtcaccgcctgccaagccaccacgcttctcttcgctcctattgcggcatctgggttcgcccttttactcactgagcgcgctgacgctggcacacgtcgttcctatcgcacgtgtgcgtcgacagatcgttgccgcccttcctggaatggacgaagcacatctgcgcgccgtgtggacggcatggattcaaagcttcgcaagtgattttgccgtggatgcggatctgccacagggcgtcagatctcaggcagcgggctatcccatcggcggagggctagaccggaatggtggcttctcggcgaggcagcaggcttttttgcgcgctcgcgtgccggaactggaccggattttcgatacgttgaccgcgttgctttgtcaggcgcggccgggaagtccgggattcttcatcgtccctcggtttctcgccttggaactggcatcggaccagcacgactggtatcaatgcgggcagtgcgccaccgtgtcgccggtggagtggtggggccactgtcccaactgtctggcgggagaggtggccgccgttcgccccggggctacgcaatacttgcgcgcgcgcaaggcgttcttccgagatccggttaacgagattttggaggggaaggcgagcccattcaacttgtcagtggaggagcacacggcccagctctcctatcgggacgtggacgattccacgacgacgatcgaagaattcgagcgccgcttccgggacatcctggtcgaacgcaacgacacgtcgattgacgttctcagcagcacgacgactatggaggtcggcatcgacattggttccctgatcgcggtggggctgcggaatgtgccgccgctgcgacagaactaccagcagcgcgccggacgtgccgggcgaagaggttcggccgtttctaccgtcgtgacttacgcacagaacagtcctcacgacaaccactactttggtaatcccgagccgatcatttccggcgagcccaccctgccaggtgtggatatcgcaaatcccaagatcgttgagcggcacatccgcgcgcaacttatccaggcgtacttccattcgcaaccgttgaactcggcgagcggggacgtgttttcggtgctgggagagacgatggatttctacaccgggacgggcccgttcagcctgtctgcgttcaacgattggctttccggttcgcaagcggtacaagcgtgctacacggcaatgaggcagtggttgccggcgtcgttcgggaagtcgccctcagacgtggcgaccgaattcgtcgcgcggctggagcaggtgcggccgagggccgcgcacgaactagacccggcagacgagaggctgatcgagttcctgtttgacaggggcttcctgccttcatacgccttcccgcgcgatctgtgtgcactgcaaatcgaagggttggagagacgcggcaatttcacgcagccgaagattgttcagcgtcctcagcaagggctgaatgttgcgttgtctgagtacgcgccgggccgtctcgtcgtcgtagataagaagacctaccgcgtaggaaccgttgctgccaatggttcgacggccgtcgtcgatcgagcccagcggctgttcgatgagcgccgctactatgttcattgcccggagtgcgaatacacctccgggttcaagattgcggagccggtaggcgagcagtgtccactgtgccgtacagccgtgctgcaggcgacgtcggtcatcgaaccgcaggtcgtcttccccgagggccgaggcgaggtcgatgagttcgacgatgagcagaccttcacgaacgcaactagcgcacagttatccgtgccggcggaaagctccgcgtttgacttgcggaaactgggcgttcactgcgagataggattcgcgcgcactcaacagctcgtgatggttaacagaggggaagaggatgccggtcagtatgtcggtttcttgatctgcaatcggtgcggaaaggcggcgtccgatccgcagcgcgtcggacctcatgagcgagactactacctttccacgcgagcgcctgggcgttgcacgggccagttcgagcaggtatatctcggttacggcttcgcatccgacgtgctgatcgtgcggcttccaatgtcgccaccgctccgtttcgaccctgtgcgaacgaccgagcgcgagcccatctctaatgcgctgcaatcgcttgccgaggcgttcgtactgggcataagccaggaactggacatcgatatccgcgaaatcaacgcaggcttccggttcgtccgcgttggcgaaaaacacttcgccgacatcttcgtgtacgacacgctgtccggcggtgccggctatgcgacgcaggcagcggaactctttgaagcagtcgtgacaaacgccgaggccctgctgagccggtgcacgtgctcggcctcatgcgacaagtgcctgcgtcactatgggaaccgcttccatcacgcaatactggatcgacatttggcgcttgacctgctgcgctatgcgcgcgacggctacgtaccggtggcgccatcccatgatgaacagcgggctacactgcagcccctgaaggacatgatgctgctcgccggctggtctcaagatccgtcagttgcggctccctatgccgtcgagcatcaggggcggcgggtgcagcttttctcgtttccttcgttggttgatccagtgcactacggctttcaaccaacagccaaccgttttgcgttctcagcgtttgaacttgcgcgcgatctgcccggcgcttttggagaggtcgcatga

SEQ ID NO: 27230 - DNA, 1203 bp, Burkholderia ubonensis; identical to SEQ ID NO: 27226

SEQ ID NO: 27231 - DNA, 636 bp, Burkholderia ubonensis; identical to SEQ ID NO: 27227

SEQ ID NO: 27232 - DNA, 5262 bp, Burkholderia ubonensis
atgagtgaaccgaaaatctactccgcgcgcgccgtcttcgaagggatgaaggggacgttgcatcggtatcttgaagcgcagtaccacatctgggatgaggggttgatcgaggcgcgtaagcgactcctggagtccgagggcgtcacgtttcaggagccccgtatcgaggcgacaccgttctacgccacgggtagcacgtactcccagatgcagatcccagcggcggccaaggcggtgctcgaactcgcggccaaacacgccggaacgggcattcccgaacggccctacaaacatcaggcggatgcgctcgaatcgttccttggtcgcggtgaggaaatcatcgtcgccaccggcaccggctccggcaagactgagtgcttcctcatgccgattctgggatcgctggcagccgagtcttccgagcgaccggaatcgtggctgaatccggggtgccgggcgttgctgctctatccgatgaatgcattggtcaacgatcagctttctcggctgcggcggctgatgggtcaacgagacgttgccgagtacattcgcggccggcggctagggcgggcgacgttcgggatgtacacgagccgaacaccgtatcccggagtcacgagcagagcgcgcgatcaatcgcgtctccggccacttgtgcaacatgcatatcttgaccttccgccggatgccagggagcggcttgatcgggaaggtaagtggccgaccaaggatcttgatggcttcattgcctcctcctttgtgacgggcgccaacgactcggaaatgctgtcgcgcggcgagatgcaggctcgctgccccgacctgcttatcaccaactattcgatgctggagtacatgctgctgcggccgatcgagcggagcatctttaatcagacggcggcgtggctggcagccgacaaatcgaattatttcaccgtcgtgctcgacgaggcccacatgtatcgcggctcgggcggcgccgaggtcgcgtatctcctgcggcggcttcatgcgcgcctcggcgtcggccgcgaccgagtgcggtatatcctgaccagcgcaagccttggcaagtcacccgaggcggtcgcgcggatgaagtctttcgccgcggacttgagcggtcttggtgctagtcagcgggagttcacgcttatccggggcgagcagttaaaaaaatcaggggaacggcctgctactcgagaagaggcggccgccttggcacgatttgatatcgcagcgctactcgattccgcgatcaacccgggcaaggcgatacaagggttcgcctcgctgctagaagcgctgggccaagaagcaatgaaggctgcgggagacgagcagatagcgcttcagcacaccgtctacaaatggctccagtcgtttgggccggcatcatttgttgcaaatttggtgacggcacatccgcaaaagctacgggccgttgcggccttggcctttcccggagcgcccgatgccgaggcagccatggaggcaacgctggcgctcatgtcgttcgcaaaagagcgggatagcggacgagtgttcgcgcctgtgcgctcgcacctgttcttccgtggcatcgcaggcatctatgcctgcaccgatgcgagctgtagcgcgagagatccgtcgatttcctccgggacgctcggaaaactttattcggagccgatgctcaaatgcgagtgtggggcccgcgtctacgaagtgctgacgcatcgcgattgcggcgcggcgttcattcgaggatacattcaggatcagttcggaatgttcctttggcatcagccgtctagtggtctgtggggaaccggcgggttgatggaagcgcatttcctcgtggaggttgagcgccgcgccgccgggacgcatgggcgcatggagggcgctcacgtgtggctgcataaggcaaccgggaggctagtcctggcgcccccagccgaagcggagcgcggccaatacctcgcgctacttcggcccgacggggcggtgccgatttcaggacagcaggcgctgtcattcaattgtgaatgtcccgtttgcacgcgccgctggcgagctggatcgaccaagatcatggacttggcgacgaaaggcgaagcaccgttcgcgcagttggtccgcacgcaggttgagctacagccaatcacgcatccgaaaacggacagttcccccaacggcggacgcaagtcgcttctgttctcggacgggcggcagaaggcggcgcggctggcgagagacattccgcgcgagatcgagaatgatgtattccggcagttgctactcctcgctgcgagggaactgcgcggactcgggcgcgaggctacgctgggcgatcacatctacgttgccttgttgcatgtactcgcaaagaatgctctgttgttgttcgacggtgccgaccgggaacgattgcagcgagatgtgcttgatcatcgccgccactatctcggcgaacttcgagatgcgctcgatgagtcaccgcctgccaagccaccacgcttctcttcgctcctattgcggcatctgggttcgcccttttactcactgagcgcgctgacgctggcacacgtcgttcctatcgcacgtgtgcgtcgacagatcgttgccgcccttcctggaatggacgaagcacatctgcgcgccgtgtggacggcatggattcaaagcttcgcaagtgattttgccgtggatgcggatctgccacagggcgtcagatctcaggcagcgggctatcccatcggcggagggctagaccggaatggtggcttctcggcgaggcagcaggcttttttgcgcgctcgcgtgccggaactggaccggattttcgatacgttgaccgcgttgctttgtcaggcgcggccgggaagtccgggattcttcatcgtccctcggtttctcgccttggaactggcatcggaccagcacgactggtatcaatgcgggcagtgcgccaccgtgtcgccggtggagtggtggggccactgtcccaactgtctggcgggagaggtggccgccgttcgccccggggctacgcaatacttgcgcgcgcgcaaggcgttcttccgagatccggttaacgagattttggaggggaaggcgagcccattcaacttgtcagtggaggagcacacggcccagctctcctatcgggacgtggacgattccacgacgacgatcgaagaattcgagcgccgcttccgggacatcctggtcgaacgcaacgacacgtcgattgacgttctcagcagcacgacgactatggaggtcggcatcgacattggttccctgatcgcggtggggctgcggcggaatgtgccgccgctgcgacagaactaccagcagcgcgccggacgtgccgggcgaagaggttcggccgtttctaccgtcgtgacttacgcacagaacagtcctcacgacaaccactactttggtaatcccgagccgatcatttccggcgagcccaccctgccaggtgtggatatcgcaaatcccaagatcgttgagcggcacatccgcgcgcaacttatccaggcgtacttccattcgcaaccgttgaactcggcgagcggggacgtgttttcggtgctgggagagacgatggatttctacaccgggacgggcccgttcagcctgtctgcgttcaacgattggctttccggttcgcaagcggtacaagcgtgctacacggcaatgaggcagtggttgccggcgtcgttcgggaagtcgccctcagacgtggcgaccgaattcgtcgcgcggctggagcaggtgcggccgagggccgcgcacgaactagacccggcagacgagaggctgatcgagttcctgtttgacaggggcttcctgccttcatacgccttcccgcgcgatctgtgtgcactgcaaatcgaagggttggagagacgcggcaatttcacgcagccgaagattgttcagcgtcctcagcaagggctgaatgttgcgttgtctgagtacgcgccgggccgtctcgtcgtcgtagataagaagacctaccgcgtaggaaccgttgctgccaatggttcgacggccgtcgtcgatcgagcccagcggctgttcgatgagcgccgctactatgttcattgcccggagtgcgaatacacctccgggttcaagattgcggagccggtaggcgagcagtgtccactgtgccgtacagccgtgctgcaggcgacgtcggtcatcgaaccgcaggtcgtcttccccgagggccgaggcgaggtcgatgagttcgacgatgagcagaccttcacgaacgcaactagcgcacagttatccgtgccggcggaaagctccgcgtttgacttgcggaaactgggcgttcactgcgagataggattcgcgcgcactcaacagctcgtgatggttaacagaggggaagaggatgccggtcagtatgtcggtttcttgatctgcaatcggtgcggaaaggcggcgtccgatccgcagcgcgtcggaccgcatgagcgagactactacctttccacgcgagcgcctgggcgttgcacgggccagttcgagcaggtatatctcggttacggcttcgcatccgacgtgctgatcgtgcggcttccaatgtcgccaccgctccgtttcgaccctgtgcgaacgaccgagcgcgagcccatctctaatgcgctgcaatcgcttgccgaggcgttcgtactgggcataagccaggaactggacatcgatatccgcgaaatcaacgcaggcttccggttcgtccgcgttggcgaaaaacacttcgccgacatcttcgtgtacgacacgctgtccggcggtgccggctatgcgacgcaggcagcggaactctttgaagcagtcgtgacaaacgccgaggccctgctgagccggtgcacgtgctcggcctcatgcgacaagtgcctgcgtcactatgggaaccgcttccatcacgcaatactggatcgacatttggcgcttgacctgctgcgctatgcgcgcgacggctacgtaccggtggcgccatcccatgatgaacagcgggctacactgcagcccctgaaggacatgatgctgctcgccggctggtctcaagatccgtcagttgcggctccctatgccgtcgagcatcaggggcggcgggtgcagcttttctcgtttccttcgttggttgatccagtgcactacggctttcaaccaacagccaaccgttttgcgttctcagcgtttgaacttgcgcgcgatctgcccggcgcttttggagaggtcgcatga

SEQ ID NO: 27233 - DNA, 1206 bp, Candidatus Competibacter denitrificans Run_A_D11
ttgcaacgacaaagaacaaaagcttcagtcatcccggtttttactctagaagctacgctaaagcgtaagatacgcttgcattttacacgcttgggcttcagtaagaggcctgatggaacgctcgtttgtcctgcctcaagtaaagattcaatccgtcaactacatcatattcaacgcgacgaacgcatagaatcagctacgcaccttctatcagagttcttaccgggtgctttgcgttattttgccagtggtagcgagattgatccggccatgatccgtttatcgctgatacgggtagaggcgaatacattcgagtcgagccttttccgaactgcagctcttacatggtctgtgcccgtttcgaatggctatggccgccgtctgcggtatcttgtatgggatgatgggcatgatcggctcgctggaatttttgcgcttggcgaccctgttttcaatctttcggtgcgtgacgatcttattggatggacttccagtgagcggtctagccgattggttaacatactagacgcctatgtcctcggcgctgtccctccctacaacatgctgttaggcggcaaggcaatcgcatgtcttgtccgttcgcgcgatatctatgatgcttttgcaagcacgtatggttcaacgaccggcattatttcaggcgaagagaagagtgctcgtctgctagctgtgacgacaagttcctcaatgggtcgttcatcagtttataaccgcctgaaactcgatggagtgagctacttcgaatctatcggttacacggtcggctggggacatttccacatcaccgacgaattattcgagcagatgcgggaatatttacgcttatcaaaacatccttatgctgaccaccaccatttcggtgagggtcctaattggcgtctgcgaactatccgagtggcgctcaagcaactcggaatcaacgaggctgtcctgcgacatggtatccgaagggaggtgtttttctgccagctagcagagaacgctcggaaaatcctagccacaggtaaagggaaacccgacctttcgactttgaagacagttgatgaaatttcagagatggctcgtagacggtggatcgaacctcgcgctttgaggcgagaagactacaaatcttggagccgcgacgacattccccgactaattcgaggcttaccaacaggaatgtcaaaggttagaactgcataa

SEQ ID NO: 27234 - DNA, 1080 bp, Candidatus Competibacter denitrificans Run_A_D11
atgaccggaattgtcatgcttagccgcgccgattctcttcaatgtgttgctcgttcattggggctccctggcccagcaaatcttgacaatgcgcttatcgctcaatccttgcgtagaaccgtattcattgccgcaccttgctccgcaagagttgcgtgtgcgcttgtcgtcgatgcgctcaggccgctggtcgacgatcccgaagaactaaggatgcgtgtcgatgacgttatcgacagtctgattgccatgggcgatcttctggagatgcgaagcgaaatcaccggggagacgaaccttgttctgcggccagcacctccggcgttcgtgcagcgccgcgacggaacattcatcgtattgggtgttgccggagacgagatcacaccatcccaggcgcaagatttttccctcctctatcgaccgagcggtttgcgaacactcgccccgcccgatgcacagccttgccggagaatacttctcgatctcggactcattgaactgcccatgccaatatggctacacgcgccagcgacggttacggcgaaggaattcgtcagatcatgggtcgccaaacttccggacaagccacatccggaaaaaattgaaaatctcgaagtcctcgatacgagcgtaacgacgtcatattacaaaaggcgatggaggccgctgaacgagcggcatgccggaatttttgtttcccgacggccgcaacggtatggcgcaaacctgtggtcacttaccgaagttcaggatgggctagttcaccgttttattgatattcatcccagggacgtgcgctttcgagattgcgacgaagcctggcggttgcaggcggcgctcgacacgcaggccggcaccccacagcgggtcaaagttgaacatgctggcgaaaaggctgtggtgtccttcacatcgccccttccgacttgggcggtcaggcgtcttagcttgattggagagcgtgtgacgccgccgcgcgccttgttgggcttcgcactgccctcacaaaattgcgaagacgaattgcgctggctcgaaaaaacgctttggctggcgcgggatcagggggggacagcatga

SEQ ID NO: 27235 - DNA, 5529 bp, Candidatus Competibacter denitrificans Run_A_D11
atgacgaccgccacaattcagcaaaccatcgacgatctacgcttgaccttgacgcactacatcgaggccacatatcacatcagccaccctgtactcgtcgatcaacgacgcgaactgttgaagcagatcggcggcatttatcagaccccctatctggaatccacaccccggtatcaaagtgccagaccctataccgagatcgacaatttgccgtccgcggtactggaagcattacgcgctctttccgacacaggcgcaggcaagccaattatctacaataggccctatctgcaccaactggaagctctgcaagagattctcattaacaaccggaacctcatgattatgacggggaccggctccggtaagacggaatccttccttctgccgatcctaggcaaactcgctatcgaagcccgcgatcgtccgcaaggctttttgagatacaacgcggtccgcgcgctggtgctttacccgatgaacgcgctcgtcaatgaccaactcggacggctgcgcactatgttcggtgatccgcgtactgttgcgctgtttgagaattgggcgaagcggcctgccctgtttgcccgatacacgagccgcacgccctatgcgggtctgcgcacggcgaagaaagacggcaatcgcctggcatcaatcggcgagttttttggcgagatcgaagacgcgaagcgacgctacgaacagaattcttccggcgatgaggaaaggcgcgctgttgaactttttagtaccctaaaaaagcggggaaagtggcccgcgaaggaaagcgtgtccgactggctgggcaaagcgccgacgccgtgggcgaagcgtgcgatccgccgcccccacgatgcggaactgcttacccgccatgaggttcatgcatcgccgcccgatcttctaatcaccaactattcaatgctcgaatacatgatgatgcggcccatcgaacgccgtgtcttcgattcaacgaaagcctggttggaggcgtgtccaaacgagaagtttcttgtcgttctcgatgaagcgcatctttaccgaggcgcacagggtgcggaagttggactgctgatgcgcagactgcgtgaacgtcttggtgtgccggccgaaaggttccaagtcatttgctcgaccgcgagtttcagcgaggaaggtaagaagaatgctggcacgttcggcgcacaactctccggcgtcccgacagagtccttcgtgccgatccgcggcgaactcttgctacgctcccccgctgtcactggaacggcggccgacgccgccgtcctagccgcagttgatctcgatcagttctattccgcggaacccaagcaacaactggcagcgatcgagagctttctagcgttccgaggccttccttcccaggatgatgtggacgcaacactttatatggcgttacgtgattatgggccgttcaatcgactcgtcaacgaaaccatggttgccgcagtatccctcgccgaactgccggtcattgtgttcgatgctactgttccggcggatgcagcagagaaggccgccagtgtattgctggcacttggaagccgcgcgcgggaaaagcccggcgaagcgagtcttttgccgtgcaggatacattcgttcttccgagggctgccgggcctatgggcgtgcatggattctgactgcccggacgcatccgcagacacacaaagtccggccgggagattattcgcccagccgcacgaaagatgtagttgcggtgcgccggttctggaatattttacatgccgtcattgcggcacgtcctatgcgcgcgcctacacaaacgatgtagcgcagccacgctatctgtgggccaagcaaggagagaaaatcgaaacagcttccgggcttctggaaggtttgcatccgctcgatcttcttctcgaggaaccgcctgcggaggatcgtgccaaggcggcctactacgatctggtatcgggccaactcaatccggacgagctaggagagaaataccgtactgttttccttgcgcccgagaagccggtctcctccgacgcacaggactcggcccgtggcgcgcgtccggggcagttcgctccgtgcgcctgctgtggccggtcggccggatatggacaatccagcgttcaggaccaccagaccaagggcgatcagccgtttcaggcgcttctgggatctcagcttcgaattcaaccccctggtccgcaacagcagacctcctttgcgccgttgcgcggacgcaaagtgctcatcttctcggactcccggcaggtggcggcacgccttgccggcacattacaaaactactcgctgcgcgatgcgatacgggcgcttctgccagtaggttacgagatcctgcgcggcgatcctgatttctccaagacgcttgtgcttaaccatgcctatctggccgtgctggtggcagcgcataaactcggcgttcgtctcagacctcaacttggcgatgcggaaacactgtctgaagtggaaggggcaagtcccggaccggctcctgccggtttacaactgtttcacctccataactcattgtcgcgctgccctcagcgtctgatgcaggccatttttgacgcactcaaacacactaacatggggcttgatctggaagcgctggcgatcgcgacggtaggcgaggctcctgctcactcggccaaaattaccaagcttccgaatttgccgggcgtcgctgagaccgacgaggccaagctggcggtctgtcgcgcgtggctgcgatgctggacgcttgatccgggcatctggttttcagacatgccctgctcgtggtggaacgaccgggtgacgtctcacaaaggagcgttcaccgccatgaaccgcgtgatcgtctcggcgcaggcgagatcggtgttcacgaagcagtggctttccaccctcatgaccatcttcaccgagcagacgagcgggggcggccacaggttgcttgcctcgaagctctctctttacttcggcggtcaatggcggcgctgcaacagttgcaagtccgtccatcgttccgtcggaaccgtcagcacatgcattgactgcgaaagccctgatgtaagcgacttcgatcctgataccgatgaggtttaccgcgcacgccggggcttctaccgcgaccctatagcgttggcgctccatgcccaagccccgcaactgatgaccatcatcgctgcggagcacactgcgcaacttggcgcggcacagccggatgaagccttctctcacgccgagcgacacgaaatacggtttcaagatatcgacgttgcatggagggatagcgaccggcccggagatccagctatcgacgtgctctcaagcaccacaaccatggaagtcggtattgatatcggcgaactctccggtgtggcgcttcggaatatgccgccaggccgcgccaactaccagcagcgcgctgggcgggccggccgacgtgccaatgcagtggccacagtcgttgcattcggcagcgccgacagccacgacgatcactatttcaccgatcctggggaaatgatccggggcagcgtgattgatccgcgcctcacgctggaaaatccagagatcgcccgccgccatttgcgcgcctatctgctccaacgctatcacgaagaccgtatccccggaccatctcccggcgccgatcccaatctgttttctgtgctaggcaaggttggggatttcaagacctacggatcggtgctcaatcgctacgatttcgcaaaatggctggaagatcatgctcaggacctcgctcaagcagcggatcgctggttgccgagggaactaccgacgaacgaccgccataaattaattgcggaaatggcgatggacgtaacagccaccatcgacgaggctatagattttaggcagggagaggacgaagaagacaagcccgtcgaggacaaagaaaaatctgacgatcaggccgaagttgagatcacggccgagccggacgacaacgggcgtattgtcgatcccgctactgacaagcttttggatcggctgctctatcgcggcgtggtccctcgctatgccttccccaccgacgttgtggcgtttcacgtcttcaatcgcgatcagtccacaccgttcagaccggttattgactatgcgcctactcaaggtctcacgctggcgctatctcaatatgcaccgaacaaacagctctggatcaacggaaaacaatacacatctaaagccgtatattctccatatcccaacgaccggtggatcgcttggggaaaacgcaagctttatttcgagtgcaatgtttgctcgcatgccaagacggaggtttatgtaaaggaacgcgagaatgcgacagaaaactgtccagcctgcaactcgtccagttctttcggacctgcaagggtttggttccgtcctgtcggcttcgcccatccgatcaacacaccgccagaaacggagcctgatgcgccgaacgaaaccgcgcgggcaacgcgcgccaagctggtcatgcaaacccccaagcccgacaaaggctgggttcaagtgtccgaccgggtgcgcgcttttagggcaagagaatttcttctcgtctcgaataccggcatcgacggagacggctatgattattgcctcgcctgcggacgaatcgagtcgtcagccgcccccgatgaacttctttcgcaaccacacgcaagaccgtttcgcgacaataaagacgatccatgccccggaggggcggccaagcgtcatgtcatgctcggcaatgatttcaaaactgacatcgcgctgttttcgcttccgctgacggatccgttccgattgcttcccggcagtattgaggctgaatccgcgcttcgaactgtatgcgaagctttagctaaagcagcatgccagacgctcgatatcgaaccaggagaggttcttgcagaatatcgccccgctttgacagagaacggtaccagtggccatgaagtcgaaattttcctctacgatacgttgtcaggaggggccgggttctcaaccgagtttgtcgtccgcgcttccgaactattcgaacgcgcccagagtctgcttgcaagttgtccggaaggctgcgatgcgtcctgctatcgctgcctgcgaagcttccgcaaccggatggagcactctctcctggatcgcaagctgggtattcagctcttagaacatgcactcaatggcggatatccagcctatccgcccgaacgtgcgcatcgctctctcgatctactagcccgcgatcttgaacgccagtacagggcagaattttcctttgcccgaaatgtgctacgcaatgacgttacggccggtatcgtccttatccctatagttgcaacacgtctggcgacaggtgcagaaacgtggatagctctgtgctctccgctagccccaaatattcctagcgacctcacactccaaaagctcagccctcaaggactggcgatactagagtgtgccaatgatcttatcattcggcgacatctaccagatgcaattttgcggcttcagagtaacttaagataa

SEQ ID NO: 27236 - DNA, 1569 bp, Candidatus Magnetomorum sp. HK-1
atgaaatacgcaatcaacacaaggctaaaccaaactgttccggcaagcgataatatttcaagatatgtttcttatgtatgcccaacatgtaaaaaagctgttcattttgtatccagcgtaaataaagatacttatattagaattcctcattttgcacacaataaaggtgaaggatcaactgaatgtgaattttattgcccgccaaataaaggtactcaagtcaattatcttggacaaagcaaaagaaatccagttttaaaaagaaaaaaacccattttttctcgacatcttaaaatccgaatatctgattttagatggtctcttgaagctattattcatttaacgcgttttactggtctaatccgcattgaagaaggctttcagggcaccatagaaaaagaggttgaagataaatctttttttaagttcaatcttgctcctaatacagattatagcattgagattgatgatcgcttgacaattcctttgccaggattatccgaaaatcaaatcaatattttttgtgataatggaaaacatcttacccaaagccataaacctctatattggggttcaaaatatttttttgtttggcagaaaaaaataaaaaaaaatatcccaaaagaaatactgggaaaagaactcttatcactcaatgaatgggaatgctctgaaatagtttttcctgaacaaaaaaatgcctcaattgatcaatggatttttgatcagctaaacagaagcatggaaagccttcctgatcaggaaaaaattacaattatatttcctccagaaaattactttgatgatgaacatcccttaattctgggcatttatagagaatcttttgaaaagccaattcaaggagaattatctataaccatcagggataaagaaataaagcctataaaaattaaccagacatctcctgtgcatataaatactgaaagttcaaatcaatcaatagagtccatgacattcaatgaggaaatgtatatctgtccaaaattggatttatctaaaaaaaatttgaattatcccgctgtttttttacgaacagaccaggtttgtgtagaggcaaacgatttaaaaaccattgttaaaaatattgatacacataaactaaaagaaatcattttgcccgctaaaatgccggtaagtttcattatagacaaagaagatacaagaatgcgtcaaataactatcaaacctctaaaaaatgagttacttgagaacttcaaaaagcgtttacttgataaaattattgagtctttagaagatgtcagtctttccctggatctcaattttgaaaattatggattgattatccttttaaaacaacgaaaaagcaaagacgaaattttgctttcaaatcacataaaaagacagattcaatggttgaacagtatgaaattgcaacagggatggtatgggaaaggattacccaatactgtcaatgaattaaaaatatatcttaaagggcacaatcaaatgctcagacctgaactggaaccccattatagatctatgcttatgaattttaataaaaataatttaaaaaaaaggtgttaa

SEQ ID NO: 27237 - DNA, 1785 bp, Candidatus Magnetomorum sp. HK-1
atgataggaaaaaattatccaaaagaaaaagttttatatatccttgaaaaaccttttgaggaatggcttgcagtctttgataaaatttctgaacaatataaaagacaatggagtcataaatttccttcagttaaaggtttcagagataaacatccaagtagttatgaaccaagatttaaacaattagttagcattgccaaaaagaaaccttatgatgaaaagctccagggactaatattaaaagaattgtcagttggttggattatttcaaatgataaattttataaaattttagaaaattataaaaatgatgaggactttcgaaaagaagggcaaatggttccccctaattcattcttagatatcggatgtttctactacttgcgaaaagcagagaaagagaacgaggttgaccttgaagatatcaaactttattacgaatttggatatttcttaaaagatccaatgattgatatgattatatatgatgatgccaaacctgatttcgaaaatcaaaagattccaggtcaattcatgtttgattttataaaacattacttcacaaatgcagcaatatatgcagacattaaggatattcaaaaagatgtagagctgacaattgatgattttgccgaattcatgacagatagtttaaaagaagtaaaagaaacgcttaaaaatggacttaatcaaaggaagatcaatgatgattttgaaatcaaaattgcacctgtaaatgaaaagattcaatccatagaacaaatgatggaaaaattaaaagcaagcttcaaaacaaaacaattagtcgtgaaaacagctataccagagaaaacagcgaaatcagaaaaaccagagaaaacagcgaaaaccgatagaatatatacgtcaattatacatcttacacaaattcaaatacctgaaaaacttgaaattactgattcattagataaacttcatctgcacatgatgaaaaatttgaaagcaatcggtttgattaaaataaaagccaggcaattggcaaatgaaattctggctggcttaggtgcaggttcattgataatgttttcaggttccctttctcgctttcttgcagaaacatgtgcaaaaagcattgctgccaaaaatgaaatacaagtcttacatatccctgtcggtttacttgatggctaccagtttcatcaagaactctcccattgtttagatcttgctttgcattctgattatttaactgccatcatttttgaaggaatcaatctgtcagcatttgaatgttatggacagacattacgtcaaatcattacaaatcgtctgattactaataatgattcatacaatcatattgcatgctttgctacccttgcagagggactggctggtttgccattgacaaaggaattctgtgaattaggtcctatttttgatacagatttgcttggatggggtgcaaaggggatttcaggaaaagctcatggaggcacaatatcaaaaaccaactggaatcattggattaattcctgccccaaaagtgaaattcctgaatcattacaaacattatttgaagaaatgtctgatgtaagtcaattgtggaaaatatccatacgtaaaaccagtcaatttcttcaaaaagaaaaccctttggaatctatgggctttgcctggctgatgcaaagagccttttgtgatgaaaaaaatcaaaatgtattgtttcaattttgtgaagaaaatatttgtgataataaaattgatgaccgcgttgtaaaaatgattaaaaacttaaaagtttaa

SEQ ID NO: 27238 - DNA, 1056 bp, Candidatus Magnetomorum sp. HK-1
atgcaaattatttcccataaagacacgattaatattattctccaaaatatgagtcttcaaacgaatgcttttacagataatcatcatttgaaaactatcgttgctgaatacttgcgatatattttaaatgatctttgtatgacaaatgaaaacagcattgcacctgtttatcaaaaaagtttaacaaatcaggtttatcgtcatctcaaaacctttttcagtaatcatgaaaaacaaaaagatcgtttgatcaaggtcattctatggcaattgctaatgattcgagatattgctaaattatcaggaggttttctgttaccagccccaatacgtgccattcaaatgccttgttctgattatgtattgatcgttggtggcatggaaactaaaaaactttctgaaattatcggagcaacagtcaaaattgccggatttgcaagatatatccataaaaaaagtatcaacgataacacactaaaacaaaacaatattttatggcaagattactattcctacctcggaaataatggcatatcagaccttaatgactggatacaacagaaaaaaaaacaggccaaaatgcgattagagcaggtatctgttgattcatttcaaatagatgtttaccatccaaagcaaaaagtgcatatgagtcagaataaacgatggatcggcattgagaaattacaggaacataatgacgaaatgatgctttgtcgaagaatagaaggcaaaagattttcttttttttggggtaaattatcacataaaaaaccctatccattgatacgtgaaacaagtattcatttcaaagatgttagaaaattgcaatatgggattgatcattattataaatgccctactgaaattattgtcaaacaactgaaggactattaccagataagtttgaaaaatagacttccacagtcatatcagcgaataattatggctttaacgcaggcagtaaacgaaaaaaatctttatttttccaaagattttaaaaatgacattgtttacttgcttgagaaattggggattcatgtccgagaaatatag

SEQ ID NO: 27239 - DNA, 5388 bp, Candidatus Magnetomorum sp. HK-1
atgaaagaaaaaaatatgtccgagaaatatagtgttcaaaatatggttgaagctttaaacagtacttttacagcttttcttgaaatgcaatatcatatcaaagatgaaagtcttattcgtgaacgtcatcaaatgctgacacagggaaaaaatattatttcacgtctgccatttatagaagcaacacctgtttacaaacaattaaaatcatttaaaaatgttgatttgaatcctattgtcaaaaaaacattgatcaagctttctactttaaatgttggtatttatcccaagccttatgaacatcaagtggaagctcttaaggctttttttaatgataataaagacttggtaatttcaacaggtacaggatcaggaaaaactgagagttttttaatgcccattttaggaaagcttgcaattgaagcctcagaaagaccaaatactgcaaaactatctggatgtcgggcacttttactttatcctttgaatgccctggtgaatgatcaattgggacgtctgagaaaattgtttggaaatccagaggttgcaaaaattatttcaggtaattgtggcagattttttcgttttggcgcttataacagtcgaacaccttatccagggcaacgatccagtgcaaaagattctcaacacatgaaaacgctttttgaggattattatttaaatcctatatttttaaatcgaaaagaaaaacttgaaaatatgggaaaatggccgtcaaaagatttgaaagctttttatgcaaaagatctggaagcaaaaaaacaataccaatctggtaaaaaagccggggaactctatacgcaatataattggaatgacaggctaaaaacccagtcaggagaccgggaacttctcatgcgacatgaaatgcatacattctgtccagatattttaattaccaattattcaatgctggagtatatgttgatgcgtcccattgaacgctccatatttcagcagacaaaaagttggttgttttcagatcctcggaatgaattgattcttgttattgatgaagctcatacttatcgtggtactggtggtgcagaagtcgccttgttgatcaggcggctacaatcacgtttaggagtatcacgagaacgtatccgatttattttaaccagcgccagtcttggaaacgaacctgatatcattacatttgccaacgatttaactggatttccacaagaatcaaaatcatcaatatttcatgtcattattggtgaaaaagaaaagtatatgcctggcagaaatgctacaataaatgaggcaaaggcattggcatcctttgatatcaataagtttctaaattataccattgatccaaaaggggcgataaacagtatagaaattctttcaaaacaattgggttggtcacaaaataatatggattcgcttcatcactatctttttgatcaaatgaatagttttcctccggcaaaagcattgattgaaaaaatttccaaatttccccttgaattcaaaaagctgtcagaatccatattcccaaaagcctctgcatctgttcaggtaaaagcgacatcaacattactgtccctatgtacttttgccagacgtgagagtgatggtagaatttttttacctgcacgactgcatcttttttatcgtggattacctggcctttatgcctgtatcaaccccaaatgtcattgtcgtttggatcaaaaaggggattcttttattttgggccgtctgtatggaatatccaaaaataactgtgattgcgggggaagagtctttgaacttctaacgcatcaggattgtggctctgcatttattcgcgggtatattcatggaagcagtggtgattttcttttacatgaaccctctaaaaatgttggacgtgaaataactcaagaattaatagaagttcacctattggttgaacatttaaatcaaccctcagaagctgatgcttcaaaactgtttatagacataaacaccggtaaactgattcgaggaaaattaccagaagatcctatgagctatttacaggcctttattcctaataaagcgcatcctgaacgtattcaaggaaaaatgaaaatatcatttgatcgctgtcccatttgtaatcgtggattaacacaatcaccatataaaatgatgtcatttacaacaaaaggtgagggagcatttgccaatcttgtcaaagcgcaaatcattcatcaacccccacaaaaaatagaacataaatttgcgcccaatgccggccgaaaaacattactgttttcagatggacgtcaaaaagcagcacgtctggcgctttttatcccaagagaggttgaactggattcattcagacaggttatctgtttggcctggcaaaaattacaacaactcaatcgcgaagcacgattgacgaaagacctgtatatagctttcattgctgtggtttcagactttcatcttcaatttttcgatcaaagagatcaacaagatttacgtcaacatatacagcactttgaggaggattatgactctgatttacaggatgtgctggaatatggatgggaagtgacccctccacccaaatattatgaagccttattgcgacaattgtgtcaccctttttattcatttcaagcaacaaccattggatatgtttcaccatcaaaacgagcagaaaagcgtttaatcaaagactttgaatctattgtaaatatacccaaacaggaatgtctaaatataactctttcgtggatcaatgaacttctaaaagaatacgcatttaataagtccattccagggatacatcgtaacagagctgcaaatttttcaagattgtggggtcattctggaattttcagatccagtatgaaaaaaattcttctcaatgatctgcaaataaatgaaacatcaataattgaattacaaaatattctttgcaaaaacttatgcaacgaagcagacgagcgatattttcttgatccctcaaatatacgcttgaccattgatcttgaacgaaactggtaccactgccaaaattgcgcttatatttctccagtgatcgttgctaagcaatgtccacaatgcaaaagtaccaatgtaaacgaatgtcaccccagtgattcatatatcaaagcacgaaaacgtttttttcgggaaccagttttggcagcattatctggaggtcatcccaggcacattacagcagaagaacacactgcacaactttcacaaaaagatagtggaaatctttatgcaactacagaaaaacatgaacttcgctttcaagatatacttcttgatgaccgcgaaggccccattgatgtattaagttgtacaacaacaatggaagtgggtgttgacattggttctttgattgctgtaggacttcgaaatgttcctccacaacgcgaaaattatcaacagcgtgcaggtcgtacaggaagaagaggtactgctgtttcaacagttattacatatgcacagggagggcatcatgatagctattatttccatcatccagaaaaaattattgctggtcaggtgagaaaaccagtaattgatattaccaatgagaaaattgttaaaagacatgtgtatgcttttttatttcaaacctttttccatgaaaccattgataaagggaaagcaagagtaagcaaaacatcggatttattttcagccctgggaagtaccattgattttttcaatgaaaatgatcatgaaccttttaatttaaaagcttttgaaaaatggatttatttttctcagtcttttccagaaaatgatctttttcatgaaatattaaaatggcttccgaatataagactgcctgctcacattcccaataaaagaaaatggctggaagacattgtgcaagatttaattaagaggcttaagctgatatttatcaacaaacaagaatctgaaggacttcttgcctttctttttgatcaaaattttcttcctacatattcatttccaagagaccttgtcagttttatggttcagaaaaaaaagaacaataaaattgaaatcaaagaacaacctcagagaaacatatctcttgcccttagtgaatttgcccctggaagattggttgttatcaataaaacaatctatcggagtggtggcataaccagtttgaagtctacagtcaaggatactgatcaggctgaaaaattatttgcttcgaaacaactgaaaaaatatgtccattgtactgcttgtagttatgttcaggatacatttacagtctataacaccattgtaaaaaatatagaaaattgtcctatctgcaatggaatcattgctgaatcagatatgttaattcctgaaaaatttcatccagaaaaggctaaagccattgaagaatttgataatgatcaggagattacctatgcaggcagcgcgcaatttccggttccagtgggtgaagtggatttggggaattggcggcccattggaaaaaaaggccaattgattcatgcactggatcgtcgtcttgttattgtcaacacaggcaaaggatttgacatggatggaggttttgaaatatgcgtcaaatgcggagcaactgtcccaataaacagccatttgtcattaccgaaaagacacaaaagaccttatttactttcaaaatatgaagaattgtgtactggagaaacccgtaaggtaatattgggcacaacatttttatcggatttattgttaattcgtatccccatacgtaagccttttagcactaacatgatatcttctattaatcgtaatgcccttgaagatgcattaagatctctttctgaaacactgctacttgctgccagtcgtgttctggatgttgatcctgtggaatttaaggtaggttttcgaatcgttccaaatccaaaatccaaagcagttgatggtgatatttatttatttgatagtctgagcggtggagcggggtattctgatcaggctggatttcaaattgatgaaattcttgatacagcattggagattttaagggaatgtccatcaaaatgtgagcattcatgccaggattgtctccggcattatggaaatcaattttggcatgataatttggatcggtttcttgcgctttcgttacttaattatgtaatgacaggaaatttgccaaaagcagaaggttttgctgaacagcgaaagcaattatcaggcttgaaaaggttgttggttttggatggctaccagtgcatagaaacagatgattgtcccttatccctgcaatatttgggtaaaatgattgatttaagtatttgtccagccttaatggaaagtaaatttaataaaaattcttctacaattaatcattattttttacagcgaaacttaccaggggtttatcagatggtcaaagatttgcttaaataa

SEQ ID NO: 27240 - DNA, 1899 bp, Candidatus Thiomargarita nelsonii
atgaattataaaccttatccaaaagaaaaattgaccttgatactcaacaaatctgatgaggaattacggactttttttaatcaaattcaaaacaataaacacatattaaataataaagtacttcctaatgttcatggttttcgggcagagaatatagaaggtgtaccgatacgttttaggaatttactgcgagaggctaaaggcacgtcatcaaaaaatatgaatgcccagaaacgccttcaatttatttgggattcttggatcaattctcactcaacacttcaggaagtcttagaaaattatgataacagtgcagattttccagaagatggaacggttataccagctaatacctcattagatattggcggtttcacttatcttgctgaagccagtcgaagccataatttgtctaaagctttgatacaacgtttctatgaatttggctattttcaatcagattataatattgactttattattaatagtattaaagagccctcaaatgaaatcagagaaactgaactcacgcttgacaaattactccccaaattgccacaagtacttcacgatttacaagtacgtgtcaatcgcatcccgtcacgtactgagccggcactcctcaaacaaattgtagaaacacatttggttgaggtaaaagcggcaacacaaaaagtgcaactcaatgcgaaaaccaatacaagcgatttgaaaacattatatgatcaagtcgaaaatttgtcgcaaacgcttaatgttatcaaacatcagcttgacatgacagtcagtaccgttcagttaagtgaattaattgataaggttgagctgattcatcaacaaatgacagaaatacctatcaaaagtgagatagatgacttaaaacaacaatttgaacaattgaaacaagaactgaatgaacaagaagaactattctttaatgaattggagcagcacaatagtgccaccataacgcaaacgggattgtacaccagccaacttaaaatatcagcaccgcctaaaatcctgtcaaaagacgaactgctatcccatttaacggataacttaaaagccattgggctaataaaaggcagtgcagagaatctagccaaagaaatcttagcaggcttggcagcgggtgaatttattgtgttttcaggctccttagcttttcagttcgcacaactgtgtacgcaagctatcgcggcaaaaccgccaccgactgttattcatattccgattggtttgctcaatggacaacagtttaatgaatatttagggcgggctattaggaaagctaaaacggaaaaacatgtttgcgccattattattgaagggattaactgttctgctttggaaatttatgcacaagccttgcgtcaaatcattacccagagattattaggacaaactgatttagcaccccatatcgtcttttttggtacactcgtagaaggacttgccacgctgccagtgccgctagaactgtgtgagttagggcctatttttgatactgatgtattggggtggcgccgtcaattgaaaccaatcacatataaaagtggtgcaatatccgatcaagtttggcagtcatggagagcaatagataataagcttgattccgattttgaaagagaactcattgataatgtaattttttatccaagtcaattgtggaaaatttgtgtgcaacaagcgtattatcgtttagatattttagacgattcagttgaagaaagtattttaaattcattggcttttggatggttcatccccagagcggcggcggctgaacaagattggatggagattgaaaaatggctattggaacacgtttcatccgaagatacccatgaaacacggataggaaaactgttacgccctcattgtgaaaataaataa

SEQ ID NO: 27241 - DNA, 1080 bp, Candidatus Thiomargarita nelsonii
atgcgtgttatccacaataaacaagaaatgttaaaaaaactgattcataatattggactagcacctaccttaattaaaaagtccccttccattttgatggatcagctaattgccgaatatttgcgacacgcgctatataccttgactcacggttcgacaacggtgcaacccgtttttgtgacaaaattgacgaatcaagtacgctgccaattaacgccactttggccagacatttttcaaaatgcaaacgccgatgatccaattcgccgtgttcttgaacaactcaagcaagtaggtgatgttgctgaactcggcgatggttattggttaccaacgcctttacgtttggttagattacttaataatcgtcaaatcttgctgattggcggagtggataccaaatcactgataacacgtttcggagatattgtgcaaccaatgggatttgtacggcggataaaaccctctgccgatataaagcatcttattaatgccggtattgattggcaacattttgaagattgggtgggtgaaactgaaaaagctgatataggcatttggacacgcaatttacttgatgaggcacgcaaacgtctcaaacccagtggtagtgatttgactgattttgaagtttatatgccctgtttgtctcaaactaatttacaatattatcgttggatatcagtacaaaaactaaaaaaagtccctaaagaaatagtgctttgtcgctttaagcaaacttttgtgacttattgcttaggcagattgacgggtgaaaaatcagtacgcttgcaccgcgaaagcgagcttgggcaagaaatagaaattcgcaagctattgtatggattagacgcactttacaagtgtccaaccaaggctaaatttgaacaacttaatgataaaaaaggaaaattaatattccgtagttggctacctgcgacacagcggcgtttattgttagctttagggcatgaagtttctagccgtttgtcgttaagttatgaagtttcgagtgattttcaaaaagacattttttcccaaatacaaaaactgggtattaaaattattgaggaaaagtaa

SEQ ID NO: 27242 - DNA, 5391 bp, Candidatus Thiomargarita nelsonii
atggatataacagaagattacagtgttcaacatgttgttgaggcactcaaggcaactttaatctcttaccttgaaatgcaataccatatcaaggataccagcctcattaaggaacggcggcgtttattggatcaagaaggcaccgtttttcagcgtccttttatcgaatccacccccatttatgaacaaggtacgccttatgacaaaatagatattccgcagcccgttaaaaaaatactcacgcaactgacgaaattcaatgttggtatttatcccaaaccctatcgacatcaaacggaggcattaaaggcgtttttaacggataagcatgatttaatcgtggctacgggtacaggctctggtaaaactgagagctttctcatgccgattctcggctcattagtgcttgaatcattgcaacgtcctaaatccactaaaaaatcgggttgtcgtgcattattattgtatcccatgaatgctttggtgaatgaccaattatccagattacggcggctatttggaaatgagaaagttgcagaattattagcacaaaatcgggggcggcgagtgcgctttggtgcttacaatagccgtacaccttatccggggccacgttcttctaccaaagatggtcaacatattaagcctctttttgaagaatattacttgaatgatgagtttgttgctaagaaagatgcgttggaggaattgggcagatggccaagcaaggacttggaaggcttttatgctttaaacaaaatggagaaagctgctaccaataccgagcgtaataaatatcattgggacaaacgcttaaaaactcagccgaatgatcgagaattattaacgcgccatgaaatgcaagcgacttgtcctgatctcttaattactaattactctatgcttgagtatatgttaataaggccagttgaacgtgatttatttaatcaaacaaaaaattggctggctgccgataaacgcaatgaattcattttggtactggatgaagctcatatgtaccgaggcaccggcggggcagaagtcgccttattgattcgtcgtttgcaagcgcgtttgggcattcccagagaaagaatgcgctgcattttaaccagtgccagtttaggtgaaactgatgatgctaaagtcgctgttaaaaaatttgcggcggatttaaccggtttaacttcaaaaactcaacgccaatttaaattgattaccggtgttcgagaaaagcggcgcggtgccaaggtagctacagtggcggaggcacaagctttagctgattttgacctaaaacaattttacgacaactattcaactaatgacagcaaggcggctgccattgatagcgtattgactttggcaaaatccctcaaatggcctacgaaaaagccgactgatcttcagcaatatctgtatgataatttaacgggttttggtcctgctgagacacttatcaaacaggtaagcggcaacgcggttgaattcacaaaactagctcaacaattatttcccaagcagccaactcaaacgcaagccacctctaccttgctcgccttatgtacctttgcacaaggcttagataaaagagtccttgcccctatgcgcttgcacttgttttatcgaggattgcccagtctctatgcgtgtattaaccccaattgcaatcagcggctagataattcagaagaaaaatatttattgggtcgtttgtacacagcgccaataacccattgtgactgtggggggcgcgtctatgaactgctcacccatcaagattgtggctccgcgtttattcgcgcttacatccaaggtactcaaggcgattttctattgcacctgcccagtggcaatgtcggacaagaaagcgtgccgcccttagatgaaattcatattttggtggaaaaaaccattcatcccaatatatcatatacgcctatttggcttgatattaaaacgggacgaatagcgcggaaacagcctgacaaaacgaatgattttttgaaagcttatgtccctacaaccccacccgaattggtgaatggtaaactacaaatcactttttccgattgccccgtttgtactcgaaatttagaaagattccgctacaagctgagcagtttagaaactaaaggtgaaggcacgtttgccaatttggtcaaaacacaagtcattaaccaaccgccgcaaaaagcggaaagctctaaatctcctaatgctggacgtaaatcattgttgttttcagatggtcgtcaaaaagccgcccgcttggcactctatattcctagagaagtcgaacttgactcatttcgtcaagcgatttgtttagcagcgcaacgtttaatcaagttacgtggtgaagcgcgtcccactcgtgatctttatgtggcttttgtggcagttgctcttgaatttaatctgcaattttttgacagggacgatcaacgagatttacgccagcatattttgacatttcgtgacgattacgaagctaatcttggagatgctttgggagagccttgggatgtcacaccaccagcgaaatatcaagaagctttgctccgtcagctttgccatccttattattctttacaaaccacgactattgcttatgtagaaccctcaaaacgcgcccaacgattattaaatcgtgagattgaaaaactaggcttggatgccgaaaaagccaatatcacaatagcatggatcaacgatctcttgcgagattatgcctttgataaaaccatttataactcacaacgtcaaaaagcagccggttatccgcgagggcggtggggcaatactggcaaattcagaaaaattttgaaacaaatattactcaagcattgcggtttagatgataagaaagttattaagcaattagaagacatattaaggaataaactgtgtgtcgaaaaaaaccagctttacttacttgatcctaacaagctccgtctggttgtggatttagaacgcgattggtatcaatgccaaatgtgtgctttcatttcacctgtcgttgttgctaagcattgccctcaatgtggtggttctaatgtagaatccttatcacctgaacatgactatatacaaagccgtaagcggttttggcgtgatcccgtggcgaatgccttaacgcaacaaacacaccctcggcatattaccgctgaagaacacactgcccaattgtctcataaagatgttggcaaactctatgcgacaactgaaaaacgtgaactacaattccaagacattttgctagataaaggcgaaggggcagtggatgtcttgagttgtaccacgacgatggaagtcggggtggatattggagcgttgacagcggtgggattacgcaatgtgccaccgcaacgagaaaattatcaacagcgtgctgggcgatcagggcgacgtggttcagcggtgtcaacagtgattacttatgcacaaggcggacatcatgatggctattattttcatcaccccgataaaattattgcaggcgatcccagaaaacctgtcgttaatgtgaacaacgaaaaaattgctaaacggcatattcacgctttcttgtttcaaacgtttttccatactaccattaaccaaggtaaaatcaaggcgaatccctcctcaagattgttttcagcactcggagacactcaagatttttttaaaggtgataatccagtcaatttactggcttttgaaacgtgggttaagcaaaatgtgatcgaatccaccggcaacttacgtgaacagattttagaatggctacctgacattgaagtgccagatagatcacaatggttgcaaaaaatatctgaaaccttgctagacagactgaacgccgtcacattgaaagaaagcgatgctgaagaattgcttaattttttatttgacaatggctttttgcccatgtacgcatttcctactgacttatgcagctttccgattgaagaatggacaaaaacaggtattgctattaaagagcaaccacagcaaagtatcgccaaagccctaagtgaatacgcgccagggcggattgtgattgttgataaacgtagctatcgtgtcggtggtgtcaccagcgcggctgccaaaaattctgacctcgataaagcggctcccttgtttaaggctaaaaaactgtccaaatatgtccattgtacgcagtgtagctatgtacaagatacttttgaagacgataatacgccaacattgcttgaatgtcccgtttgtcacagttcactgaaagcatctgaaatgctgataccggaagtttttcgtccagaaaaaggtaatgaaattcaagaatatgaccgtgaccaagaatggacgtatgccagttcagcacaatttccgctaccggtagcagaggattttgactggaaatctatcggagagcatggtcgtttcacccaaacttcagatcgccgcttggttatcgttaataaaggtaaagagcttggcacggaggaaggatttgaaatctgtgaaaaatgcggagcggcggcacctattaacacgcaaatcgtcttggatgccaacaagcataaacgtccttatttattgactaagaaaatgactgacaacgaatactgtaatggtcaattacaccaagtcttactcggtaccgttttccgctccgatctcctattgattcgcatctccattgagtctcctttccggactaacatgcaatcttctgtcactagacaagtcttagaagatgctttgcgtactttatctgaagccctattgttagcagcgagccgaaccctagacattgatccgacagaatttagtgctggatttcgtattgtgccgactaaacaagacaaggcaatagaggcggatgtctatttgtttgacaccttaacaggtggtgcaggctatgctgaacaagccggacaacagcttgatgagatacttaaagaaacacttgatttattagaacattgtccgaataaagaatgtacccattcttgccaagactgtttacggcactacgccaatcaatactggcatgaacagcttgatcgttatctggcaaccgatttgctacgttatatgctgaccggcatggtacccagtattaaagccgtttcagaacaaaccaaacaattacaagcgttaaaaagattgcttgaattagatggctatgaatgtcatcaagacgacaagacacccttgctcatcaaatccaatgctcatcaagtgggtacttacccgggactgctggacgccgataattttcagcatcctctacgggatgattatcaacgcgaaaaagacattcatcttgtcaacgattactttcttgatagaaatttgccgggtgcctatcaggcgctaaaaaatagcttttatatgggagagtcgggaagatga

SEQ ID NO: 27243 - DNA, 1230 bp, Chromobacterium violaceum
atgccaaaaggttatacaactgttgttcggattaacccacgggaggctaatctaaagagaaaattgcgggaacacctgcaatctcttggttttaccaaatctgaggagggggctttgcaagcccctgggaatggcaaagatgcgatccgttctctccatcgtgcccaaagagaagaacggttctcggcaaaccgagaatttgtctcccgcaaaagtggaaggctgatgcgattctttgcatcaggtaaggaggttgagccggagaaaatatcgcctgtccttgaacgtgtttcgtctggaactcttcatggcgacctcttcaggctcgcagcgctatcgtggtctgttcctgtttcaaatggattcggtaggcgtctccgttaccttgtctgggatgaaaacaacgggaagctaatgggccttattgctattggcgatcctgtcttcaatcttgcagtacgagacaagtttatcggatgggattcgcatgacaggagtgcccgccttgtgaatctgatggatgcctacgtgctgggggcactccctccgtacaatgcccttctaggtggcaagctgatagcgtgtctgcttcgcagccgtgatctttatgacgattttgcaagtgtctatggcgacacgactggagttatctcacaagaagagaaaaaagcacgcctgctggcaattacgacaacatcgtcgatggggcggtcatcggtttataacagactaaagctcgatggagtccaatacttaaagccaatcggttacacggggggctgggggcatttccatattcctgactggctgttcgtggaactgcgtgattacctgcgcgatattgatcacacctatgcggaccagcaccggttcggacaagggccaaactggcgtttgcgaacgacgcgagcagcgctgaccgcgcttggtttcaaggatgatttactgcgacacggtatccaacgcgaggttttcatctgtcaactcgcggccaacgcctccagaatcctacaggcgggaaaaggtcaacctgatcttacttcactattgtcggcaaaagatattgctgagcaggcaatggagagatggatgatcccccgttcgagatgcaggccagagtaccgtgactggacgtcaaatgacctcattggcatgtttggaaatcaagctcagatcctgcccacccagatcgagagcgcagagatagttaagagagctagccaactctaa

SEQ ID NO: 27244 - DNA, 1668 bp, Chromobacterium violaceum
ttggaatacgccatcaacaaggtgacaggccgcttggaatcggcgactgaggccaagaggtggggccaatacctgtgcccggtctgtaaggcaaaggtcagtcatcgctccggcgcgaaaaggacaccttatttcgcccattggcccggttggggatcacctgactgtgagaatttcgtcccaggccagtatgggcatcacacccagggccaagcttctgcttctggggaaaggcggagaatggagctccgcctgctgatcccaatgggagcggagcgtgctggatggtcgattgagttggtgctccctccttgccatgaatgtcgagccacggtctcgctggacgtgggggggcggatccaaacacttgatatgcgcggtatgcaggggcgccgccgcgtgaccgtcgagctttcggtggcaccctaccgaattgtctcctttagcggtaaacccgacccctcatttgtcgcaggtgttgagagggaatgcccgggtctacccaccatgggcgccgctgcctttgccgctttgggacgtggcgagttaaagggtttcccccgaacatgggaactgaggggctctgagacttttgccctactgtggagggagcctgccgagcctggtttccccgatgaactggcggtcgataggttaagtggccggcaagggtggaacttggctctcatcactattcccgatgaaccgtctccagaatgcactgactggctccgctcatttacccgactgcccttcgctccgccagtaccgtctatcattcccatttggccgtttctgacaagaaactcaagtatcaatgaggtcgagtgtgtcaggtcgggcatggtcctgctatctgcgaagatgatgccggtggggctgcgggaccaagggccgaccatgcaggtccaaagtgcatctgcaaaactttccgtagtgggagtagagcggtcgccgtcattttttgccctcaagcctgatggtgttggcttcgtcaaggtggcagaagcaaacacatcagacattgaggcgttcgtctccttctccctccactcaaaacttccccagaaacatcctgaggtcgaactggcatttacgaccccggagggggggcgttgcatcgttccattgcaccagcgcagatgtgtggaacttgccactgaggcaagaatgcacagaatggggctggaatacctgtcgatgcctcgcggcgcgatggggatgctacgtgttgatggaccaaccgggcgcagtgtgactgcgctttcctctgggtgcgacgcgcctccacactgccagcacatgcgcctcccgccgccagacgttctggtcaaactgacatctgtcctcgtcgatccgacgaaccacgtggaaattgaatttggtggctttggacgcctgcgccttgcgggctcctggataagtgccgccatgggtgacggtaggaagaaacttgcaccggcgctgcggtccaggctgctcagtttcatgctccaactgcggcttgccgtgcctacagtcgtgcacgaggacgacgtggcgctggttggtgccttgattgcggctagaccagaactgccgcttatcccacattaccgttcgctggtgaaggaggtcctcgcctgcggtttcgaacttaaataccttggggaaggtaccccgctatga

SEQ ID NO: 27245 - DNA, 1872 bp, Chromobacterium violaceum
atgagttaccaatacagccaggaggccaaagagcggatctcagcattggggcaaaccgctgtcgtcgaattcatcgatgagatccctcaggacttgcgtagggttttctatagccgcttaccacgagtccagggcttcaggccgggtacgcaggccgagttaaaggagaagcagaagcgcctaatcggacacctaatccatccggaggcaagtcagacgtttgactggaagaacttcgccttcctttgggagggttgggctaggctgcagttcggagacacgtttccgcaaagcgacaacgttgagcccaccgccgatgccggctccacctttttgaaggggctagtcggcagcttcccgggcgccgccagggaggacatggagcgcttgttcatttttagcggctttccggatcatcctgatgtcgcagtggcgctcgagcgctttcgccctgcctcggatattgcacgtgaccggatgatcgatgggcttccagtccgccttggagagatagagagtcgtcttgaagttacaaaggcaactgctgaggatgtggtcgaacgtattgaacggctcgaggctacctcggcctcccttgctaaaaatgtggaggatgcctctgggggccttggccgaagttccaatgctgttgccgaactgtgggcagcgctggatgcagaatcggcacggtctgacaggaccgagaagctcgtcgatgcgatcgacactgctggaaagaagttcgctgaagcgaccgttgtcagcgacgctcggaccgatgcccttgagcaaagcatgcgggccctggttgcgcgtgtagacgggtgggatagggtcgccactgaggtggcggctctcaagtcggccatcaccgatttttcggcacgagaaaccgattgggccgtcgctaccgaggccgttaatgtcctggtggaacgagtggctgctctggaaggcatcctggctgggggcaattcgggatcggtaacgaagcaacgggtcaggctgcttgagcacaagccgaatgggccgttcgtagatattcattccattgaaaaagcctgtgtcatggttgagtcgaatcttctggctgccggcattacgaagggggcggcggtcgccacggcccgacagacggttgccgctcttatcgccggccagatggtccagttctcaggttcgctcgccgacttagtagctgacgccgtggctgcggccattggaggaccgacctaccatgagtggagggtgccggtcggacttgtttcagacgaggctgcatctgactgcatcgaggaagtcgcggagtcgtcgggctgcctgttattaaagggggcaaacctttcggctttcgaagtatacggtgctccggttagggatatcgtcgtgcgccgccagtttgatgcgtctagcaacggacgcttggcagtgatcgcttcctgggcgcaagggccagctgtatttcctaacggaggcacgcttgcagaattggggcccgtgttcgatacagatactcttccaacgcgaggagtgtccgccaagctacctaagctgacatttggccgcctcatgaagaactcttggggacaggtcgaggggctcgacaacaatgcttctaaaccggcagcgggtgaattaggcgaacttttgaaggaagccggtttcgaaggcggcagcctgtgggagcgcattgtgaacctcgtatatgcaaccctcagagcgatgcctggggggcccctggaggtcgatctccactcgctgctggtctcgtgggccattccctgggctaaggcgacgggcggacccgcagaggagatctctcgcattgctaagcgcgagttggctgaacgccgggccgaagcatcggtttga

SEQ ID NO: 27246 - DNA, 1053 bp, Chromobacterium violaceum
atggaatggcaagcggtgtcccgtgaaagggcgtggaatatcgtcgcgtcaggaatgcgctgtaggctgaccgaggaaggcctccggatctcggctgtttcggagtgtctacgagcggtgtcacatctgtgctctgcccctgagggtggacacggtgcctgggagccctccgcctctctccgcctcaccagcatggtgcgacgtagactggctttactgtggcctgaccttgccgacgatggggaggatacacgtccaggggtgatgaaagtgctggatagcttggccgaacttggcgacatggtcaggctcgaaggcggcaggtggcttgtggcgccggcatatgcagtgcaggcaggtgacgggctggccgtgctgctgggaggcggtccgatggaagttcttccacagacgatggcggtgtcggccagggctgcggggagggtccggttagtggagacgaccgcttgcgtaggctgggctgatctgtgggacgcggacgaatggatcggggcacccgctgaagggcttgaagcatggtccgtgcggctgctggcagaaaccgctgctcggctaacggacgcgccaaacgacatgggcgagacctccgcttacttgctccgcgaatgggtcaggcttgtggacctacctgcggacaagggtggactcctcctctgtaggtcgcgcatcgggcaggcatcctcatatttcattggtgaatttattcgggggcgtcttcggagactgagcgccattggatccccggacgcgaggcgtcttcgcttccacctagacgcgcagtcaaatcgccccataagggttaaggcttccgtatcgaagggcttagccaaacttcggttagtacgccgcttgcccgaaagggaggcccgagtactccttctcggctggcaggttccggtccctgagggagagcatcctggagtgacttatcacgtgttccccttggaaatgctgtcgatcgtgcgcagagcattcgaggggcttgggattctgctggacgagcgcattgatgagagaaaaggaaaaagatga

SEQ ID NO: 27247 - DNA, 5532 bp, Chromobacterium violaceum
atgagcgtgacgtcgaagaaggttgaggcgacaggggtccacgaaacagcgaggagcctagctgagaatcttaggcaatacatcgaagctcagtatcacatccgtgatgagggccttgtcagggagcgccatgcgcttctgcgaaaggatactactatcgcccaggtcccctatgtggaagccactccggtctataaggtgggcgatccctacggtagcctaccgattcccaaggctgcagtcgacgtgttgacccaactcgcggggatgggcattggtctttacccccgcccctatgagcaccagtcgcaagcgctcgcttctttcctcggcgacgaagcagccgacctggttgtggccacaggcacaggctcgggcaagactgaaagcttccttatgccggtcatcggtaagttggcgatcgagggggcggaaaggcccgagtctgcagtgcttccaggctgcagggcgatgctgctgtatccaatgaatgccctggtcaacgatcaacttgcacgcatccggcgattgcttggcaatcccaaggcagcaggggttctttcgaagggaaggtcgaagcctgtccgattcggcagctatacgggccggactccctatccagggcgcaggtcctccgtacgtgacgaacacttcatcaagccgcttttcgaggagttttatcgtaaggttgccgagaaaccagccatccagtcggaactggagcgtatcggccgctggcccagcaaagacctcgacgccttctatgggcacgggttggtccagaccaagatatacgcctcagggaagaaagctggaaaacagtacatcgcgaacaattggggcggccggctgaatacgcaacccggcgatcgcgaacttatgacccgccacgagatgcagcagaattgtcccgagttgctcatcaccaactattccatgcttgaatacatgctcatgcgtcccatcgaacgcggcatcttcgagcagaccagagactggcttaaggcagaccctcgaaacgagtttatcctcgtcctcgacgaggcgcatatgtacaggggcgcaggaggcgcggaggttgcgctcctcatccggcgcctctgcgcacgccttgagataccgcgcgagcgtatgcgctgcatccttaccagcgcaagcctgggctccggtccgacctccgtcgctgacggcgaacgtttcgcccgtgatctgaccgggctgtcggaaacctctccgcggcgcatcagggtgatccaaggtactccggaaccgcgtcctccctcgcgcgtggccacatgcggggaagccgaggtgctggcagccttcgacttgggggcctttcagaacgctgccaacgatctgggctcagcgcgggctgctgcttcgaccctcgctgtgggtttaggatggtgtgtgccgccagaaggcgaccatgagtcattccggaactggctcttcgagagcatgacgggcttcggcccccttgaggaactgatcacgacggtatcaggcaaggcagccaggctagacgctcttagcgaagcgctcttccacggatgtccgccggacactgcagcgcgggcggccgacgcgttgcttgccctcggtagttatgcccggcggagttccgatggtcgcgttttgatcccgacccgcttgcatcttttccataggggtctgccgggcctccacgcttgcgtggatcccgaatgctcagaaaggctgggcggacacgctgcccccaccatcttgggccgccttcacacgaagcccctggaccagtgcggctgctcgtctaagggaagggtttacgaattgctcactcatcgcgactgcggtgccgctttcatccgtggatacgtgagtactgacatggacttcgtctggcaccagccgagcggtccattgtccgagggagggaccatcgacctcatccctatcgagatactggtcgaggaaagcgtccatccgcgtagccgccacaaggacatgtggctgcacatccccaccgggcgtctttctccgatgtgccccccgggtgcttcgggctatcggaaagtgtatgtgcccgacaaggtcgcggccggttcggagatctccttcgatgaatgccctgtctgcatgcgcagaacccaaagctctaaggacgagccctccaaggtaatggatcacgtgactaagggcgaagccccattcaccacgttggttcgtactcagatggcccgtcagccagccagccgctccattgacgctaagcatcccaacggtggccggaaggtgctcattttctctgacggccgtcagaaggcggcccggctggcacgcgatatccctagagacatcgaactcgacgtgttcaggcaagcggtcgcgctcgcgtgtgtgcggctggagaggattccgcaggagcctcggccgacccagaatctatatctcgccttcctatctgttctctctgaccatgacctccccatatttgacgggcaggatgcgaggaaagtcactgccgcccgcgccgagttcgagcgcgattgcgactccgatctaaggcagggcctcgaagatgggtttgctccctcggaggccccccctgcgagatatcggatcgcactgctcaagcttctgtgtagtaactactactccctttcgggtacgaccgtaggtttcgtcgagcccgtgcggacaaaacttaaaaacctaaaggaagattttaaggcaactgggatcgtggtcggggatgaggacgtccacgcacttgctgttgcctggatcgacgcattactccgggagttctcgttcgacccatccctcgacccgacgatccgctgcaaggcggccggttacttcaagccaggctggggaagtaaagggcagttcgaccgggcattcagagaggccctcgctcgtcgccccggctgggggaagcctgcagtcgaggctgtcgaggcggcgtttcgtcgccagttggcgtcagaaaaggacggcgcctggtttctttccccgaactcactccgcctgagggtcgacctctcccatgtctgggcccagtgcccggactgtaccgccctcatgccgctcgctttcggtgagatgatctgccttgcctgcgggggcgaaggtgtcaggccggtcgaccctgcgacgagcggttacgttgccgcccgtaagggcttctggcgccagccggtgcaagaggccctcgcccccggctcgcggctctcaaacctcagcgtcgaagaacacacggcccaactttcgaaccgggaccgcagcagcgtccacgccaccaccgagctttacgaactaaggtttcaagacgtcctcatcgaagactccgacaggccgatcgatgtgctcagttgcaccactaccatggaggttggcgtcgacatcggctcactggttgcagtagcgctgaggaacgtgcctccccagcgtgagaactaccagcaacgggccggccgcgcgggccgccgcggtgcctctgtttccaccgtggtgacatactcacagactggaccgcacgacagccattactttctaaatcccgagcacatagtggctggacctccgcgcacgcccgaggtcaaagtcgacaacgccaagattgctcgccggcatgtgcatgcctacttagtccaaaccttcttccacgaacgcatggaacaaggcggccacggctctggtgagaagacgtcgatactggaaaaggcgctcggtcccacccgagagttcttccacggggcacaggatacaggccttaaccttgatggctttggggattgggtatcgcgtcgagtcctcgatgctggaggtgaccttcgtgtctccatcgcggcctggctcccccctccccttgacaccgacgggcgtacccttggggagtggcttgcagatataacagaagagttcctggcgaacctgcgcaaactcggtgcagatgtcccacaacctgccacctcggatggaggcattgaaggcgacgaaaccgagggcgacgagaacgcaggcgtgaaactggaacaggaggaactcctggagttccttttcttccacggcctccttccgagttatgcgttccccacaagtctctgtagcttcctggtggaaaagggtgagaagaacgccaaaggcatctgggagatccgcaccgtccagcgaccgcagcagtcgatttcacaggcactaagcgaatatgcccccgggcgcctgatcgtcatcgacaagaagacctatcggtctggaggcgtgttcgccgacctgccgaccggggaggtcaaccgagccagaccacttttcactgacacaaaaaggctcgtccattgcgaggcgtgctcctttgtgcgtaatccccataaggcccagggaggtgataatacttgcccagtatgtggcggggaactgaaggaagagacgatgattcagcctgaggtctttggccccgaaggagccagggaactcccagaggacgaccgagagcaggaggtcacgttcgcaacaatggctcagttcccactgcccgtcgacccagaggcattcaccttcaggccgtgtgggccgaatgcgagttttacccacgcggccgaccaaaggctggtgaccgtcaaccggggcaaggagggcggtcatatcggcggattctcagtctgcgtggaatgtggggcggcctctgtctttgaccagttctcgccggacaggggaccacacgagcgcccgtacaggtacctcggcccgcaaggcactccaacgcgatgctccggtgagtttcgacgcgtgctactcggccatgacttcaccactgacctactgctgctgaggttgaggatcgcagccccgctcgtaaccgacaccgccgacacggtggctctgcgaatgcttgaagacgcgctccatacaattgctgaagcactccggcttgcggcgagccgtcacaggcagttggacctcgacccggccgagttcggttctggtttccgtgtcgtgcctgcccttcaggacgaagcccggatgttggacctctttctgtacgacaccctttcgggcggagcaggttacgccgaggtcgcggcaaggaacctgccggagatcctgcaggccacgctcgggctgcttgagggctgcacgtgcgacacttcatgcaccgaatgcctcaatcacttccataaccagcacatccagggtcggctggataggaagcttggcgcgtcgcttctccgatatgcagtacacggcgaggaaccatattgttctgctcctaatgtacaggccgctacattgtcccaactgtgctccagccttgaactagacggtttccgctgctcagaggggggggagccagaaatccccatacttgtcgagcgggatggtcaccgtatggccatggggtgctacccagggcttatcggcaggccggagttcgtccatgccgtcaaagatgctcacaatatccacggctatttggctctgaatgagtacctgctcaggtccaatatgccggatgcccatcagcgagtccggaacctgttccgttag

SEQ ID NO: 27248 - DNA, 1596 bp, Clostridium bornimense
atgagaaaagctattcacaattatgcaactggaaagcaaaaagaaattgatgcttcagaagtaaacaagattgacggattaaaattgtttatatgtcctgaatgtggtgagaaagtacgctttgtttctggtatgaaacaacttccgcattttaaacactataaaaaaactgaaatctctccagaatgtgagaagagagttgatggatttgtaaaaacttatctatatgagaggataggactaccattatacattaaaagatctaatagttcatttgaattatatatttcttttcctgttttaaaggataatcttctagataaactcattgaagagaaattatatattacaataaaagatacagataaatattatgaaaataaacaacaaaaatttgcaattaatagatttttaaatgatgcatcaactttacttcctattaattttatacccaaaaataactcgaactttataattgatttttctacttcaaaatataatgaagaaatacttaaatactggtcacagtactctgaaggtttctataaagataatgcaatattttcatatggagaaagtggtggaaagaaaattcatagaaatgattcaatttatactgaaaaaaaatattatatggtatcaaaaaataatctcattaatattccaccaggtatgaaaaaagaatatattggttcgttacctattaataatttaaactataacgtctacacaattcaaattacaccttatgatgatattgaatttaagagaatagcagaatatctacttctaaacttcaaaataggtttattatattgtaaaccagagataattcctttatggccaccagtggtgcagaaagatagtaattttaatttaattcatagtaataaagatttaatttgcactgtgaaaactggtaatgatgtgccaaagatatattcatatattgaagataaagtaactgaattgtttattccttcatttggggataattgttttaagattaaagtttatcctaactcaaataaattcttatctgtagatagaaagtatattggtaacgaagttattttttcaaatatacatcaagaattaatatatggcaagcttaactgcatactttatgatatagataatactaataatataattaatattaatactgaatatactctatcaaaaaagtacgttgatttgattgctaaatcaaataataaattgaacatatatcataaaactaattatctttataggaaatatgaattattaaacgataaggaattaagaatatcaaacatacaattaaatgatgaacttcttttctttaattcctataagttgattggaaaaatttgctttgttaataaaattatatctaaaaagattatagattcagatttatatcataagttattacttacttcgcatactgttaaaatatcaataccaatagaaataaaaaaaatattaattttattatccaattatcctatgtgttattacttaattaaaagatattctgatgaaggtaaaattccaataggtacatggtatattattaaacaagaatttaaggaggggttacatgaataa

SEQ ID NO: 27249 - DNA, 900 bp, Clostridium bornimense
atgaacttaaatcaaaaaaaaaataaaatagaaaaggatatagataatgaattaaagctatttaaagataatatagttcattctgttgctatgactggaataattgaaagcataattcctacatcaaataatattgaaatatcttcagttcaaagtgatttatgtttaatagaggatattgatacgatggttaatctagaagttagaaatgatatcgatgatttagtagatgaccttgcagataatctaagaataatgggagtatctaatgattacaattatcctttagcagatataattattgcttctattgcaacaaatactagcttgattgttaatgattctgctgatgagttatctgatgctatttcatatgtaattgatgggaaacctagttcaaaattgtattttccaagtaattacaacaatcttaatcaacttatagatcgtataaattcaattaactcaaaagtattacttattgaaggtgttttagatagcttaaacattaatgcttatagtattttaacaaaacattgtaaaaataagctttttatatttactgttaataactctgtagatattaagtatatacagaatatagtttcaaattattctttatttataaatacaagtaattatcttgaagtcccaacagataacaccttatataaatataagtttgattataataaaatacgtaatgagtattcagctgataaattatctgatgtttataaagttataaaaagaaactttggtaatgatataacattatcaaataaatccttagtaacactttctaaagttttaagtatgaaaaatatttctatagattttaataatcttattatcaaagattatataaattcattaaaggatggtttgatgaatgaataa

SEQ ID NO: 27250 - DNA, 1023 bp, Clostridium bornimense
atgaataacatagatttattatcgtcagttagtaaagatttgaaaattttaacatatgaaagtgaaccagtatatcaatatagaggtcggattatatattcagcaatttctttacttatgttagcatgtacatttgactcagagagcccttttgataaagatactattggtgttagtaaacgatatctatataataaatcatcgaatttacttaatgaatatttattactatattctgatgctaaacaatggttttatcctaattccaagtgcaatccaattgaaattattaggacaaggttacttcaaagtggcaatttgattaatgtgggattttctaccaatgtagctactcaagagccttacttaaatcaaatgattgatggtatctctagattatatggatatcctttagattttgcaaatggaaaaatgtctggtttaacatggattgtaaaagataataatgtggtagaaattaataataatgaaaatataattaactttactaataattatcttaattcattaagatatactgaaaaaaatgttattgaaggatacgagttttttaatcctcataaacaatcatcaaatatgtataattgttgggaggataaaccttctttgatatcagaaaaatatactttactaagagaaaaagtatatgattatacttataattataattactatataaaaaaggagcataactcatctacatttatttatagaatagacgaattaagtgttcacgaaagaatacctactaaaattatgtatggacttcgtgcaatatacaagaatccaattaaagcctattatgaatttcatggagattatataatgattcatcttaaagcgaaactacctttaagtgaagaaatctccttatatactctaggatggccatgtaaaagtatagatgatgaattctgttggttatttacttcagatatatggccatatataaaaactatccttgaaggtttaaatataattatggaggagtattatggataa

SEQ ID NO: 27251 - DNA, 5286 bp, Clostridium bornimense
atggataaatatactattgaaagtacacatgaagctttaaaaaataaaatgattaactatattaaaacaatatacctcggaaaaaatgaagacttactggaagcttgtaatgaagaattaagtaaaccaggaattttatttcaagaaccttatattgaaggaaatccagcatatttaaaaatagaaggcggcataaaaaatagtccctatattacaccagaaataaaagatgttttattagaaatgataaaaattgatataggtgtatttagctcaccatataaacatcaaatagctgcattagaaggattttgtgataataaagacttatttattgctacggggactggttcagggaaaacagagtgttttatgtggccaatggtaagtagtattgtttcagaagctattaataataaatctacttggcagcaagaaggtgtacgagctctcatgctttatccaatgaatgccttagtttctgatcagcttggaagacttagaaaaatgattggggacgataataaaaagtttcataatatgtttaaaaaattgactgaatgcgagcgtgttccaaaatttggtatgtatactggtcgtacgccctatgctggtgaacaaaatgaaaaaagagatattgaattagcagatactttaacaaaggaattaaaactcaataatccagatttaaaagataatataaaaaaggaattaattaagttaggtaaatatccatctaaaattaatttagaatcctttgttgataaccttaggtgtggaaatcatattactgataaatatgatacagagttaattactaggcaagaaatgcaaaaatgttgccctgatatcttaattaccaattactctatgttagaatttatgcttattcgatctacagaagcagatatatggaataaaacaaagaaatggttaaatttatcgcctgataataaactattatttataattgatgaagctcacatgtatcgcgggtgttctggtggagaagttgctctattaataagaagactgatgcataagttagatatagatcgctctaaaatacgtttcatcatgaccagtgcttctattccagaaaatagtgaaaaagaaatattagaatttgctaataatttaagtgctaatgaatatacaaacaacaattttattttattaactggagaaaaggaaaaattacaatatgaaaatgccaatgatattagtgcttctaattttaaagactttgatattagctcattgcaaactaaaacaggaaaaggactctcacatgaacaaattgaggcaataaaagaattttcatgttgtgccggctataatttaaacacttgtgattttagtgataacaatgcagttcaaagttggctttatgatcagctaaagtcttcgttaccaatgattagaatcatggaaaagtgtcgaggcaatgcaacgcaattcgataacttagcttacatagcatttcctaatgatgataagagatcagcaaaaaaagctactagtgcctttcttgcaatagcacctttagcaaaagataaagaggaagtgctttttccttctagattgcatcttatgtttcgaggcctttctggtatatatgcttgtagtaatccaaattgtagtgagaaacatcctactaacaatttaaacattggtaaagtatatattaattcgagtaaatctacttgtaaatgtggcggtaagatttatgaactactaaatgatagaacatgtggtgcattattctttagaggatatctagatacttcagaagttggagataaatttgtatggaatcaaaaaagtgagttaacggatgaattctataaagaagttcatttttatatcgttcaaaataacgatatcaaagacattaacagaaaaaagaaaattaaaatttgttggataaatagtatcactgggaagattttttatgacgattctcatgctaatgaactaaactatcttcaagttgcttataatgaggaagaaaataaagaaaatccaacattgtatacatttaactcttgtcctaaatgtaaaaagcacaaattaaaagtaacagatttttctactaagggtaatgaaccattttttaatttagtatcagaacaattatatattcaaccaccaactatgtttgatgaaagtcaaataaaacaaactcctaatgctggaaggaaagtccttctattttcagatagtcgtcaacgggctgcaacgcttgcaaaagacttaactcgtgctgctgatgaagatgctatgaagaaagcgttgtctgttgctgcaagtgaattacaatcatgggctaaaaagaataataaacaagcatctatggatttattatatatagtatttttaaaaatagcttatgaaaataatttaagatttttttatggtaaagacgaagatgatttaagaaaagcccttgaaaaaatggagaaactctataaaagaactaatggaaatatagattatgataataaaaaaagcaaatttactcatgttccaggattatataaggaacaattattaaaacaactttgcagtaactttagatcattaacagatataggattatgttggttagaacctagtgatgacgatgacttagatgatgttgaagatagttttaatgaaaataatgttaatatgagtatatcagattttaaagttttctttgcagcatggtgcaatgaaattcttactgactcttatgctttaggcaacgatattgaagatgatattaggaaaaatattactggttttgaccgttttggtgttcaacttccactaaaactcccagataaatatattaaactattaaaaaataacggatttactgatgataatataaaagttatttcggaaaatttggaaatatttttagctaatggtaataaaaataattcatcatacttaaatttatcacaaattcaattaaaatatgaagaaaaacacgaatggtataaatgtaataaatgtgggcgtatatttcctttcaagctatatgataaatgtgctatttgttgtaattcgacacctaaattaatgaattctgatgattttgaaggtgttaatttttggagagttccagtaattaaagcacttcatggtgataaaagtgttttaatgacaagaattaatactgaagaacatacagctcaactttcacataaagaccaaaaagaaaagatgtggtctactactgaagactatgaaatgaaatttcaagatatatatataggtaatgtaaaaccagtagatgtattgagttgtactactactatggaagtaggtatagatattggctcattaacagctgtgggacttagaaatgttcctccaatgcgtgaaaattaccaacaaagggctggtagagctggtagacgaagtgctgcaatatctactattgtcacttatactgataatggtccacatgataattattattttaataatcctgaaaaaataatatcaggatctcccagcttaccttggattgatataaaaaatgaaaaattaataaatcgccatctacatgttgtagattttgcagagttcattatgaataattcagaagatattaataatttaagtataaatacattttttgatagctactatgaacagtttgtagatttcctcaataacagaaaattaacagacaaggatataactcaattagtaccaagtaaaatggattatgtatttaataattatataagtgtatttgttaaagatttagaaactattagattaaaagttagtgattttcctgaaaactataagaattctactgggaaagacaaatctgttttagatgttatgttagaggaaggggttttcccaacatattcttttccaagagatgtagtgggcttctatattgaggactatactggtagtaaaatagaacaaaaacctgaacaatcactagatagagcaattactgaatatgcacctggacgtatcattgttgttgataagaaaacttataaatctggtggtatttataatttccactcaaagttttctactaaaaatagttacactccagctaggcattattttaatagtaaagattactgtagatctctgttttattgtaataatgcttcttgtaattggtttggattaaaggagccttctgaaaacaaatgtccattttgtggaaagtcagatgtaaaatctcatgttttagttaagccatggggattttcaccacaagatggtgcttccataaaagaatcacaagctgaaaatgaagtatcttatgcagaagaaccttgttattctgctactcctaatgatgatgatatgaaaacatgtgacggtttatttaacattagatttgctaatcgttcggatcaaccattaattattttaaataaaggaccacagtcaaaaggtttcacggtttgtaaagattgtggggctgcaattccaggtgatgatataaataaattaaaaggcataggtaaaccatttaaacatccaaataataaacagagatgctatcattctgataatgtaatagaaaatgtttttttaggtcatcaatttttaactgatatggttgtttatgaaatagcattagatccagataaaattaatattagttttgatggtttatggattaaatctgcagcacaaacactttcagaagctttaatcttatctgctggtagattgttagatatagactttaaggatataaagagcggttatagaatgagatatgatgaaaataaaacatttatagatatcttcatttttgatagtctttccagtggagctggttatagttcttctcttgctaatagaagcatagagttatttgaattaacaaaggaaacattaataagttgtaaaaataattgtgatacagcatgtcatgattgcttaaaacattattggaatcaaagaattcaagataatctggatagatttgctgcacttgatttattaaattgggctatgaacaatgaattatctttacctttaacatttacaaagcaaaaagagctcattaaacctttaaaagaacttgttgaactagatactaatataaaattaataagtaaaaataataaattttatattgagcatggaaatttattagaagaagtatatgtttacccagcaatgtggaatgaatttgataatagactttctaaaaattctattaacattagtgataaaatcataaagaaagcattgcctaaagcatataaaaaagtgatttcatcattaactagataa

SEQ ID NO: 27252 - DNA, 2025 bp, Clostridium novyi B str. ATCC 27606
atgattaaaatagaaactttaaataaagatgaaaaaatattaatgattgaatttttaccaataaatgaagttgttaagtttttgaaattaaagaaaaatatagcgaaatttgcaaaggaattggctggtacaagaatagatgaaaaatcatcattattacaaaagaaattacctaagatgtttagtgatgcaatcgattctggggataagataacaattaattttatacaaatgtgtttacacaacaaattgttaaaaatcaacgaacatttagaagctaatataggttcagtagaagtaataaaaaatataatacaaaataaaaaaaaggaaaactacatggaactgataaaaatatttgaggaaaaagaggatcttaagtatatattattagttctaaaattaaatgaaattgaacttaaagtaagacaaaagagtttgcttaacaatagcattgaagaatttaactattataaaaaagtaaaatcacaagttgaaaagatacaaaaagaaaaatttgatatagaatataataaaaaaattcaactaattgaagaaaagggacaaactttattaaagaatcaagaatctataattaaggatttaaggtgcaaaattttagaaaaagataaaatcatccaagaaaaaaataaagagattaaatttaagattaaagaattaaatgaggaacaaaaaaagtataaaaaattaaagaaaaaaatagaattagcaaatgaagaaataaaaaaaattaaagaagtcgcaaaggataacaaagtaaattatgatttatacatagaaagagaaataaatagaaataaagagttagaaaaaacaattgaggatcaaactattataattaatagactagagaatgatatagaagaaagatatgaacagtatagcgaaaaatatttggtgaggtttcaagaagaatatgatgaatttattcaagaaaagataactttgatgaaagaagtagaagatttaaatattgaatttaacttgttaaagagtgagatttcagatttagaacagagaaaggaaattagtaagaaaaaactagaggaatacgataagttagtaaatgattttattgaaaatattgataaggaaattgttttatctaaattaaaatcatctattttaaatgtaccacaatctaatatacaaatggaaactagaaaggaaaaactatatattagaaattcgtttaagggtgatgaaattttagaaattagttcaatagatgaatggagtgaaatattagatcacaatttaaaaagtataggcgttagaaaagatagagattcatggtcagactatatattaagtgtactagcatcaaaaataataccgcttattgtaggatacaaaactagagatattgctaattgtataagttcttcatatgcaggagaaacaccgcttataattagtttaccatcaagttatagtgatttaaatgaattaatagatatttatcataactgttcatcaaaggttattttaatagaaggggtaattggacaaatgaatgaatccttacttttaccacttttaaaagaatatacagaatcaaaagaaacggataaaatcataataatgtcttgtgaagatactaatatggttgatctaataccttcttacttgtttgaatatatagcgcctattgaaataaaagatattagaccagtaatacaaagcaattatattaatgctaataatatggatacgcttaggaaatttaaaaatagtcaattagatataaattttagttataaaaagttaagtagattatttaaaaatattaataatttcaattcgtatatttttacaagaactttaatattaggttacttatgtgaacaaatggagtatgataatgcattggtatgtttaggtatatgcgatttacaatttgtaattaaagatgaaaatataaaagaaaaaattgaaaataatatagagaattacgaaaatgacttttgtgaagacttcaaaacacttatagtaggtgaataa

SEQ ID NO: 27253 - DNA, 1059 bp, Clostridium novyi B str. ATCC 27606
gtgaaagaattaataaatcaaattgctacagatttagctatatatccatataatagtgaaagtaatgaagaatacggaaatagacttatatattgtgctttagtgtcatgggctaaagtacaacttttaggtgcttcatatactgaaatttcagatatagaaaaagagtatccctatgtaagtcaacgttacataagtgagagattaaattttgtattagagggattagtatctacaattccacattctacaaattggctgtatataaataatgatgaatctaatctaaaagaattagttaaatacatattgcaaagattaatattttgttatcaaataagtaaaactattcgaacatcatgggtaacaatgtcaccacaaaagatagtatattttaaaaattatgaattactcttagggggaacagagtggaatagtagtataaatggtgcatgttccattggcttaggagtatggagaaagaaacaatttaaaaaagatattaactataaacaagtttttaatatacctaattgtaatttaaaggattattataaatcattagaaaaaaatgtttcgtggaaagaaagtgagttagattacgattatgagtattttaatgcaggaaaaggaatttggcataataaagcttggggaaaactaaacaaaaagtacatcgaaaaaggaatttcattaattagaaaaaaggatgagaactacaataaatataattattttttactatattataagaatcatatatttttaatatatagtcttgatcaatggtattataaagaaaaagaaataagtagaattatgtatgctttagattattatagaggaaaaccagcacaatttaaagcaaaacaaaatagtgaagttgtacaagtacattgccatagtcaattaccaaatgcagaaaatagaatactattaatggcatcatggcctaaaaaaacatataatgatgtttattatagagaaattcctatacatatatggtcagatgtaaaagagatttttaatggactaggtattgaagttgtttttgaataa

SEQ ID NO: 27254 - DNA, 5304 bp, Clostridium novyi B str. ATCC 27606
atgaatgaacaaggaataagaaaaatacacaaacatttaaaagagagacttgaaaattatataaaagctcagtattttgctgaaaatgatttattattagaggctacagagtccatattaaaaaaagaaggagtgctatttcaagaaccatttattgaagctactcaaaattataaaattgaagtaaatggatttgaaaattcaaatttagataaggatataaaaaagtatttaaagtctttaataaagtataaattaggggtgtttgatactccttttgtacatcaagttaaagcacttgaagcatatcatgcaggaaaggatttattagttacaactggaactggttctggtaaaacagaatgttttttatggcctatattaactgaaatattaaaacaggtatccaacaatttaaataattgggaacaagaaggtataagaacacttattttgtatccaatgaatgctttagtatcagatcagttagggagaatacgtaacataattggagataaagacgatgcatacatgactttacttaagaaagaaagtaatgaaaatattagaagaatacgttttggtatgtatacaggtcgtacgtcttatcctggaagtgaaaacaagaataaaaataaaaatcttgcaaaattattagataaaacatatttaaattgtaaagaaaaagtttataatcagctaaaaaaaataggaagaattccaactaaggatttaaaaagttttgttaagaatctacatgaaggaaagcaaataacaggagaaaatgatgcagagttattgacacgtaatgaaatgcaaaatatttgtcctgatatactaattacaaactatagtatgcttgaatatatgcttatgagacctattgaacagtgtatttgggaaaaaacgcgtaaatggttgaagtgttcaaaagacaataagtttttgttagttatagatgaagcacatatgtatagaggggctgcaggtggagaagtttctttgcttattagaaggctaatggataaattggatataagtagagatcaaattagatgtatattgacaagtgctagtgtaccagataataaagaaaaagaattaagagagtttgcttgtggattaacgggtacaaatttagaaaatgataattttgaaataattaaaggagaaaaaaataatttgtcattacacaaaaaaggaaataaagaagatgtaaaacgaattttacaacttaactataataagttacaaggtagtgatgaagaaataaaagaacaaattgctatacttacacaattatttgggtggggagaagtaaatggcaattacaaaaattggatttatgataaattatgtaagtatcctcctatgttagagttaatcaatgtttgtagtggaaaaggtgttgcatttaaagaaattgctaagaatatttttgaaggagtatcacaagaagaggcagaagcagcaacagaaattttattagtattaggtactttagcttgttctaaagaagaaaaggtacttctcccagccagagtgcatttattatttagaggaataaatggaatatatgcttgtattaatccagaatgtgaagataatcacgaagtaatgggaataaaaattggtcacattgaccacataccacgttttacatgtccaaaatgtggcggaagagtttttgagcttgttgctgatagaagatgtggtacattatttcttcgtgcttttaaggagaaagatgatgtaggtaattccacatttttatggcaagaaaatagtaaacttattaaaactcccaatgaaattcatttatggttagctcccaaaggaagaacaagtatatttaaagaaggagttaaacatagtaaggcaaaagaagaatctaaatttggatacattaatagtagaacaggtatgttatattacactgaagaattttctaataaaaaaggctttattaaagttttaataccgaggtcttatgataaagaaagaaagtcatatacattcaagatgtgtccgaattgtggaagagaaaaaaataaattaactccattcaaagttaggggaaacgagccatttgctaatttagttacggagcaattaattaatcaaccagttaaagatatgaatttaaaaaatggaggtaaaaaagttcttcttttttctgatagcagacaacgtgctgctacattagctagagatttaactatagctacagatggagatgctggcagacaagctatttttatggcgcaaaaagagttggaaaaaaaatatagagatgatcaaaaacctatttctatattatattatgcttttttaaaagttgttgaagaaaataatatttctttcttctatggggaggaaaagcaggagtttattaagcaaataaataattataaagaaatgtatcttggtaaaaaaagattaaattatgaacgtatggaaaaaaggctaggaaatccgccagagatgttttatcaactatttctaaaaaatataagtgatagttatcgttcttttaataatttttgcttagggcaaatagttattttagaaaaaggagaagaagcagaagaactagaagaagatattttagaaaaaatagaaagcaaaacaggtttagatatagaaataattagagatatatataatgcatggattcaaaatattttagtaaaggatattgctgttttcccatctatatccgatgatgtgagaaatagtattttatcttttgataaaggtgatttaggaatcagtgaagattgcaaaatgcctaaatatataaagaaaatattaaaagaaaataatataacagaaagtcaaatagaacaattaagtaagatgtttatattatttactgatacatataagggaagtaatacagtacataataatagatatttattaccaggtaatttaactttaaagacaaatgaaaatggtaaatggtttagatgcaatagatgttctggaacttcaacgtttacattgtttgatagttgcgtttattgtggcagtaaagattatttatcagaagtatcacaaaaagatttaacaagatatgatttttggagaaaacctgtaatagaagccacaaagggtagaaaaattagaaattttgttactaatgagcatacagcacagttatctcataaagatcagctaaatgatgtttggacaactactgaagaatatgaaatgcgttttagagatattgtaacagatgaagaaagtgagcctatagatatacttagttgtacaactactatggaagtaggaattgatattggttcattaacagcagttggcttgagaaatatacctcctatgagggaaaattatcagcaacgtgcaggacgtgcaggtagaaaaggatcagcagtttctactattgtaacttatacagaagatggtccacatgatgcatggtattttaataatcctaaagaaattatctcaggtgatcctagaacaccatggattgattatactaataaaaagttaattaagagacatttaaatttgattttactacaagagttttttgaaccacactcaataagtattgaggatttagagggtgttagatttttttcaaaggaatatgagttaaattatttagaatttattaattggttacaaagaaaatcattattgtcaaaggaaagaagaaatatacttataccaaatgaagttacaatagattgggaaaaatataaaaaatatgtaatacaacaaattgaaaaaattcagttgaaagttaataaaaatccagttatttacaaaatagctaaaaaaaataaagcaaatgatgaaaaatatacgtatagttcattattagatatattatttacagaaggatttctgcctacatattctttcccaagagacatagttcatttttggattgaaaatgaatatggaaaggtagttgaaagtccagaaagaagcattgatattgcaataagtgaatatgcaccaggtagaatgctggttgtaaataaaaaatcatatatttcaggtggattatatgattattatactaagtatgataaaaattatttatataatgctgcagaaccatggttaaaacttaatgaatataataaaaatatttattgttgtgaaaatgataggtgtggatggtttggtttagaaaacaaaacagggatttgtccgttgtgtggagcacacctaaaagaagagattttagttaaaccatggggatttgctgctagagaaggaagaaatattccagaaataagagataatcaagaatactctatctcaagtaagccatcatatacttcggtgtatgaggatactagtaatatgaaatcaatatctaaaacaggattaattcgtatggaaaatagagaggatcagcaactgattcttatgaacaaaggtcctaatgatgaaggatttgatttatgtactaaatgtggtgcaattgatccacatatcgttctagatagagataaaaaggaacgaaaaagaccatacaagaatccttatattgggaaaaaagatatgcagtcatgttcacatatgagacaaaacatattgttaggatatgatatacttacagatatgcttgtcttagaattaaaattacaacaagaatatattaatatagagaatgaaaatttgaacatttgggtaattccagcagtagctactttaagtgaagctattgtattagcagctagcaaagttttggatattgaatttagtgatctaaaagtagggtatcgtttacgttatggtagtgatcatatttttgcagatatatatatatatgatagtttgtctagtggagctggatattcaagtagattagctggattaatagaacaagttatggatgaagcaaaaaaaagattagaaaattgtgattgtgaaacatcatgtcctaactgtttgcaaaatttttggaatcaatcaattaaacaaaatttagatcgtaaggcaggtttacaactattaaattggataagagaaggtattttagataaggaaactagcatagaggaagaagaaaagtatataaaaactctcaatgaaatagtaatgctacaagaaaaacaaggtgagattataaagaagaatgatgattattggattaatataaatggagtgataaaaaaagttaaaatatatccagcaatgtgtagtttaaataaaatagatgtagagaaaaatacaattttaataccagatagattatttaaagtatctattgcagatgtatggaatatagtagaaaaaagtgttagagcttga

SEQ ID NO: 27255 - DNA, 1437 bp, Clostridium sp. D5
atggataaagcctttgatgttgtgtttcaatcagaagttgatgcaacggttatagcaaaaacttcatatcgttcatatggggaacgttttagatatcagtgtctatgttgtggtgaagaggtatatttagcggcagcagaaagtactgaaaaatctcctcacttcagacataggagagggaacaatgatattgattgcgagcaatatcttggacagccaggtgcaatagaatcatatgtttctattcggcgacaaagaaataaagcgcgtattggattctgcttcaatatagacagattaacatttgaaatgagtctgtcattatcatcaaaagaaattgaattttactcacagacacaaacgaagttgaatctatattcgaaatattattctcaaccatttttcggtattccaatcagtaaaactgtacttagaccaaatattgcaaattatttcactattactgagtattcgaatgattattatgcctctattgacgatggaaatatgaagtattcatatccagaagtaatgaagaaggggggaaaactaaatgtatatagggtaaaccagctggatgaacattacaaaagaaatacatccgatatactatatatggatacagagtatgtagtaatttctgagagtgaagataacattaaagaattgatttcattacagggagtgcaaacaatagatgaatcgttttctttcattaccttaggtaagacattttttgctcttagactcgtaatcaaatatgtaaattcggatttgaaattatatttcttgaaacatgattgccaaatagaatcatcggaaaactttgatatattatggccgccggttactttgatagattctacagcggtcacatctgatagcgaagtatatgttatatctagttttgaactgattccacatggaaatgtagatattgatggaaacaagatagaagagattgattgtgatattagtaaaattagtatcgatgataaagtcgccatctatgaaaaaaatgttgatattgtaatccagaaggcttatcaagttacttttgaatatttccatgtagagccggaaatcatttatactgataagtttatagttccagacgactatgagtatttctgctttgacatcagtggatgcacaagacttaatgtgggttctacagtatatctggcgaaagaagatcagattataggatataaaaacggtcatgttaaaacatacatacacagcatggatggaccattgcagtcaattgaagaacggctaagggatatcttgaagtatcatccacagatagaaccatttaatccagatgattatatggatgtagacgtaaatgaaactatcttagaatatcttgaaacatgctatagaacaggaatgataaatagtgtcgttaaaagatttattatggagaaatag

SEQ ID NO: 27256 - DNA, 1452 bp, Clostridium sp. D5
atgaagaaaaaaggggccgaaattgataaaaaagtagaagaacttaatgataagtttttggaagaagagaagaaaactgagagattaagaaaaaatgctttagatatgaaagctgctcttgaggaaaaggactcgattatttggactgaaagaaaaagaaattctgaattagcagatgaaatagaatctttaaggcaaaaactcgaaatggctgaaaaagaaagagcaaaaaaggcaagtgagtttattgaaaaaacatcgctcatcatcgagcaatccgagtcgcgtgagaaagaaattgaagaccttcaaaaaagcctagaagaagcagattgtattataacagaatacagagaaaaaattgcatcgtccaaggatggatccgaagcgattaaagcggttaacagagatttggaagcacaaattcttgtttttagaagaagaattctcgaaatggaagagaaggttgctgatctactagcagaaaagaaggatttagatattcttatacagcagctaagagaagaaaatgttgctttaaatgctcataacgatgaacttcaatcagcggttcaagaattagaagtcgtagttaagaatatgccactttctgttgagaacgtttgtattgaaacaaaaaaggcgttgctgtatacaatccctaagtgccctgttgatatggatgattttgatgagtgtttttcatataacttcacaaatattgggtttgataaaaccgatgaagctgcaaatgagcttgtggattatgttaaacaaactgtattccgaggggtacctcttttgattaaacgaggtcctggtataaatcttgcaaattgccttgctaatacaatttatggtcaaagccatgcaagggttttctcttacaaatccgggatgaaattgtcggagattgaaaagctgctagcagataataatgacagagtgatttgcattgacggatttattggaacctgtaatgaaattgaacttgttccaattcttgagcagcaccgggacaaaattattgttctgacatatatgtatgataaaactctgagatatgtacctgtagaaattctttcgagtttttgttttatcagtatggatagattccatgctctgatgaaaataaaagatataacggaagattcatctgaaattatggaaaaggactctccaaatcagaataaatgtaaggataatcgcagtagaaagatcttcatggaaatcgctcaggaatgtggaattgattttgctacagcaagtgcgatgacagattctattgaagatgaggcttcgatgaacagaattcttctttttacactgttgccttttgtagtcagtgtaattggagtgaatccatataactgttctaagagacttcagaagtatgctggagaatcaggaaggtgtccgaataaagagacaataatgaggtggtttgggtag

SEQ ID NO: 27257 - DNA, 1029 bp, Clostridium sp. D5
gtggtttgggtagtgaataaacttattgaaataatggcaaaagacatgaatattcctcactattcgggcgagtcggatgagtcatattgctatagggtattatactcggccttaggattatggtgtcttacatcatcattaaatgaagcagacggaatcaaagagatcagcaaaaacacccagacaatacttttacatggattgttagaaaactatttgaagttatgtcccttggcaaaacgatttcttgcgggctcaagaacagcagatatagcaattcatatccgtaatctatatgaacaaatggggtattttgtcacgcttgataacaaccgcaatgttttaaatcagggtggagaaagcataaaagtatccgaaaaagaatatctatttcttggaattccaaaggataaatattgtgttaatggattaggcattcacactcaggataatggacgcgagatagatttaaaagaatatctggtacgcgataacctttcgccagaagaatatttattgtcttgctttgattcttgtgattttgatgaaaaggatgtggagatttctgaattggaatttttcaatccgttttacagaggtaaactttccgaggcgtggaaaaaatatcgtaatgcagatatgactattacgagaaaaagtccaagtggaccgttctatagagtaatggtagatgaggatagtaatctagttttcgctccggaaaaaaataatgatgaaatagattctaaaacaggtgctgagtttagacgaatctatattgcgcttaaggaatactaccttaatccaatgattgccttcatatgcccaattgatgaaaactatacacatatcagaatcctcgggcaacttccgaacagagagtattattacatgctgctgaacgcatggccaaaaagaattttcagcgacagaaataactttataatacgaaatgaattaaccacacaggctgtaaagatattaacagatattggatttacagcgaaagaaggtgagttttatggatag

SEQ ID NO: 27258 - DNA, 5217 bp, Clostridium sp. D5
ttggatttacagcgaaagaaggtgagttttatggatagaaatacgaatggagtacagcagtactaccaagcaataagaagtcgattagcaaactacattaaatcagactatcttgcaaacagcgaaactctgcttctatatgcggatgatattcttggtgaagcatgcggtgacgatatcaatattgcaaaagaaccatatattgagacttcgtcatcctacaagaaactgatggatggtattaagacggccgatattgccgaaaacgtaaaagaagttcttttaaaacttgttgatgcaaagcttggcatttattccacaccgtttgtgcatcaggtgaaagctctcaccagcgcattaaatggaaaagatctttttgtatcaactgggactggttctggtaaaacagagtgtttcctctggtcaatcatcgcacgtgaaattgaggaatccttaaatagaccggaggattttaaacttccggccgttagaacacttatcatttatccaatgaatgctctggtatccgatcagcttgctcgtttcagaaaaattatgggtgcagaagaatttatggagatttttactacatcttctgggagtgatcgcatcccccattttggaatgtatacaggaagaactccatattcaggagatgcaaagaaacagagtaacatcaagcttgcagaaacattccgggctcagtatctggtcgatgaaactgcttcaccaagcgaacaaaaggctcagaaaagaaaaatcgaaggatttaagagtattaacaagtatccagcaagatatggcggagacgcaggccttaagctttttattgataatttggaaaacggtattcataatccaggtccattcgatgcagaatatattactcgttttgaaatgcagcagaatacaccagatattctgattacaaactattccatgttggagttcatgcttatgcgtcagcttgaagcaggtatatgggatgatacgaaagaatggctgcagaaatcagaagaaaaccgttttatgattgttcttgatgaggctcatatgtatagaggttcatcaggtggtgagatcgcacttcttttggacagactgttttcacgtctgggaatcacccttgataaagtacagtttattcttacaactgcaagtatgccgtctgatgacgatgcaattgcaggattctttaacggccttaccggaaaggaatattccaagtgtgtacctcttttcggtgataaagatgaggtaaagaccgaatttaaagtcaatacagatgcagaagcgcttgcatctgttggaacaagtcaggtgactgaagctgagattagtgatagaattcgtctttttgcaaagaaagtatttcaggtagacctttctgaaggattatcaacatcagatgcgcaggtgtggctttttgataatcttccaaattatgaagcctatgttgttcttcataaactttgtagagatggagcaaaaccatattcattattgcgaaaagagatatttggcgacagtgaatatgcgggtgtagcattagatgcacttcttattgttgcttctcttgcgaaaaaagaaggaaatatccttttccctgtgcgtctgcatatgtttgtaagaggtcttcagggattatatgcatgttctaatccaagatgtacttgcggtgccaagtattctgacaaagaaaaactcccacttggaaaagtaatatctattccgcgtgaaaagtgtgagtgcggtgcaagaatgtatgaacttgtgaaccatgtcaagtgtggtgcgctttactttaagggatatgtacagaaaacagctggtacaggatactggtacgtatttcctaataaaggacttagtggaggagcgtatgatctcacagagatgcttctttatatttgtccggatgattatgaattaggagaaaaagacaagttgggttatcttgatccaattacagggaaactctacttagactatcagagtgataaatctctgcttaaagtattatatccggattatgatgaaaaacatgatcgatatatgtttggttcatgtccgaagtgcaaaaagattatgccattaaagaaaccaacagattttgcaacaaaaggtaatattccattttataatctgacaaaagctcagttcgaattgcagcctccgagatcagaacttattaatgagagtaaaaaagtcctgttattctctgactcacgacagaacgcggcgaaactggcattagatctttcaaaatcatcggatgcagatgggttcagacagtgtattattcttgcagcaaacaagattgcagaagatggaaaagaacattctctgaaggaactttataatatattccttgccgtttgtattgaacaaagattatacttctttacaggaaatagcagtgataaatttagagagcatcttgacactgcaaaaacaaaaatcagaagaaatcgaaatattacaagaatggatttcgaaccacttccgtccgattattatgaacagcttctcacgttctttacagagagtcctcgttcattcaaagatattggacttggatttcttgcaccgatggatagttgcctggaagaatgcctggacgaattagaagacgattatgatatcgttatcgatgaggaattgtttagaactttattggttcttctcttttgggatgtcatggatggaagtgctgcattaggaaacgctattgaggacgatatcagaagaaaactgcctggacgtagtaaaaatcaggagtttggtcttgatggtgatttcatgaaatctgttgataaaaaatttattacaggagtaaaagcaataacaggtctcaatgatactcaggtgggcaagtttttagactgtattaaaaggaacttctttggcactggttcagaaacgagtcagaggtattatcttaagctagatacggttaaaattattattacagacgatgattttaactggtattattgtgaaaaatgtggaaagatttctccgtataagcttggagacaagtgtggttcctgctttgattcggaaaaagttcatcttctcaatagtgaagaattgactcgttttgatttctggagaaagccagtactggcttcattaaatgaaggggaaaaggtccacactattgatacagaggaacatactgcacagctgtcacataaagaaaccactagcgatatcttgagcagaacagaagattatgagattcgtttccaggatattgatgtcggtgagttcggtgaagaatctattgatgttttaagctgtacaacaactatggaggtaggtattgatattggttctttgactgcagtaggcttaagaaatatacctcctatgagagaaaattaccagcagagagcaggtcgtgcaggtcgaaagaatgctggaatctctacaatcgttacatatgcatttggtggtgtgcatgatagtcattattttaagcacccagaggagatgatttccggagaaccaagaaaaccttggatcgatagaaataatcccaaaatttttcagcgccactataatatgaaagcattgaatagttttatgtctaccgatgcgatgaaggggctctacgacagtattgtcaaggtaggtattgttactttctgtgagaaattgacagatacatttatcgagcatgctaaaattcttgatttcccgacagacggtacaatagagatgatctgcaagatcagagatatggtacttgccgaaggaaagagaaatgagtatttcaatggggataaagaaacacccgcttttgatgttttttattctgaaggatttattccatcttattctttccctaagaatgttgtaagatttttcgtggaaaacgagatgggttctggaagaagatcttctttagagataaagtatgcccctgaaagagatattgctgttgcaatcagcgaatatgcacctggaagatttatcacgattgataaaaagatttataagagcggcggtttatatgcaaatcctagaccaaagggatttgaaggcaatcaggctgagtactattttacaagcaaagattacaaaaaagaaatcatcgtttgtacagaatgtaactggtttggagaaggtcaggaagagtatgccgaatgtccgtattgtcatgcaaaaatagaaagacatccaatgatcaaaccgtggggattcgcaccagtaaaaggtgatccggttaagtttgaggatgaagaagaagagaaaacatatgcagaggcgccttattactcctatgttccaaaggaaaccgaaatgcagggttacaagaatagccatattcgatatgctaatcttgagaaccgtcatgtccttactgtaaatatgggaaaaaagaaaaacggctttaatatctgtacaaaatgtggtggcgcggaagttgcagaaccggtaccgtccggaaactactatttctcacagccatatcatgacagatgtttatgcagacatgaaggcactgtagcaacaaacattttccttggttacgaattcctgacagatatgtttacgttggacatcaaatatgatactcggcgacttgtatccaatttcgataatgaggaaaagaatattcttcgttcagcagcaacaacccttcatgaggcgatcaaaaaagcggtttcactctctctggatatcgattataacgaaatcaatggaggatggagaacccgatatgaagataatggcgaagcacatatcgagatgttcttctatgataacctgacaagcggtgctggttactcatcgctgattggagaagatgaagttcttgatgatgtcttcagacgtacacgagagattttaagcggctgttcatgttcaaagtcctgtagaaactgtcttgataacttctacaatcaaagaaatcatgatatatttgacaggacacttgctgtacagctttttgaatatgctctggatggaaaatatccggaagattattcacaggaagagcaggagaaataccttgttcctctgaagaaacttatttctgaaacgaaaggaatcacattggatggaagcattagatttgaagtgattccatccttaagaaagcgaatccgtgatgatgcaggtgagatgtatcttaatccatataacctgtctgactggctcccaaatgcttttatggagtttttgggaaagattaacgagtag

SEQ ID NO: 27259 - DNA, 1440 bp, Desulfitobacterium hafniense DCB-2
atgcgaaaggcatacgatacatttttgctatctgaagtgtctgcggatttggctgcaaaggccggcagctttgagccgtatcgttatgagtgcgcgcattgcggagaagaagttcgtctggctgcagtgggtagtaccagtatggttccgcatttccggcatcgtagtgggaatagtgatattgaatgtgaatattatttagggcaattcagtgctatcacggatgctcgctccagaaaaagcaaaaatgaaagagcagaattctattttgatagcaataccaaaatgttttatcttggcttgaggtttagcgaagatgagatatctgcctatgaacaactttctactattttcgaattaagagttgcgtctcaggcacaaccgttctactcattgcaaattaacggtagaaactttacctctgatatgcagaggctgattccccttgaaaaattctcttacagctatttcttgtcaaacacgctaaatggtgtcaagagaaaatacgaggtgtttaataacgtcgcaaacaacgccgcgactttctttaagatgcaagtaggtgatagtgactacagagcaaagttagttcgcagtgccgttctttatacgaatatcccgtacttcatagctttccaaagtcagagccatcattggtcaccaatagatattcgtctgccaagggaaataagggtcgaaagtactttcaagtttgaaacaatggggaggaagttcttggggaagattttgaccataactgcaaaaacagcacaaattgactcattattattctcttggggttatcagttggaatcctcagaaaaactgaccttactttggccgccagcaatcctttcagaagatatatcaataataaatgcagatacagcgtatctgtattcaacatttgagctgcaggcacacggcaatatcaatgtccattctgaagacattacgaagattgtcgatgggcttacaaagattgccgttaagccaagaatcaaagtatataagaaaaacgcggaactgatgcttgaaacctgcgagcgagaaacagatacacacattaatatccttgtggctcgaacagttgaaaaaaactaccgagttccagacgatgtatcctttttgttcaatcgttccggggttttgctgttgagcaagggtgtaaccgtccagatgactcccgatagcgaagttagacactatacaaacgggtatctggatggaatagttgctccatcagaacaagcaatgttggtcggcgagtctctactccaagatgctcttatacattataaaagaatggaaacattcaactgggccgatttcaagtcgcttgaccttagccagattgcttttcaatacatcgaagactgcgagaagtcgggtttgattaactccgcggcaaaacacttcattgaggagggacggatatga

SEQ ID NO: 27260 - DNA, 1020 bp, Desulfitobacterium hafniense DCB-2
atgatgaatggcctactgacaactatgtcgaacgatatgaatattcctcgttatctcaatgagtccgacaaatcgttcatttatcgcctctgctattctgcgttggggcaatggtgtctaagcacggcaatgaattcgacaggaggtgccgttggcacgacaaaacacaaccaaactatcgtccttaatgacctgttgtcacgatacaccgaattgtttccgcaaatatccgaaaagttcattgacaccagcagtcagcaaacaaatttttcagttagtgttcgaagaacttacgaggaaacgggatatctattgaccgatagcgataaccacaaccgaatcgcaagctatggcagaactattcgggtgggcgataaatttttattctttgggctacccggtaaaccttgcgaagttaacggacttgggctgtttgcgaactctacggactatttggttgctttgaaggactttctcataagagattctttgacgagcgaggcgtactttgattcgcggtttgacccaattgatttttatcaaagggacattgatttatccgaactagagtttttcaatcccaagtcaaataatgtaccgtctatgtcgtggactaaaaagcctgaaacagattgcactgtggcgaggaaaaccgaaacgggtccgttctatcggataatgaaagtaactggcgagatacagtttgccgacgagccgattgaactgcaaacagatagttttacgtcgtatgaatacagaagattgtactttgccttgaaaacccattacggtaatcctcttagggcaaccattacgaaactcgatgagttgtattcaaaaattcgtataggaggacacttgccgaatcgcgaatactatctattattgcttttgtcgtggccggaacacagtgcctttgacaaagtgaactttattataagaaacgaactgattgctggggtaactgacacgcttgtagacatcgggatagaaatcaagggagggcaaccaaatgcataa

SEQ ID NO: 27261 - DNA, 5223 bp, Desulfitobacterium hafniense DCB-2
atgcataatcctaacggagttcaggcgtattatcaggctattcgtgatagactgaagaactatattaagtccgactacttggcaaatagcgaaacgctattgcgctatgtcgatgacatactcggcgatttgtgttctgagtacacgaacatcgctcgcgaaccgtatattgaaaccgcagcttcttacaagaaaatacaagatgggatacggaactcttctcaaattgagcaaggggtaaaagaatctttgctaaaattggttgccaaaggacttggtattttctctgacccatttgagcatcaagttaaagctctcgaatatttccttgccggacgggatttgtttgtgtccacgggcaccggttccggtaagaccgaatgctttctttggccgattattgcaaagagttttgaagaagcaaagaatcaccctgcgacctttaagaacgaggctgttcgcacacttatcatttatccaatgaacgcactcgtttcagatcagttagcgcgtttcagaaaaattatcggtagctcagatttcaaagatatatttacgcgtgacacacacgcaacacggatacctcatttcggtatgtacacaggcagaactccgtactcaggtgatgcgaaaaaaacaagcagcaaagagctggcgatgactttccgagacaacttcctaattgatgaaactgccgatgctgacacgcaaagaaggcaaacgaacagtatccaagggctaaaaagcatcaacaaatatcctgcgcggtttggtgagaacggacttcgtgtctttatcgagaaccttgaaaagaatatccacagaccgtcaccatatgatgccgagttcattacgcgttttgagatgcagaattatccgcctgacattcttattaccaactactcaatgttagaatatatgcttatgcggcaacgcgaggctaatatttgggataaaacaaaagaatggcttgaggtttcaaacaaaaataaattgctcattgttcttgatgaggcacatatgtaccgtggctccgcgggaggggaaattgctctcttactggaaaggctgttctaccgtcttggcattcccgtagaaagggttcaatttattctaacaaccgcgagtatgccacaaaatgagcagtcggcaattaacgatttttatagtggactgactggcaaagcggcttcttcttgtgaatttctctttgggtcaaaagaggagattcctgacgagcaggaaataagaacggatattgaggcgttagcctcgataggttccgaccaagtccaaggcgatgaaataacaaagcgtattcttgactttgcttcttttgtgtttaatacgaccttgccgtctgacattagtcaagatagtgcacaagaatggctatacgacaatcttccaaaatatgaggctttcgtcaagctgaatagactctgccgtgatggtgcgaaatcgtatagcgaaataaaagaagctgtctttggaaatgttgctgcttcggacaaggcgcttgataccctgttggtattggtttcactggccgcgaaaggcggtaacattctgttccccgttaggctccatatgtttcttcgcggcttgcagggactttatgcctgctcgaaccccaaatgcacttgtgcaaaatactcagaaagtgaaggattgccacttgggaaagtcatctctattccgaaggataagtgcgagtgcgggggcaggatatatgaactcttcaatcacataaaatgtggagcgttatatattcgagcatttgttcaaaaaaatgagggtcaaccatactggtacgtcttcccgcaaaagggtttggacggggatgttaattctttgcaagaactattgctttacgtcgtccctaaacaatatcagtgcgggaagaatgataagattggctcccttgacccatttacaggtaaactgtatctgaccccacaggatgatgaaactctacttgatgttgtctactacaataaaagtgaaaaaggcaaaaagacagatgctaaaggaatgccttttaactttggtgtatgcccaaaatgtaaaaagccgatgccgttaaaaaagcctgtcgacttgtcaaccaagggcaatataccgttttacaacctgactaaggcccaattcgaacttcagccaccgaagtctggacttatcaaccaaggcaaaaaggtgttactgttctccgattcgcgccaaaatgcggcaaaactcgcattagatctttcaaaatcatcagatgcggatgctttccgtcaagccataatgcttgcatcgcttttgttagagatagacggtaaagaacattctttggctgatttgtaccctgcgtttctggacgtgtgcaatcaaaatagccttgctttctttagcgggacaagcaaagacaaattcgatggcgataagcgaaaatttgccaaatctaaagcaaacgcagaaaaacgtggacgaacaattaactattcctccttgcttggtgattacggtgctttaccagacaattactatgaacaacttttaactttctttactgaaagtcctcgttcattcaaggatattggaataggttttttagcaccattatctacagttctggatctttgtatggaatacttagaagacgatgatatcagtatcgataaaactaagctttaccagttgcttgtgctgatgttttgggatgttatggatgatagcgccgccttaggagaaaccatccaagatgacgtgcgaaaaggattgcccggacgaagcaagaaccaaacattcggacttagcttcgacttttcaacatcattggataaaggacttctccagcgaattcaggaattgttggaccttgattcccccacaatggtaaaaatcgtggataaggtacgcgacttattctttgcctcttcgtctaccaatcgctactacattaaattgagtgcagttaaaatcgaactggcggacgataattttgtgtggtatcggtgcgtgaagtgcggaaaattgtctccgtttaaaattggtgactattgtggtgcttgttttgattcgaccgatttagttcccattgacgagaaggaattgtcacgctttgacttctggcgcatacccgttctaaatgcactcaaaaagatagaaaacattcacacgattgataccgaagagcatacggcgcaactttcacataaggaaatccgtagcgacacatggagccgcacggaaaaatacgaaatgcgcttccaagacattaacgctggagaacatggagaagatgcaattgatgttctcagttgcacaacaacaatggaggtcggtatcgatatcggctcattgactgcagtcgggcttcgcaacatcccacccatgagggagaactatcaacaacgagcaggacgtgccggacgtaagaatgcagggatatctacaattgtgacttatgcctctggaggtacgcacgacagccactacttccaacaccctgatgaaatgatttccggtgcaccacgtaagccgtggatagatcgcgacaatctaaaaattaaacaacggcacgtaaatatgctgacactaaacgggtttatgtccacggaagctatgagaacccaatttgatgggattgttgatatagggattattgaattctgtgaattatatggcgaaaactttattgagtatgtagagaaattttctaaaaactctggactttcaaccgctaaaacaatagaacatttccgagaaatatgcgggcttgttttagcagagggcaagcgtgatgaatatataaacaatgacaaagagacgcctgcgttcgatgttttttatcgcgaaggctttatcccgtcttactcttttcccaaaaatgttgtaaggttctttgttgaaaaggaatcagagcgaggcaaaagtgcgccaagggatattcagtatgcacccgaacgtgacatagccgtggctcttagcgaatacgctcccggtcgcttcgtgaccatagacaagaaaatatttaagagcggaggaatttatgctaatcctcgtccccgtgggtttgaaacaaatcaagcagagttttatttcaagaacacggactactacaaggacatctttatctgttccgaatgcaactggttcgggcttcaggaggatgcaagcctatcacaatgcccatactgtggctcggacattgtgaaaaacaaaatgctgcgtccttggggattttcccctgtaaagggtgatgaagtaaagttcgaggatgaagacgagcaatacacctatgccgaagccccgttctattcttatgtccctgaggatacgaggatggacagctttggacagagcaaaatccgtttcgccaatttgcctgaccgcaaagtactcaccgttaatatggggaagagtaaaaacggattcaatgtttgcaaaaaatgcggaggagcggaggttactgacgcaaagggaagtgcgaggtatttgttttctcagccttatcatgataaccacccactctgccgacatgaaggaaccgttgcccacggcatttatctcggatatgagtttcttacggatatgtttatgcttgatatttcctacgactcgacaagattggtaggaaatcatagtgctgaagataaaagcatccttcgtgcggctgtaactactttgcacgaagccctcaaaaaagctgtcgcactcgttttggatatcgactataacgaaatcagcggcgggtggcgtccgagaatcaagggagacgggaactcgcacatagaaatgtttttctatgataatctgaccagtggtgctgggtattcatcccttatcggctcgattttagacaaggtacttgaacgggcgcgtattatactgactgagtgcgaatgttcacgttcctgcaagaactgcttggataattattggaatcaacgaaatcatcaaatgttcgaccgttatctgggattgcaactgcttgcctacgcacaatttgggcaattgcccgatgattatgaagtaagcgagcaggataaatatcttcgccccttactcaagctaataacggaggacggcggcgtgccatccgcgtttgaggttattcctgcactgaggaaaaaacctgataacaaacaaagcaaaatgtatctcaatccatacgatctaacggattggcttcctaatgcgtttatgacatatcgaaatctgatgagtgaggggtaa

SEQ ID NO: 27262 - DNA, 1443 bp, Desulfotomaculum acetoxidans DSM 771
atgcgaaaagcatacgatacatttctgttatcagaagtgtctgcaggcttagctgccaaagctggtagctttgaaccgtatcgttatgagtgcgcacattgcggagaagaagttcgcctgtccgcagtggatagcaccagtatggttccacatttccggcatcggagtggaaatagtgatgttgagtgcgaatattatcttggtcaatacggggcatttagcacggacgcccgttcgaggaagagcaaaaatgaaagagctgaattttacttcgacagtaatacaaagatgttttatcttggcttgaggtttagcgaagatgagatatctgcctatgaacagctttctaccattttcgagttgagagttgcatctcaagcgcagccgttctacatattgcgaataaatgggagaaacttttccattgatactcagagactgattcctctcgataaattctcttgcaactattttttgtcaaacacgctaaatggcatcaagagaaaatatgaggtgttcaacaacgtcgcaaacaacgcagcgactttctttaaaatgcaagtgggtgatggtggctatcgagccaaattagttcgcagttccgttctttatacgaatatcccttacttcatagtttttcaaagtcagagcccgcattggtcgccagtagatgtttgtttgccaagcgaaataaaggtcgaaaacactttcgaatttgagacgatggggagaaaatttataggaaaggttctgaccataactgcaaaaacagcacaaattgactcattattatcctcttggggttatcagttggaagccgctgaaacgctgacattgctttggccgccagcaatcctttcagaggatatatcactaattaatgcagatgcggcgtatctttattcaacattcgagctgcaggcacatggcaatatcaatgtccattcagaggacattacgaggattactgatggggtttcaaaggttgccgttaatcccagaatcaaagtttataagaagaacgcagaactgatgcttgaaacatgtgagcaagaaacagatgcatacatcaacttacctgtggctcgaagggctgaaaagaactaccgtgttactgacgatgcgtcctttatgttcaatcgttctggagttttgccgttgaacaagggtgtaactgtccagatgactcctgatagcgaagttagacattatacgaatgggtatttggatgggatagttgctccgttagaacaaattacgatgtctggagaatcattgctccgagatgctcttatacattataaaaggaccgaaacgctcaactgggatgatttcaagtcgctttaccttagccagaccgcttttcattacatcgaaacctgcgagaagacaggactaattaactctgcggcaaaatacttcattgaggaggggcggatatga

SEQ ID NO: 27263 - DNA, 1017 bp, Desulfotomaculum acetoxidans DSM 771
atgaatgatctgctgaaaacgatggcaaacgatatgaatattccccgttatcacaatgagtcagatgaatctttcgtttatcgcctctgctattcagcgttggggcaatggtgtctaagcacggcgatgaatacgacaggaggagccgttggtactacgaagcacaaccaaaccattgtgcttaataaccttttatcacggttcaccgaactgtttccgtacataaccgatagattcattgactccagtaatcagcagatatcttttttggtcagcgtccgaagggcttatgaggaaacaggatacttattgaccaatagtgacaaccacaaccgaatcgcaaactatggcagaactattcgggtaggcgataagtttttattctttgggctaccctgtgaacattgcgaagttaacggacttggggtgtttacgaaccctacagactacttggttgttttgaaggattttctcgtaagagattctctgccgggcgaggcgtacttcaactcgcggtttgacccaattgatttttaccaaagggacattgatttatccgagttggaatttttcaatcccaagtcgaataatgtaccgtctatgtcatggggtaaaaaacctgaaacagattgtactgtggcgaggaaaaccgaaacaggtccgttctatcggataatgaaagtaaatgacgatatacagttcgccgatgaaccggttgaacagcaaagcgatgtttttacatcgtatgaatacaggagactgtactttgctcttaaattccattacgacaatcctctgaaggcaaccatcacgaaacttgatgagttgtattctaaaattcacatagcagggcacttgccgaatcgcgaatactacctgctgttacttttgtcgtggccggaacgcaatgcatttgacaaagtgaactttattataagaaacgacttgcttgcaagcgtaactgatgcgcttgcagacattgggatagaaattaagggagggcaaccaaatgcataa

SEQ ID NO: 27264 - DNA, 5226 bp, Desulfotomaculum acetoxidans DSM 771
atgcataatcctaacggggtacaggagtattatcaggctattcgggataggctgaagaactacatcaagtccgactacttggcaaacagcgaaactctattgctttatgtcgacgatcttctcggcgagttgtgttctgagtacacgaacatcgcccgcgagccgtatattgaaaccgctgcttcttacaagaaaatacaggacggaattcaaaactcttcccgaatcaagcaaggagtaaaagagtcgttgttcaaattggtagccaaaggcctcggcattttctccgacccgtttgagcatcaggtaaaggcactggaatatttccttgctggacgagacctgtttgtttcgaccggtactggctctggtaagactgagtgcttcctttggccgattattgcaaagtgtttcgatgaagcaaagaatcatcctgcgatctttaagaacgaagcggttcgcacacttatcatttacccaatgaattcactggtttcagaccaactggctcgtttcagaaaaattatcggtagcccggacttcaaatatatatttacgcgcgatacccacgcatcacggatacctcatttcggtatgtacacaggcagaactccgtactctggtgatgcaaaaaaagcaagtagccaagaactggcgataactttccgagagaactacctaattgacgaaactgccgatgcctacactcaaagaaggcaaacgaataatatcaaaggacttaaaagcatcagcaaatatcctgcgcggtttggggaagacggacttcgtgtctttattgagaatcttgaaaagaacatccacagaccgtcaccatatgatgccgagttcattacgcgctttgagatgcagaattgtccgcctgacattcttattaccaactactcaatgttagagtatatgcttatgcgtcagcgtgaagctaacatttgggataaaacaaaggagtggcttgagacctcggatgagaacaaactgcttattgttcttgatgaggcgcatatgtaccgtggctctgccggaggggaaattgcgctcctgctagaaaggctgttctaccgtctaggaatttcctcagaaaaggttcagttcatcctgacaactgcgagtatgccccagaacgagcagactgcaattaacggtttttataccggactaactggaaaagttgcttcttcttgtgagttcctctttggctcaaaagaggagattcctgacgaacaggaaataagaacggatatagaagcattagcctcgatagattccgaccaagtccaaggagaagcaatcactaagcggattgccgcttttgcatcttccgtatttaagacgaccttgccgtctgacattagccaggatagcgcacaagagtggctatacgacaatcttccgaagtatgaggctttcgtaaagctgaatagactctgccgtgatggtgcgaaatcatatagcgaaataaaagaagttatctttgggaatgtagctacttccgaaaaggcgcttgatgccttgttagtattggtttcactggccgcgaaaggcggtaatattctgttccctgtcaggcttcatatgtttcttcgtggcttgcaggggctttatacctgctcgaaccctaaatgcacccgtgcgaaacaatcagaaagtgaaaaattgccgcttgggaaaatcatctctattccgaaggataagtgcgagtgcggaggcaagatatacgaactcttcaatcacataaaatgtggagcgttatatattcgagcatttgttcaaaaaaacgagggtcagccatactggtacgtcttcccgaaaaagggtttggatggggatgttaattctttgcaagaaacattgctttacgtcgtcccaaaacaatatcagtgcgggaagaatgataagattggctcccttgacccattcacaggtaaactgtatctgaccctgcaggatgaggaaactttgcttgatgttgtctactacaataaaagtgaaaaaggtaaaaagacagatgcgaaaggaatgccttttaactttggtgtatgcccaaaatgtaaaaagccgatgccgttaaaaaaacccgtcgacttgtcaaccaaagggaatataccgttttacaacctgactaagtctcaattcgagcttcaaccaccaaagtcaggccttattaaccaaggtaaaaaggtattactgttctccgattcgcgccaaaatgcggcaaaactcgcattagacctttcaaaatcttctgacgcagatgcgtttcggcaggctgtaatgctcgcttcactattgttagaggtggatggtaaagaacactccttggctgatttgtaccctgcgtttctggatgcgtgcaatcagaataaccttactttctttagcggaacaagcaaagacaaattcgatggtgataagcgaaaatttgccaaatctaaagcaaacgcagaaaaacgtggacgaacaattaactattcctccttgcttggtgattacggtgcattaccagacaattactatgaacaacttttaactttctttactgaaagtcctcgttcattcaaggatattggaataggttttttagcaccattatctacagttctggatctttgtatggaatacttagaagacgatgatatcagtatcgataaagctaagctttaccaattgctggttctgatgttctgggaagtgatggatgacagcgcagccttgggagaaaccattcaagacgatgtgcgaaaagggctacccgggcggagcaagagctctaattttggactgagcttcgactttttaacagcattggataaaggactgcttcagcgaattcaggaagtattgtgccacgatgccataacaaccaggaaaatattagacaaagtgcgcgacctattctttgcctcttcatctgccaatcgctactatattaaattgagtgcggttaaaatcgagctggcaagcgaggattttgtatggtatcggtgcgtgaaatgcggaaagttgtctccgtttaaaattggtgactattgtggcgcttgctttgattcgtccgatttagtttccattggcgaggaggaattgtcacgctttgacttctggcgcatacctgttctaaatgcacttaaaaagatagaaagcattcacacgattgataccgaagagcatacggcacagctttcacacaaagagattcgtagcgacacatggagtcgcacggaaaaatatgaaatgcgcttccaagacataaacgctggagaacacggcgaagatgcgattgatgttctcagttgcacaacaacgatggaagttggtattgatatcggctctttgactgcgatcgggcttcgtaatatcccgcccatgagggagaactatcagcaacgagcaggacgtgctggacgtaagaatgcagggatatcaactatcgtgacttacgcctctggaggtacgcacgacagccactacttccagcaccctgatgaaatgatttccggagcaccgcgtaagccgtggatagaccgcagcaatccaaaaattaaacaacgccatgtaaatatgctgacactaaacgggtttatgtccacggaagctatgagaacccaatttgatgggattgttgatacagggattattaaattctgcgaattatatggtgaaaactttattgagtttgcagagcaattttctaaaaactcagggctgtcaacggctaaaacaatagagcatttccaagaaatatgcgggcttgttttagcagagggcaagcgtgacgagtatataaataatgataaagaaacgcctgcgtttgatattttttaccgcgaaggctttattccgtcttactcgttcccaaagaatgttgtaaggttcttcgttgaaaaggaatccgagcgcggcaaaaattcgccaagggatattcagtatgcacccgaacgtgacatagccgtggctcttagcgaatatgcccccggccgcttcgtgaccatcgataagaaaatatttaagagcggtgggatttacgcaaaccctcgtccccgtgggtttgaaaccaatcatgcagagttttacttcaagaacactgactactacaaagacatctttatctgctccgagtgtaattggtttgggcttcaggaagatgcaagcctatctcaatgcccgtactgtggctcggagattgtgaaaaacaaaatgctgcgtccttgggggttctcccctgtaaagggcgatgaagtaaagttcgaggatgaggacgagcaatacacctatgccgaagccccgtactattcttatgtccctgaggatacgaggatggacagctttgggcagagtaaaatccgtttcgccaatttgcccgaccgcaaagtgctgaccgttaatatggggaagagtaaaaacggattcaatatttgcaaaaaatgcggaggagcggaggtaactgacgcaaaggaaggcgcgacgtattcgttttctcagccttatcacgataaccacccactctgccgacatgaaggaaccgttgcccacggcatttatctcggatatgagtttcttacggatatgtttatgctcgatatatcttacgattcaacaaagttggtgggaaaccgcagtgctgaagagaaaagcatccttcgtgcggctgtaactactttgcacgaggcagttaaaaaggccgtctcactcgttttggatattgactataacgaaatcagcggggggtggcgtccgagaatcaagggagacggtaactcgcacatggaaatgtttttctatgataatctgacaagtggtgctgggtattcatcgcttattggctcgattttggacgaggtacttgaacgggcgcgcattatactgactgggtgcgaatgttcacgttcctgtaagaactgcttggataattattggaatcagcgaaatcatcaattgttcgaccgacatcttggcttgcaattacttgattacgcacaatttggacagttgcccgatgactacgaagttagcgaacaaaatgaatattttcaaccattgctgaaactgataaccgaggacggcggagtaccgccactcgcatttgaagttatccctgctatgcggaagaaacccgacagtacacgaagcaaaatgtacctcaatccatacgatctaacggattggctacctaatgcatttatgacatatagaaatctggtgagtgagggataa

SEQ ID NO: 27265 - DNA, 1446 bp, Erysipelothrix sp. LV19
atgctgaaagcgtttgattcggtacttcagatttcagtatttgcagattctgtggaagataatagtgattatgaacctcttcgttatgagtgcttacattgtggtgaagaagtaaagattgcggctgcggatagtagtagtatggtagcacatttccgccatcgaaatggtaataacgacattgaatgtgagaagtatttaggccatttagataattctaaattagtacatttatttccgaaaaaaaagaaaataaagtgcgatttttattataataattttaacaaatctttttattttggagttactttttccgatgaagaaatatcaaaatttgagaaagaacgttcacaccttataatatataatcactataacaaaagtcaaaaaaagaaggttgcaattaatcatacattcttttctccaaactcagtagcgaagatagaagttgattttttttcaaaccaatatgagctttcaaatccctactataattactcggatgttaaaaaaatcttcaattcaaatagcagacctacgttttttaagatgttaggagacgagcccaagtataaggcgaaacttgtattaagtaaaactttgtatacaaatataccatattttattacttatcaagaactctactcttcaccaatggacattaattatccacaagaaattaaaacaccaatgttaccaacttattttaggacgttggatagaaattttataggtcgggttgttaggtttacaaaacgaagtcaagaagtaatgaatcttattagatcttggggatatgaattagaagactctgaaacactaacattgttatggcctcctgcaataaatcagaataataaatacttagttaatactaatttttcatatctttactcatcatttgacctaaagtttcgacgaaatataaatatagatgaagataatattagaaggcatgaaaaagggattactagagtatgttttgattctgatttgagaataaattcaaagaatatcgatgttgtactagctacgcatcaagatacctcgactgattttgatcaaattacattttctaaacacgaagcatcaatatttaaggttccttcttttactggttcagagtcgtatcatttatttaacagttcaggtgtacataagttaaacagtggacagaaagttatcttgacaaaagggagtacgatcaagtgctactcaggtaatagattatgtggtgttgtttacccaagacaaagactagtaaattcaaaaaaactaattctagcagatatattgaaatattataaaagaacagaatgtataagagatggtgagtttgatggatttgaaatttgtgaagaagcaaaaaaatatgtatatggttgttatgagaaaaaacagattaataccgttgtaaagcaatatatattagagggtaagttatga

SEQ ID NO: 27266 - DNA, 1026 bp, Erysipelothrix sp. LV19
atggtttttattatgaaagatatgattgagaaaatgggaatgtctatggacatcccatgctataaaaatgaaggctatgactcttatgtatttagagtaatttattctgcactaggtcaatggtgcttaacaattgcagctagtaaaattaatgaaatggatggagtgacgaaacaccatatttcgattgctttaaatgagttaatagcaaagtatattgatttgttcccagtattagaaaatattctttattctgaatctagtgtaaaactatccttacacattcaaacagtctatttagaaacagggtatttgacgttaacaaatgccaatttgttacaagtttcaaactttggtgatggattaatatttgataatgattttgcaattatgttgggacttccaaatatacggtacgaaattagtggattaggtgtgttaactacaccaaaatcaatagtattaccagttgagactaaggactttttaattagagacacactaagtccacaagaatattgtttatgtaatttcgattctagcgatttctctctaaaagaaattgatattaacgagcttgagttcttcaatcccctctcgaaaaaatcgccgtcaagctcttgggaaaaaagtccaaacacagaatttactatagcgcgtagaatcaaaacacgaacatactaccgagtaattaaccggaataatgatttctattttgcagaaatgattgaagatgaaaggaatggatcattaacagcgtatgagtatcgtagagactactttgcattgaagtcattatatgataatccgttgagagctagagttagaagattggataataattattctatattgtcatttgagggtcacttgcctaatagagaatattacttacttttactccttgcatggcctgctagtaacgcatttgataaaagtagtttcatcattattaataaagcattgccatttgttgggagtgtattaaatgatataggaattgtaatttatgaaggagaaatataa

SEQ ID NO: 27267 - DNA, 5220 bp, Erysipelothrix sp. LV19
atgagtaattcagttggagtaaaagaatattatgaatcaattaggcttcgtttgaaagattacattaaatcggattatttggcaaatagcgagacattattattatatgaagaggatttgttgggggagttttgttcggaacacaccagtatatcgcaggaaccatatatcgagacatcagcgtcttataaaaaatcatatgatggaattcgtttatcagcagctttagataataatattaagagttcacttgtgaaattaattgatgcaaatttaggaatttatgaaaacccatacgaacaccaagttaagtctctggaattatttatggaaggaaaagatttatttgtttcaacaggaactggttcagggaaaacagaatgttttttatggccaattatttcaaaaagcttttatgaagctaagaataaaccacgaagctttgaaagaaatgctgttaggactctaattatatatccgatgaatgctctagtttctgatcaactttcgagatttagaaaaaatattggaagtgagaaatttaaagaaatatttaccgaggatacgaaagcaaagcgtattcctcattttggaatgtacaccggcagaacaccatcaccagggaaaaaaacacctcaaaacagtaaagagctagcagaagtatttaggaaagagtatttgttggacgatcttcgtacttcagatagagaaaagaaaatcttggatattgaaggcttaaaatctgttaataagtatcctgcaaggtatggtgaagatggacttgaaaaattcgtcgataatttaactagaaacattcatgagacggatccatttgatgccgaattgattacaagatttgagatgcaagcttgtccgccagatatactcatcacaaactactcaatgttagaatttatgctgatgagacagcgcgaggcaaacatttgggatcaaacaaaagactggcttcatgaatctacagataataaacttctaattgtattagatgaagcacatatgtaccgaggatcttccgggggagagattgcattgctacttgaacgactctactctcgtttagatatttcattaagtcaagttcaatatattttaacaactgcaagtatgcctaaagaggaatttgaagctatcaatgctttctatgaaggtttaactggtaaacctgcaaataattgtgaattcttatatggcacaaaaaaatcaatttcaaatagttttgaaatccaaacaaatgttgatgctttagtctctattggatttagtcaagttcatggtaatgaaattagtgatagaattaaatcattttcaaaatcagtttataatgaagaattgaacgaagatatgaatcaagaagaactacaaacttggctatatgataatctgtatagatatgaagcatttgtgaaactaaacgaaatatgtcgagatggggcaaaatcctacagcactattaaacaagaattatttgggaatcatccaaattcagataaagcattagactctttacttgtagttgcttccttagcaacaaaaaatggaaatgttctttttccagtaagattacatatgttcttaagaggtttacaaggtttgtatgcatgcactaatccaaaatgtaagtatgcaaagtattcttctgaagaaaaacttccaataggaaaagtaatcgctattcctaaggaaaaatgtgaatgcaacggaaaagtttatgaaattctaaatcatagaaaatgtggtggtttgtatctaagagtatacattcagaaaaatgaaggggagtcattttggtatacatttccaaaaagaggattgagtggagatgtacattcactaaatgagatgcttctatatattgttcccaaaggatatcatcgaagatcaaaagataatattggagcacttgatccgtatactggtaaattgtatttatcaccacaggatgatgatgggttactgaccgttatttatactgatgactttgatacgaaatcaaagtcatataattttaatgtttgtccaaaatgcaagaaacaaatgaggttacaaaaaccttctgatttatctacaaagggaaatatcccgttctataatctaactaaagcgcagtttgaattacaaactccaaaatctaatttaattaaccaagggaaaaaagtgcttcttttttctgattcaagacaaatcgctgcaaaactagcattagatttatcgaagtcatcagatgctgatgctttcagaaaagcaatattactagcttcattaagagcaaatactgcttcgtacgaatgttccctagctgagttatatccagctttcttagaagtgtgcgcagataataaacttagtttttttaacgggtctagtaagttattatttcaagatcaaaaaagaaagttttcaagaagaaaagcaagaattgaaaacaaaggtaatgtgtttaattttttagatgttgtatctgattttcaagaacttcctgatcaatactatgagcaacttttaacgttctttacagaaagtcctcgttcatttaaagatattgggcttgggtatttagccccaaaatcaatattactagatgaatgtcttgaggaattggaagagaatgacattataattgatagtgatttgttttatcagtttttagttactctattttgggatgtgatggatggtgaagcagcattaggacatactattgatgatgatgtgagacgaggtcttccagggagaagtatgaataatgattttgggttagattttgattttattaagtctttggacaaaaatcttgtagatacatcaaaaagtctatttaatataagtgataaccaaactcaagaattattggacattattcgggattgtttctttgattcctcaaaaaagagtaaatactatattaatttgcgaaaggtaagaattgagtttactagtgaagaatttccttggtataaatgtatgcactgtggtaaattatctccttttaagttaggagataaatgtgctgcttgttatcagtcagtcgatctaaagattattggtaatgatgatttgactcgatttgatttttggcgcaaacctattataagagctctagaaactcaagagaaaattcagacaattgaaacagaggaacatactgcacaactttcacataaagaaccgagaagtaatagtcgaagcaacactgagaaatatgaattgaagtttcaagatatcacagctggtgaaaatggggaagattccattgatgtattaagttgcactacaactatggaagttgggatcgatattggttcacttactgctgttgggttacgaaatataccaccgatgagagaaaactatcaacagagagctggacgtgcagggcgaactaactcgggtatttctacgattgttacttttgcatctggtggaacccacgatagtcattatttttctaatcctgaggaaatgatatctggtgccccacgaaaaccatggatagatcgaatgaaccacaaaattaaacaacgtcatattaatatgttagtgattaatagttttatgtcgagtgatggaatgcgtacaaagtatgatggaataatggatataggaattataactttttgtgagaaatacggatcattgtttattgaatatgcaaaagacttcgagttgaagaattctgtgtctaccgtgagtactattaagttatttaatgaaatctatgatacaattattcttcataatcgacgggaggagtttatgaataatgataaagaaactagtgtttttgatgtgttttataaagaaggatttataccatcatattcgttcccaaagaatgttgttaagttttatgttgaaaaagatttgaagaactataaaagcgctaacagagaaattcaatatgctcctgatcgtgatatttctgttgctttaagcgaatatgctcccggtagatttataacaattgacaaaaaaatatataaaagtggtggaatttattccaatccaaagccgaaaggatatgaagataatcaagcagaatattattttaacaacagagattacttcaaaaatattcttgtctgttcagaatgcaattggttcggtttagaaaatgaatcatcaagtcaccctgtttgcccttattgtggatcggagtatacaaaaaataaaatgttaagaccatggggatttgcacccattaaaggacaatctgtaaagtttgaagatgaagatgaacaatacacgtttactgaagcaccattttattcttatgttccttctaataccaaaatgcaacggtataaatcgagtaacataaagttttcaaatctcccggatcgtaacgttttaactgttaatatgggaaaacaaaaaaatggatttaacgtatgtaagaaatgcgggggtgctgaagtttccaatgatcttgttacaaataaattctctgtaacacaaccttaccatggctatagcgtttgtcaacataacggttcagtggaagcgaatatatttttagggtatgaatttctaactgatatgtttatgctcgatatttcttatgatacgaagaaacttgttggaagtggtcgtattgatgagaaaacaatcctaaaatccgctgctacttcattacatgaggttttaaaaaaatccatttcaatagttttagatattgactataatgagattagtggtggttggcgtcctagaattgggaaagcagatgattcatcgcttgagtttttcttctatgacaatttatccagtggagcaggatactctacattgattggttcaatattagatcaagtactagatcagtcaaggagaattttgacagagtgtgaatgttctagagcatgtaaaaactgtctagataattattggaaccaaagaaatcatgacctgtttaatagggacttagcgttacagttactagattatgctcagtttgatgtttatcctcaaccatacagtgaaagcaagcaacaagattatttagaaccgctactcagacttatcgaagaaaactcaagaattgccaaaaaagaagtattgaataatatcgaagttataccagcattattgaaaaaaagtgacaatgtttccaatatgatattttttaatccattagatttatctgattggttgccaaattcttatttagaatattgtaaactcgttgagaagaggaaataa

SEQ ID NO: 27268 - DNA, 1215 bp, Escherichia coli
atgcacaaatatccctctataatagttaatatcaaccttcgagaagccaaactgaaaaagaaggtacgtgagcatttacaatccttgggttttacaagatctgattctggagcgctccaggccccgggaaataccaaagatgtaatacgggctcttcatagttctcaacgagctgagcggatatttgcaaaccaaaagttcataacgctaagagcggcaaagcttattaaatttttcgcatccggcaatgaggtcattccggataagatttcaccggtacttgaacgtgtaaagtcaggaacctggcaaggagatctctttaggttagcagcattaacttggtccgtacctgtttcaagcggatttggaaggcgtctccggtatcttgtatgggatgaaagcaacggaaaattgatagggctgatcgcaattggtgaccctgtgttcaaccttgcagtccgagataatttgattgggtgggatactcatgccagaagttcccggcttgttaatttgatggatgcatacgtcctcggtgctcttcccccttataatgccctgctgggaggaaaattaattgcatgtctgcttcgtagccgcgatctttatgatgactttgcaaaggtctatggtgataccgttggagtaatatctcaaaaaaagaaacaagcacgtcttttggctattacaacaacatcgtctatggggcgctcatcggtatataaccgtttaaagctggatggaattcaatatttaaaatcgattggatatacaggcggttgggggcattttcatatacctgatagcttgttcattgaattacgtgattacttacgtgatatggatcacgcttatgcagatcattatatgtttggtaatgggcctaactggcgtttacgtacaactaaggcagctttaaatgcactaggatttagagataatttgatgaagcatggaattcaacgtgaagtgtttatcagtcagctagcagaaaatgcaactagtattctgcaaacaggcaaaggtgaaccagatctaacctctttgctttctgctaaagagatagctgagtgtgcgatggcacgatggatggttccacgatcaattcgcaatccagaatatcggctttggaaagcaagagatctatttgattttattagtaatgactcgctaaactttcccccgtttgacgagatagcgaaaacagttgtctaa

SEQ ID NO: 27269 - DNA, 1647 bp, Escherichia coli
gtgaattacgctattgataagttcaccgggacactgatattagcagctcgagcaacgaaatatgctcaatatgtttgcccagtttgtaaaaaaggtgttaacctccgtaaagggaaggttatacccccatattttgctcatttgcccggacatggtacgtcagactgtgaaaattttgttcccggaaattctatcattgtcgaaactattaaaactatttcaaagcgatatatggatttgcgcttattgattcctgtcggaagtaatagtcgagagtggtcattagaattagtgttgccaacctgtaatttatgtagagcaaagataacgttagatgtaggaggcagaagccaaacgcttgatatgaggagtatggtaaagagtcgccagattggtgctgaattatcagtaaaatcttaccgtattgtttcatatagtggtgaaccagatccaaaatttgtaacagaagttgaaagagaatgcccaggtttaccttctgagggagcagcagttttcactgctttagggcgtggggcatcgaagggatttccacgagcacaagagttaagatgtactgaaacatttgcctttctttggcgacaccctgttgctccagattttcctgatgaattagaaataaaaagtttagctagtaaacagggatggaatttagctcttgttacaattcctgaagtcccttctgtggagagtatttcatggctaaaatcttttacataccttcctgttgttcctgccagaacatctattacagcaatttggccgttcctaaatcaaaaaacaagtattaatcatgtcgaatgtgtttattctgacacaatattgttgtcaacaaatatggcaccaacatcatcagaaaatgttggaccaactatgtacgcacaaggttcctctttattactttcagcggttggtgttgaaacatcacctgctttcttcattctaaatcctggagaaaatgactttgtgggcgtttctggctcaattgagcaggacgtaaacttatttttttctttctataaaaaaaacgtttctgtacccagaaaatatccctcaatagatttggtttttactaagaggaataaagaaaagaccatcgtttccttacatcaaagaagatgcattgaagttatgatggaagcacgaatgtttggccataaattagaatacatgtctatgccttctggtgttgaaggagtggcaagaattcaaagacaaactgaaagtaatgttattaagttagtttctaatgatgacattgcagctcatgataagagcatgcggttactatctcctgttgcgttatctcaattatctgattgcttagcaaacttaacatgtcatgtagaaatagattttttaggtcttggtaaaatatttttacctggttcttctatgctatcattagatgacgggaaatttattgaattatctcctaatcttcgctcacggatattaagttttatacttcaaatggggcacaccctccatggttttagtttaaataatgattttttattagttgagaaattagtggatttgcagccggaaccacacttattaccgcattatagagcattggtaaaagaagttaagaccaatggatttgaatgtaaccgctttagataa

SEQ ID NO: 27270 - DNA, 1884 bp, Escherichia coli
atgagttaccaatatagccaagaggcaaaggaacggatctctaagttgggacaatccgaaattgttaactttatcaatgagatttctccaactttacgacgtaaagcttttggttgtttaccaaaagtaccgggattcagggcaggacatcccactgaaattaaagaaaaacagaaaagattgattgggtatatgttccagtcacatccttcctctgaggagagaaaagcatggaaaagtttttctcttttttggcagttttgggctgaagagaaaattgacaaatcatttagtatgattgataatttaggattaaaagaaaactctggctctatttttattagagagcttgctaaaaactttcctaaagttgctagagagaatatcgagcgcctgtttatctttagtgggtttgctgatgatccagacgttataaatgcatttaacctttttcctcctgcagttgttcttgcccgcgatatcgtgattgatactcttccaattcgtttagatgagcttgaagcacgtattagtttaattgccgataatgttgagaaaaaaaataatcatattaaagaacttgagttaaaaatagatgctttttccgaacagtttgataattactttaataatgaaaagagcagtttaaaaataattaatgaactacaatctttgataaactcagagactaaacaatctgatattgctaataaagctattgacgagctttatcattttaatgaaaaaaacaaacagctaatattatctcttcaagaaaaattagattttaatgctctggctatgaatgatatttctgagcatgaaaaattgataaaaagtatggctaatgacatttcagaatttaaaaatgcattaacgatcttgtgtgataataaaataaagaataacgagttagattatgtcaatgaattaaaaaaactcactgaacgaatagatacacttgaaataaacacatctcaagctagcgaagtgagtgtcaccaatagatttacaaaattccatgaaatagcgcactatgaaaattatgagtatctttcatcctccgaagacatatctaatagaatttctttaaatttacaggctgttggattgacaaaaaattcagcagaaaaattggctagattgacattagctaccttcgtttctggacaaatcattcaattcagtggctctttggcagatattatcgcggatgcaattgccattgctattggtgcaccacgttatcacatatggagagttccagttggtattatttctgacatggatgcttttgattttatagagactatagctgaatcatctcgctgtctccttttgaaaggggccaatctttcagcatttgagatttatggagcggcaattagagatatagttgttcaacggcaaatacatccaacaaattatgaccatctggcattgatagctacctggaaacaaggcccagctacattccctgatggaggaatgttggccgagttgggacctgttattgatactgatacattaaaaatgcgtggtttatcagctactttaccccaattgaaaccaggttgtcttgccaaggataaatggacaaatattgatggactacatcttgatagtgttgatgattatgtagatgaattaagagcattactggacgaagctggatttgatgggggaactttgtggaagagaatgattcatattttctatacttcactcataaggatccctaatggaaattatatttatgatctttattctgtcttgtctttttatactcttacatgggcaaaaattaaaggtggccccgtccaaaagatagaagatattgccaatcgtgaattaaaaaattatagtgcaaaaatatcttcttga

SEQ ID NO: 27271 - DNA, 1044 bp, Escherichia coli
atggagtggagagcagtatcacgagacaaagcactggatatgttatcaactgcattaaattgtcgatttgatgatgaagggttgagaatttcagcagtttcagaatgcttaaggagcgtattatatcaatattctatatctgaaacagaagaagctaggcaaactgtaacctcgcttcgactcactagtgcagtaaggcgaaaattggtacctttatggccagacattgctgatattgataatgctatacatccgggcattatgtctatattgaacagcttggctgaattgggtgacatgattaagttagaaggtggtaattggctaacagctcccccacatgcagtacgaattgacaataagatggctgttttttttggtggagagccttcctgtacattttcaacgggcgtggtagctaaatctgctggaagagttcgcttggttgaagaaaaagtgtgtactggaagtgttgaaatctgggatgcaaatgagtggattggtgccccagcagaaggcaatgaagaatggtcatccagactactatctggaactatttccggctttatcgatgcacctggcaatatgagtgaaacgactgcatatgtgcggggaaaatggctccatttgtcagaactttcttttaataaaaagcaaatctacttatgcagaatgtccgttgataatcacttttcctattatttaggagaaattgaagctggacgcttatgtagaatgaattcgttagaatcgtctgatgatgtcagaagattacgtttttttctcgatacaaaagataattgtccgctaaaggtccgtatcaaaatatctaatgggctagcaagattaagattaaccagaagattaccaagacgagaaacgaaggtactcctgctaggctggagagaatcaggttttgaaaatgaacattcaggaataacacaccatgtattccccgaggaaatattacccatagtgcgtagcgcttttgaagggcttggtattatttggattaacgaattcacgcgacggaatgaaatatga

SEQ ID NO: 27272 - DNA, 5511 bp, Escherichia coli
atgattaataaaaataaagtaactgaacgttcaggtatacatgataccgtgaaaagccttagtgaaaatctgagaaaatacattgaggcacaatatcatatccgggatgaagggttaattgctgagcgacgagcgcttttacagcaaaatgaaactattgctcaagctccttatatagaagcaaccccaatttatgaacctggtgcgccatacagtgaattgcctattcccgaagcagcaagtaatgtgctaactcaactatcagaacttggaattggcctctatcaacgcccctataaacaccaatcacaggcacttgagtcatttcttggcgaaaacgcttctgatctggtcattgcaacaggtacaggctccggtaagactgaaagctttctaatgccaattattggaaaattggcgattgaatcttccgagagacctaaatctgcatcccttccaggttgtagagcaattttattatatccaatgaatgcattagttaacgatcaacttgctcgtatcagacgtctttttggtgattctgaagcctctaaaatactgagatctggaagatgtgcccctgtacgctttggcgcttatacgggaagaacgccttaccctggtcgtcgtagctctagacgagacgagctttttatcaaaccccttttcgatgagttttacaataaactcgcaaataacgcccccgtacgtgcggaactgaaccgcattggtcgctggccaagtaaagatcttgatgctttttatgggcaaagcgcatctcaggctaaaacctacgtctcaggcaaaaaaacgggtaagcaatttgttttgaacaattggggggagaggctaattacccagcctgaggatcgtgagctaatgacccggcatgaaatacagaatcgctgtccagaattactgataacgaactactccatgcttgagtatatgctgatgcgacctatcgagcgtaatatttttgagcagactaaggaatggctcaaagctgatgagatgaatgagcttatcttagtgcttgatgaagcgcatatgtatagaggagcagggggagcagaggtagcccttttaatacgtcgcctctgtgctcggttggatattccccgggaacgtatgcgctgcatccttaccagtgctagtctagggtccattgaggatggagaacgttttgcccaagacttaactggcttatcaccaacctcttcgaggaaatttcgaattattgagggtacaagggaatcgcgtcctgagtcacaaattgttaccagtaaagaagctaatgcactggctgaattcgacctaaattcatttcagtgcgtagctgaggatcttgaatctgcatatgcagcaatagagtctcttgccgaacgaatgggctggcaaaagccgatgataaaagatcatagtacactacgtaattggttatttgataatttgactggttttggtcctattgaaacgcttattgaaatagtttcaggtaaagcggttaagctaaatatcttgagtgaaaacctttttccagactctccacagcaaatcgcagagcgagcaacagatgcattactcgcattgggttgctatgctcagagggcatccgatggcagagtgcttattccaactcgcatgcatcttttttatcggggattaccaggtctttatgcctgtatagatcccgattgtaatcaacgtttgggtaaccatagcgggccaactatacttggccgcctttatacgaaaccactggatcaatgtaaatgcgcttcaaaagggcgagtctacgaattatttacccaccgtgactgcggtgcggcttttattcgtggatacgttagttccgaaatggactttgtatggcaccagccgaacggaccattatcagaagatgaggatatcgatcttgttcccatagatatattggtcgaggaaacacctcatgtacatagtgattaccaggacagatggctacatatagcaacaggacgcctttctaaacagtgtcaagatgaggattctggttatcgtaaagtctttatacctgaccgagttaagtctggatcagaaattacatttgatgaatgccctgtttgtatgcgtaagacaagaagtgctcagaatgaaccgtctaaaattatggatcatgttacaaaaggggaagcaccttttacaacgttagtacgtacacagatatctcaccagccagcgagtcgtcctattgatggtaaacatcccaatgggggaaaaaaagtacttattttttctgatggccgacaaaaagcagctcggcttgcacgtgatattcctagagatattgagcttgatttgtttcggcaatccattgctctcgcctgttctaaactgaaagatatcaatcgggaacccaaaccaacatcagtactttaccttgctttcctatcagtcctttctgaacatgacttgcttatttttgatggggaagattcacgaaaagttgtaatggcccgtgatgaattttatcgtgattataatagcgatctggctcaagcttttgatgatagcttcagcccccaagagtcaccgtcacgatataaaatagcgttgcttaaacttttatgtagcaattactattctctttccggaacaacagttggttttgttgaaccatcgcagcttaaatcaaaaaaaatgtgggaagatgtgcagtccaagaaactcaatattgagagcaaggatgttcatgctttagctgttgcttggattgataccttactcactgaatttgcttttgatgaatctattgattcgacactacgaatcaaagcagctggattctacaaacccacttggggtagtcaaggacggtttggaaaagctcttaggaaaaccctgatacagtatcctgctatgggggagctttatgtggaagttttggaggagatttttcgtactcatctgacattaggaaaagatggtgtctactttcttgctccaaatgcactacgtctgaaaatagatctcttgcatgtctggaaacaatgtaatgactgcacagcactaatgccatttgctttagaacattctacttgccttgcttgtggtagtaacagtgtcaaaacagtcgagccgtcggaaagcagctatattaatgcacgaaaaggattctggcgttcgccggtagaagaagttttggtttcaaattcgcggcttctaaaccttagcgttgaagagcatactgctcaactctcacatagagatagggccagcgttcatgccactacagaactctacgaactgagattccaagatgttcttattaatgataacgacaagcccattgatgtacttagttgtacgacgacgatggaagtgggggttgatattggatctctggttgctgttgctttaagaaacgtccctccgcaacgagaaaattatcagcaacgtgctgggcgagcaggccgccgtggcgcatctgtttcaacggtggttacatattctcaaaatggccctcatgatagttattatttccttaatcctgaacgcattgttgcaggttctcctcgtacacctgaagtgaaagtaaataatcccaaaatagccagaagacacgttcattcttttttagttcagaccttttttcacgagttaatggaacaaggaatttataatcccgcagagaaaactgccatacttgagaaagcacttggtactacacgagatttttttcatggagcaaaagatactggcctaaatctcgatagctttaataattgggttaaaaaccgtattctatctactaatggtgatttgagaacaagtgttgcagcatggcttcctcctgttcttgaaactggagggctttctgccagtgactggtttgctaaggtagcagaggaatttttaaatacactccatgggctggctgaaattgttccacaaactgccgttcttgttgatgaggaaaatgaagatgatgagcagacttctggtggaatgaaatttgcacaagaagaattacttgagttcctgttttaccatggtttattaccaagttatgcatttcctacaagcctctgtagtttcttggtagaaaaaattgtaaagaatattagaggttcttttgaggtgcgaacagtacaacagcctcagcaatcaatttctcaggctctgagtgaatatgccccgggacgtttgattgttattgataggaaaacctatcgctctggtggtgttttttctaatgcattgaaaggcgaactaaaccgggcaagaaagcttttcaataatcccaaaaagtttattcattgcgataagtgctcttttgtccgcgatcctcataataatcagaatagcgaaaatacttgtccgatctgtggtggcattctaaaagtagaaataatgattcagcccgaagtctttggacctgaaaatgccaaggaacttaatgaggacgacagagagcaagaaatcacctatgtaacagcggcacaatatccacaacctgttgatcctgaagattttaagttcaataatggaggtgctcatattgtttttactcacgcaatagatcagaaactggtgacggtgaaccgagggaaaaatgagggggagtccagtggtttttcagtatgttgcgaatgtggtgcggcctccgtttatgattcctactcaccggcaaagggggcacatgaaagaccgtataaatatatagcaactaaggaaacgcctcgcttatgctctggcgagtataaacgcgtttttctcggacatgatttccgtactgatttgcttttattacgaataaccgttgggtctccgcttgtaactgatacttcaaatgctatcgttttacggatgtatgaagatgcattatatacaatagcggaagcactaaggcttgcagctagtcgccataaacaactggatcttgatcctgctgagtttggctctggtttcagaattttacccactatagaggaagatactcaggcattggatctcttcctttatgatactttatccggcggtgcgggttatgcggaagtagcagcagcgaatctagatgacattcttactgcaacactcgcattgttagaaagctgtgagtgcgatacctcctgtacagattgtctcaatcatttccacaaccagcatatacaaagccgtctcgataggaaactaggtgcatctttacttcgttatgcactatacggaatggttcctcgttgtgcttcacctgatattcaggtagaaaaattgtctcaattgagggcaagtctggaattggatggttttcaatgcataattaagggaactcaggaggcacctatgattgtgagtttgaatgaccgttctattgcagtgggaagttatcctggtcttattgatcgacccgactttcaacacgacgtatataagtcaaagcatactaatgctcatatagcctttaatgaatatcttcttcgttcaaatctgccacaatcgcatcaaaatattagaaaaatgttgcgctga

SEQ ID NO: 27273 - DNA, 1215 bp, Escherichia coli
atgcacaaagatccctctataatagttaatatcaaccttcgagaagccaaactgaaaaagaaggtacgtgagcatttacaatccttgggttttacaagatctgattctggagcgctccaggccccgggaaataccaaagatgtaatacgggctcttcatagttctcaacgagctgagcggatatttgcaaaccaaaagttcataacgctaagagcggcaaagcttattaaatttttcgcatccggcaatgaggtcattccggataaaatttcaccggtacttgaacgtgtaaagtcaggaacctggcaaggagatctctttaggttagcagcattaacttggtccgtacctgtttcaagcggatttggaaggcgtctccggtatcttgtatgggatgaaagcaacggaaaattgatagggctgatcgcaattggtgaccctgtgttcaaccttgcagtccgagataatttgattgggtgggatactcatgccagaagttcccggcttgttaatttgatggatgcatacgtcctcggtgctcttcccccttataatgccctgctgggaggaaaattaatcgcatgtctgcttcgtagccgcgatctttatgatgactttgcaaaggtctatggtgataccgttggagtaatatctcaaaaaaagaaacaagcacgtcttttggctattacaacaacatcgtctatggggcgctcatcggtatataaccgtttaaagctggatggaattcaatatttaaagtcgattggatatacaggcggttgggggcattttcatatacctgatagcttgttcattgaattacgtgattacttacgtgatatggatcacgcttatgcagatcattatatgtttggtaatgggcctaactggcgtttacgtacaactaaggcagctttaaatgtactaggatttagagataatttgatgaagcatggaattcaacgtgaagtttttatcagtcagctagcagaaaatgcaactagtattctgcaaacaggcaaaggtgaaccagatctaacctctttgctttctgctaaagagatagctgagtgtgcgatggcacgatggatggttccacgatcaattcgcaatccagaatatcggctttggaaagcaagagatctatttgattttattagtaatgactcgctaaaatttcccccgtctgacgagatagcgaaaacagttgtctaa

SEQ ID NO: 27274 - DNA, 1647 bp, Escherichia coli
gtgaattacgctattgataagttcaccgggacactgatattagcagctcgagcaacgaaatatgctcaatatgtttgcccagtttgtaaaaaaggtgttaacctccgtaaagggaaggttatacccccatattttgctcatttgcccggacatggtacgtcagactgtgaaaattttgttcccggaaattccatcattatcgaaactattaaaactatttcaaagcgatatatggatttgcgcttattgattcctgtcggaagtaatagtcgagagtggtcattagaattagtgttgccaacctgtaatttatgtagagcaaagataacgttagatgtaggaggcagaagccaaacgcttgatatgaggagtatggtaaagagtcgccagattggtgctgaattatcagtaaaatcttaccgtattgtttcatatagtggtgaacccgatccaaaatttgtaacagaagttgaaagagaatgccccggtttaccttctgagggagcagcagttttcactgctttagggcgtggggcatcgaagggatttccacgagcacaagagttaagatgtactgaaacatttgcctttctttggcgacaccctgttgctccagattttcctgatgaattagaaataaaaagtttagctagtaaacagggatggaatttagctcttgttacaattcctgaagtcccttctgtggagagtatttcatggctaaaatcttttacataccttcctgttgttcctgccagaacatctattacagcaatttggccgttcctaaatcaaaaaacaagtattaatcatgtcgaatgtgttcattctgacacaatattgttgtcagcaaatatggcaccaacatcatcagaaaatgttggaccaactatgtacgcacaaggttcctctttattactttcagcggttggtgttgaaaaatcacctgctttcttcattcttaatcctggagaaaatgactttgtgggcgtttctggctcaattgagcaggacgtaaacttatttttttctttctataaaaaaaacgtttctgtacccagaaaatatccctcaatagatttggtttttactaagaggaataaagaaaagaccatcgtttccttacatcaaagaagatgcattgaagttatgatggaagcacgaatgtttggccataaattagaatacatgtctatgccttctggtgttgaaggagtggcaagaattcaaagacaaactgaaagtagtgttattaagttagtttctaatgatgacattgcagctcatgataagagcatgcggttactatctcctgttgcgttatctcaattatctgattgcttagcaaacttaacatgtcatgtagaaatagattttttaggtcttggtaaaatatttttacctagttcttctatgttatcattagatgacggggaatttattgaattatctcctaatcttcgctcacggatattaagttttatacttcaaatggggcacaccctccatggttttagtttaaataatgattttttattagttgagaaattagtggatttgcagccggaaccacacttattaccgcattatagggcattggtaaaagaagttaagaccaatggatttgaatgtaaccgctttagataa

SEQ ID NO: 27275 - DNA, 1884 bp, Escherichia coli
atgagttaccaatatagccaagaggcaaaggaacggatctctaagttgggacaatccgaaattgttaactttatcaatgagatttctccaactttacgacgtaaagcttttggttgtttaccaaaagtaccgggattcagggcaggacatcccactgaaattaaagaaaaacagaaaagattgattgggtatatgttccagtcacatccttcctctgaggagagaaaagcatggaaaagtttttctcttttttggcagttttgggctgaagagaaaattgacaaatcatttagtatgattgataatttaggattaaaagaaaactctggctctatttttattagagagcttgctaaaaactttcctaaagttgctagagagaatatcgagcgcctgtttatctttagtgggtttgctgatgatccagacgttataaatgcatttaacctttttcctcctgcagttgttcttgcccgcgatatcgtggttgatactcttccaattcgtttagatgagcttgaagcacgtattagtttaattgccgataatgtggagaaaaaaaataaccatattaaagagcttgagttaaaaatagatgctttttccgaacggtttgataattactttaataatgaaaagagcaatttaaaaataattaacgaactacaatccttaataaactcagagactaaacaatctgatattgctaataaatctattgacgagctttatcattttaatgaaaaaaacaaacagctaatattatctcttcaagagaaattagattttaatgctctggctatgaatgacatttctgagcatgaaaaattgataaaaagtatggctaatgaaatttcagagttaaaaaatgcattaactatcttgtgtgataataaaagaaagaataacgagttagattatatcaatgaattaaaaaaactcactgaacgaatagatacacttgaaataaacacatctcaagctagcaaagtgagtgtcaccaatagatttacaaaattccatgaaatagcgcactatgaaaattatgaatatctttcatcctccgaagacatatctaatagaatttctttaaatttacaggctgttgggttaacaaaaaattcagcagaaacattggctagattgacattagctaccttcgtttctggacaaatcattcaattcagtggctctttggcagatattatcgcggatgcaattgccattgctattggtgcaccacgttatcacatatggagagttccagttggtattatttctgacatggattcttttgattttatagagactatagctgaatcatctcgctgtctccttttgaaaggggccaatctttcagcatttgagatttatggagcggcaattagagatatagttgttcaacggcaaatacatccaacaaattatgaccatctggcattgatagctacttggaaacaaggccctgctacattccctgatggaggaatgttggccgagttgggaccagttattgatactgatacattaaaaatgcgtggtttatctgctattttaccccaattgaaaccaggttgtcttgccaaggataaatggacaaatattgatggactacagcttgatagtgttgatgattatgtagatgaattaagagcattactggacgaagctggatttgatgggggaactttgtggaagagaatggttcatattttctatacttcactcataagagtccctaatggaaattatatttatgatctttattctgtcttgtctttttatactcttacatgggcaaaaattaaaggtggccccgtccaaaagatagaagatattgccaatcgtgaattaaaaaattatagtgcaaaaatatcttcttga

SEQ ID NO: 27276 - DNA, 1044 bp, Escherichia coli
atggagtggagagcagtatcacgagacaaagcactggatatgttatcaactgcattaaattgtcgatttgatgatgaagggttgagaatttcagcagtttcagaatgcttaaggagcgtattatatcaatattctatatctgaaacagaagaagctaggcaaactgtaacctcgcttcgactcactagtgcagtaaggcgaaaattggtacctttatggccagacattgctgatattgataatgctatacatccgggcattatgtctatattgaacagcttggctgaattgggtgacatgattaagttagaaggtggtaattggctcacagctcccccacatgcagtacgaattgacaataagatggctgttttttttggtggagagccttcctgtacattttcaacgggcgtggtagctaaatctgctggaagagttcgcttggttgaagaaaaagtgtgtactggaagtgttgaaatctgggatgcaaatgagtggattggtgccccagcagaaggcaatgaagaatggtcatccagactactatctggaactatttccggctttatcgatgcgcctagcaatatgagtgaaacgactgcatatgtgcggggaaaatggctccatttgtcagaactttcttttaataaaaagcaaatctacttatgcagaatgtccgttgataatcacttttcctattatttaggagaaattgaagctggacgcttatgtagaatgaattcgttagaatcgtctgatgatgtcagaagattacgtttttttctcgatacaaaagataattgtccgctaaagatccgtatcaaaatatctaatgggctagcaagattaagattaaccagaagattaccaagacgagaaacgaaggtactcctgctaggctggagagaatcaggttttgaaaatgaacattcaggaataacacaccatgtattccccgaggaaatattacccatagtgcgtagcgcttttgaagggcttggtattatttggattaacgaattcacgcgacggaatgaaatatga

SEQ ID NO: 27277 - DNA, 5511 bp, Escherichia coli
atgattaataaaaataaagtaactgaacgttcaggtatacatgataccgtgaaaagccttagtgagaatctgagaaaatacattgaggcacaatatcatatccgggatgaagggttaattgctgagcgacgagcgcttttacagcaaaatgaaactattgctcaagctccttatatagaagcaaccccaatttatgaacctggtgcgccatacagtgaattacctattcccgaagcagcaagtaatgtgctaactcaactatcagaacttggaattggcctctatcaacgcccctataaacaccaatcacaggcacttgagtcatttcttggcgaagacgcttctgatctggtcattgcaacaggtacaggctccggtaagactgaaagctttctaatgccaattattggtaaattggcgattgaatcttccgagagacctaaatctgcatcccttccaggttgtagagcaattttattatatccaatgaatgcattagttaacgatcaacttgctcgtatcagacgtctttttggtgattctgaagcctctaaaatactgagatctggaagatgtgcccctgtacgctttggcgcttatacgggaagaacgccttaccctggtcgtcgtagctctagacgagacgagctttttatcaaaccccttttcgatgagttttacaataaactcgcaaataacgcccctgtacgtgcggaactgaaccgcattggtcgctggccaagtaaagatcttgatgctttttatgggcaaagcgcatctcaggctaaaacctacgtctcaggcaaaaaaacgggtaagcaatttgttttgaacaattggggggagaggctaattacccagcctgaggatcgtgagctaatgacccggcatgaaatgcagaatcgctgtccagaattactgataacgaactactccatgcttgagtatatgctgatgcgacctatcgagcgtaatatttttgagcagactaaggaatggctcaaagctgatgagatgaatgagcttatcttagtgcttgatgaagcgcatatgtatagaggagcagggggagcagaggtagcccttttaatacgtcgcctctgtgctcggttggatattccccgggaacgtatgcgctgcatccttaccagtgctagtctagggtccattgaggatggagaacgttttgcccaagacttaactggcttatcaccaacctcttcgaggaaatttcgaattattgagggtacaagggaatcgcgtcctgagtcacaaattgttaccagtaaagaagctaatgcactggctgaattcgacctaaattcatttcagtgcgtagctgaggatcttgaatctgcatatgcagcaatagagtctcttgccgaacgaatgggctggcaaaagccgatgataaaagatcatagtacactacgtaattggttatttgataatttgactggttttggtcctattgaaacgcttattgaaatagtttcaggtaaagcggttaagctaaatatcttgagtgaaaacctttttccagactctccacagcaaattgcagagcgagcgacagatgcattactcgcattgggttgctatgctcagagggcatccgatggcagagtgcttattccaactcgcatgcatcttttttatcggggattaccaggtctttatgcctgtatagatcccgattgtaatcaacgtttgggtaaccatagtgggccaactatacttggccgcctttatacgaaaccactggatcaatgtaaatgcgcttcaaaagggcgagtctacgaattatttacccaccgtgactgcggtgcggcttttattcgtggatacgttagttccgaaatggactttgtatggcaccagccgaacggaccattatcagaagatgaggatatcgatcttgttcccatagatatattggtcgaggaaacacctcatgtacatagtgattaccaggacagatggctacatatagcaacaggacgcctttctaaacagtgtcaagatgaggattctggttatcgtaaagtctttatacctgaccgagttaagtctggatctgaaattacatttgatgaatgccctgtttgtatgcgtaagacaagaagtgctcagaatgaaccgtctaaaattatggatcatgttacaaaaggggaagcaccttttacaacgttagtacgtacacagatatctcaccagccagcgagtcgtcctattgatggtaaacatcccaatgggggaaaaaaagtacttattttttctgatggccgacaaaaagcagctcggcttgcacgtgatattcctagagatattgagcttgatttgtttcggcaatccattgctctcgcctgttctaaactgaaagatatcaatcgggaacccaaaccaacatcagtactttaccttgctttcctatcagtcctttctgaacatgacttgcttatttttgatggggaagattcacgaaaagttgtaatggcccgtgatgaattttatcgtgattataatagcgatctggctcaagcttttgatgataacttcagtccccaagagtcaccgtcacgatataaaatagcgttgcttaaacttttatgtagcaattactattctctttccggaacaacagttggttttgttgaaccatcgcagcttaaatcaaaaaaaatgtgggaagatgtgcagtccaagaagctcaatattgagagcaaggatgttcatgctttagctgttgcttggattgataccttactcactgaatttgcttttgatgaatctattgattcgacactacgaatcaaagccgctggattctacaaacccacttggggtagtcaaggacggtttggaaaagctcttaggaaaaccctgatacagcatcctgctatgggggagctttatgtggaagttttggaggagatttttcgtactcatctgacattaggaaaagatggtgtctactttcttgctccaaatgcactacgtctgaaaatagatctcttgcatgtctggaaacaatgtaatgactgcacggcactaatgccatttgctttagaacattctacttgccttgcttgtggtagtaacagtgtcaaaacagtcgagccgtcggaaagcagctatattaatgcacgaaaaggattctggcgttcgccggtagaagaagttttggtttcaaattcgcggcttctaaaccttagcgttgaagagcatactgctcaactctcacatagagatagggccagcgttcatgccactacagaactctacgaactgagattccaagatgttcttattaatgataacgacaagcccattgatgtacttagttgtacgacgacgatggaagtgggggttgatattggatctctggttgctgttgctttaagaaacgtccctccgcaacgagaaaattatcagcaacgtgctgggcgagcaggccgccgtggcgcatctgtttcaacggtggttacatattctcaaaatggccctcatgatagttattatttccttaatcctgaacgcattgttgcaggttctcctcgtacacctgaagtgaaagtaaataatcccaaaatagccagaagacacgttcattcttttttagttcagaccttttttcacgagttaatggaacaaggaatttataatcccacagagaaaactgccatacttgagaaagcacttggtactacacgagatttttttcatggagcaaaagatactggcctaaatctcgatagctttaataattgggttaaaaaccgtattctatctactaatggtgatttgagaacaagtgttgcagcatggcttcctcctgttcttgaaactggagggctttctgccagtgactggtttgctaaggtagcagaggaatttttaaatacactccatgggctggctgaaattgttccacaaattgccgctcttgttgatgaggaaaatgaagatgatgagcagacttctggtggaatgaaatttgcacaagaagaattacttgagttcctgttttaccatggtttattaccaagttatgcatttcctacaagcctctgtagtttcttggtagaaaaaattgtaaagaatattagaggttcttttgaggtgcgaacagtacaacagcctcagcaatcaatttctcaggctctgagtgaatatgccccgggacgtttgattgttattgataggaaaacctatcgctctggtggtgttttttctaatgcattgaaaggcgaactaaaccgggcaagaaagcttttcaataatcccaaaaagtttattcattgcgataagtgctcttttgtccgcgatcctcataataatcagaatagcgaaaatacttgtccgatctgtggtggcattctaaaagtagaaataatgattcagcccgaagtctttggacctgaaaatgccaaggaacttaatgaggacgacagagagcaagaaatcacctatgtaactgcggcacaatatccacaacctgttgatcctgaagattttaagttcaataatggaggtgctcatattgtttttactcacgcaatagatcagaaactggtgacggtgaaccgagggaaaaatgagggggggtccagtggtttttcagtatgttgcgaatgtggtgcggcctccgtttatgattcctactcaccggcaaagggggcacatgaaagaccgtataaatatatagcaactaaggaaacgcctcgcttatgctctggcgagtataaacgcgtttttctcggacatgatttccgtactgatttgcttttattacgaataaccgttgggtctccgcttgtaactgatacttcaaatgctatcgttttacggatgtatgaagatgcattatatacaatagcggaagcactaaggcttgcagctagtcgccataaacaactggatcttgatcctgctgagtttggctctggtttcagaattttacccactatagaggaagatactcaggcattggatctcttcctttatgatactttatctggcggtgcgggttatgcggaagtagcagcagcgaatctagatgacattcttactgcaacactcgcattgttagaaggttgtgagtgcgatacctcctgtacagattgtctcaatcatttccacaaccagcatatacaaagccgtctcgataggaaactaggtgcatctttacttcgttatgctctatacggaatggttcctcgttgtgcttcacctgatattcaggtagaagaattgtctcaattgagggcaagtctggaattggatggttttcaatgcctaattaagggaactcaggaggcacctatgattgtgagtttgaatgaccgttctgttgcagtgggaagttaccctggtcttattgatcgacccgactttcaacacgacgtatataagtcaaagaatactaatgctcatatagcctttaatgaatatcttcttcgttcaaatctgccacaagcgcatcaaaatattagaaaattgttgcgctga

SEQ ID NO: 27278 - DNA, 1198 bp, Escherichia coli
gactaaacaatctgatattgctaataaatctattgacgagctttatcattttaatgaaaaaaacaaacagctaatattatctcttcaagagaaattagattttaatgctctggctatgaatgacatttctgagcatgaaaaattgataaaaagtatggctaatgaaatttcagagttaaaaaatgcattaactatcttgtgtgataataaaagaaagaataacgagttagattatatcaatgaattaaaaaaactcactgaacgaatagatacacttgaaataaacacatctcaagctagcaaagtgagtgtcaccaatagatttacaaaattccatgaaatagcgcactatgaaaattatgaatatctttcatcctccgaagacatatctaatagaatttctttaaatttacaggctgttgggttaacaaaaaattcagcagaaacattggctagattgacattagctaccttcgtttctggacaaatcattcaattcagtggctctttggcagatattatcgcggatgcaattgccattgctattggtgcaccacgttatcacatatggagagttccagttggtattatttctgacatggattcttttgattttatagagactatagctgaatcatctcgctgtctccttttgaaaggggccaatctttcagcatttgagatttatggagcggcaattagagatatagttgttcaacggcaaatacatccaacaaattatgaccatctggcattgatagctacttggaaacaaggccctgctacattccctgatggaggaatgttggccgagttgggaccagttattgatactgatacattaaaaatgcgtggtttatctgctattttaccccaattgaaaccaggttgtcttgccaaggataaatggacaaatattgatggactacagcttgatagtgttgatgattatgtagatgaattaagagcattactggacgaagctggatttgatgggggaactttgtggaagagaatggttcatattttctatacttcactcataagagtccctaatggaaattatatttatgatctttattctgtcttgtctttttatactcttacatgggcaaaaattaaaggtggccccgtccaaaagatagaagatattgccaatcgtgaattaaaaaattatagtgcaaaaatatcttcttga

SEQ ID NO: 27279 - DNA, 1044 bp, Escherichia coli; identical to SEQ ID NO: 27276

SEQ ID NO: 27280 - DNA, 5511 bp, Escherichia coli; identical to SEQ ID NO: 27277

SEQ ID NO: 27281 - DNA, 1215 bp, Escherichia coli
atgcacaaagatccctctataatagttaatatcaaccttcgagaagccaaactgaaaaagaaggtacgtgagcatttacaatccttgggttttacaagatctgattctggagcgctccaggccccgggaaataccaaagatgtaatacgggctcttcatagttctcaacgagctgagcggatatttgcaaaccaaaagttcataacgctaagagcggcaaagcttattaaatttttcgcatccggcaatgaggtcattccggataagatttcaccggtacttgaacgtgtaaagtcaggaacctggcaaggagatctctttaggttagcagcattaacttggtccgtacctgtttcaagcggatttggaaggcgtctccggtatcttgtatgggatgaaagcaacggaaaattgatagggctgatcgcaattggtgaccctgtgttcaaccttgcagtccgagataatttgattgggtgggatactcatgccagaagttcccggcttgttaatttgatggatgcatacgtcctcggtgctcttcccccttataatgccctgctgggaggaaaattaattgcatgtctgcttcgtagccgcgatctttatgatgactttgcaaaggtctatggtgataccgttggagtaatatctcaaaaaaagaaacaagcacgtcttttggctattacaacaacatcgtctatggggcgctcatcggtatataaccgtttaaagctggatggaattcaatatttaaaatcgattggatatacaggcggttgggggcattttcatatacctgatagcttgttcattgaattacgtgattacttacgtgatatggatcacgcttatgcagatcattatatgtttggtaatgggcctaactggcgtttacgtacaactaaggcagctttaaatgtactaggatttagagataatttgatgaagcatggaattcaacgtgaagtttttatcagtcagctagcagaaaatgcaactagtattctgcaaacaggcaaaggtgaaccagatctaacctctttgctttctgctaaagagatagctgagtgtgcgatggcacgatggatggttccacgatcaattcgcaatccagaatatcggctttggaaagcaagagatctatttgattttattagtaatgactcgctaaaatttcccccgtctgacgagatagcgaaaacagttgtctaa

SEQ ID NO: 27282 - DNA, 1647 bp, Escherichia coli
gtgaattacgctattgataagttcaccgggacactgatattagcagctcgagcaacgaaatatgctcaatatgtttgcccagtttgtaaaaaaggtgttaacctccgtaaagggaaggttatacccccatattttgctcatttgcccggacatggtacgtcagactgtgaaaattttgttcccggaaattccatcattatcgaaactattaaaactatttcaaagcgatatatggatttgcgcttattgattcctgtcggaagtaatagtcgagagtggtcattagaattagtgttgccaacctgtaatttatgtagagcaaagataacgttagatgtaggaggcagaagccaaacgcttgatatgaggagtatggtaaagagtcgccagattggtgctgaattatcagtaaaatcttaccgtattgtttcatatagtggtgaacccgatccaaaatttgtaacagaagttgaaagagaatgccccggtttaccttctgagggagcagcagttttcactgctttagggcgtggggcatcgaagggatttccacgagcacaagagttaagatgtactgaaacatttgcctttctttggcgacaccctgttgctccagattttcctgatgaattagaaataaaaagtttagctagtaaacagggatggaatttagctcttgttacaattcctgaagtcccttctgtggagagtatttcatggctaaaatcttttacataccttcctgttgttcctgccagaacatctattacagcaatttggccgttcctaaatcaaaaaacaagtattaatcatgtcgaatgtgttcattctgacacaatattgttgtcagcaaatatggcaccaacatcatcagaaaatgttggaccaactatgtacgcacaaggttcctctttattactttcagcgattggtgttgaaaaatcacctgctttcttcattcttaatcctggagaaaatgactttgtgggcgtttctggctcaattgagcaggacgtaaacttatttttttctttctataaaaaaaacgtttctgtacccagaaaatatccctcaatagatttggtttttactaagaggaataaagaaaagaccatcgtttccttacatcaaagaagatgcattgaagttatgatggaagcacgaatgtttggccataaattagaatacatgtctatgccttctggtgttgaaggagtggcaagaattcaaagacaaactgaaagtagtgttattaagttagtttctaatgatgacattgcagctcatgataagagcatgcggttactatctcctgttgcgttatctcaattatctgattgcttagcaaacttaacatgtcatgtagaaatagattttttaggtcttggtaaaatatttttacctagttcttctatgttatcattagatgacggggaatttattgaattatctcctaatcttcgctcacggatattaagttttatacttcaaatggggcacaccctccatggttttagtttaaataatgattttttattagttgagaaattagtggatttgcagccggaaccacacttattaccgcattatagagcattggtaaaagaagttaagaccaatggatttgaatgtaaccgctttagataa

SEQ ID NO: 27283 - DNA, 1884 bp, Escherichia coli
atgagttaccaatatagccaagaggcaaaggaacggatctctaagttgggacaatccgaaattgttaactttatcaatgagatttctccaactttacgacgtaaagcttttggttgtttaccaaaagtaccgggattcagggcaggacatcccactgaaattaaagaaaaacagaaaagattgattgggtatatgttccagtcacatccttcctctgaggagagaaaagcatggaaaagtttttctcttttttggcagttttgggctgaagagaaaattgacaaatcatttagtatgattaataatttaggattaaaagaaaactctggctctatttttattagagagcttgctaaaaactttcctaaagttgctagagagaatatcgagcgcctgtttatctttagtgggtttgctaatgatccagacgttataaatgcatttaacctttttcctcctgcagttgttcttgcccgcgatatcgtggttgatactcttccaattcgtttagatgagcttgaagcacgtattagtttaattgccgataatgtggagaaaaaaaataaccatattaaagagcttgagttaaaaatagatgctttttccgaacggtttgataattactttaataatgaaaagagcaatttaaaaataattaacgaactacaatccttaataaactcagagactaaacaatctgatattgctaataaatctattgacgagctttatcattttaatgaaaaaaacaaacagctaatattatctcttcaagagaaattagattttaatgctctggctatgaatgacatttctgagcatgaaaaattgataaaaagtatggctaatgaaatttcagagttaaaaaatgcattaactatcttgtgtgataataaaagaaagaacaacgagttagattatatcaatgaattaaaaaaactcactgaacgaatagatacactggaaataaacacatctcaagctagcaaagtgagtgtcaccaatagatttacaaaattccatgaaatagcgcactatgaaaattatgaatatctttcatcctccgaagacatatctaatagaatttctttaaatttacaggctgttgggttaacaaaaaattcagcagaaacattggctagattgacattagctaccttcgtttctggacaaatcattcaattcagtggctctttggcagatattatcgcggatgcaattgccattgctattggtgcaccacgttatcacatatggagagttccagttggtattatttctgacatggattcttttgattttatagagactatagctgaatcatctcgctgtctccttttgaaaggggccaatctttcagcatttgagatttatggagcggcaattagagatatagttgttcaacggcaaatacatccaacaaattatgaccatctggcattgatagctacttggaaacaaggccctgctacattccctgatggaggaatgttggccgagttgggaccagttattgatactgatacattaaaaatgcgtggtttatctgctattttaccccaattgaaaccaggttgtcttgccaaggataaatggacaaatattgatggactacagcttgatagtgttgatgattatgtagatgaattaagagcattactggacgaagctggatttgatgggggaactttgtggaagagaatggttcatattttctatacttcactcataagagtccctaatggaaattatatttatgatctttattctgtcttgtctttttatactcttacatgggcaaaaattaaaggtggccccgtccaaaagatagaagatattgccaatcgtgaattaaaaaattatagtgcaaaaatatcttcttga

SEQ ID NO: 27284 - DNA, 1044 bp, Escherichia coli; identical to SEQ ID NO: 27276

SEQ ID NO: 27285 - DNA, 5511 bp, Escherichia coli
atgattaataaaaataaagtaactgaacgttcaggtatacatgataccgtgaaaagccttagtgagaatctgagaaaatacattgaggcacaatatcatatccgggatgaagggttaattgctgagcgacgagcgcttttacagcaaaatgaaactattgctcaagctccttatatagaagcaaccccaatttatgaacctggtgcgccatacagtgaattgcctattcccgaagcagcaagtaatgtgctaactcaactatcagaacttggaattggcctctatcaacgcccctataaacaccaatcacaggcacttgagtcatttcttggcgaagacgcttctgatctggtcattgcaacaggtacaggctccggtaagactgaaagctttctaatgccaattattggtaaattggcgattgaatcttccgagagacctaaatctgcatcccttccaggttgtagagcaattttattatatccaatgaatgcattagttaacgatcaacttgctcgtatcagacgtctttttggtgattctgaagcctctaaaatactgagatctggaagatgtgcccctgtacgctttggcgcttatacgggaagaacgccttaccctggtcgtcgtagctctagacgagacgagctttttatcaaaccccttttcgatgagttttacaataaactcgcaaataacgcccccgtacgtgcggaactgaaccgcattggtcgctggccaagtaaagatcttgatgctttttatgggcaaagcgcatctcaggctaaaacctacgtctcaggcaaaaaaacgggtaagcaatttgttttgaacaattggggggagaggctaattacccagcctgaggatcgtgagctaatgacccggcatgaaatgcagaatcgctgtccagaattactgataacgaactactccatgcttgagtatatgctgatgcgacctatcgagcgtaatatttttgagcagactaaggaatggctcaaagctgatgagatgaatgagcttatcttagtgcttgatgaagcgcatatgtatagaggagcagggggagcagaggtagcccttttaatacgtcgcctctgtgctcggttggatattccccgggaacgtatgcgctgcatccttaccagtgctagtctagggtccattgaggatggagaacgttttgcccaagacttaactggcttatcaccaacctcttcgaggaaatttcgaattattgagggtacaagggaatcgcgtcctgagtcacaaattgttaccagtaaagaagctaatgcactggctgaattcgacctaaattcatttcagtgcgtagctgaggatcttgaatctgcatatgcagcaatagagtctcttgccgaacgaatgggctggcaaaagccgatgataaaagatcatagtacactacgtaattggttatttgataatttgactggttttggtcctattgaaacgcttattgaaatagtttcaggtaaagcggttaagctaaatatcttgagtgaaaacctttttccagactctccacagcaaattgcagagcgagcgacagatgcattactcgcattgggttgctatgctcagagggcatccgatggcagagtgcttattccaactcgcatgcatcttttttatcggggattaccaggtctttatgcctgtatagatcccgattgtaatcaacgtttgggtaaccatagtgggccaactatacttggccgcctttatacgaaaccactggatcaatgtaaatgcgcttcaaaagggcgagtctacgaattatttacccaccgtgactgcggtgcggcttttattcgtggatacgttagttccgaaatggactttgtatggcaccagccgaacggaccattatcagaagatgaggatatcgatcttgttcccatagatatattggtcgaggaaacacctcatgtacatagtgattaccaggacagatggctacatatagcaacaggacgcctttctaaacagtgtcaagatgaggattctggttatcgtaaagtctttatacctgaccgagttaagtctggatctgaaattacatttgatgaatgccctgtttgtatgcgtaagacaagaagtgctcagaatgaaccgtctaaaattatggatcatgttacaaaaggggaagcaccttttacaacgttagtacgtacacagatatctcaccagccagcgagtcgtcctattgatggtaaacatcccaatgggggaaaaaaagtacttattttttctgatggccgacaaaaagcagctcggcttgcacgtgatattcctagagatattgagcttgatttgtttcggcaatccattgctctcgcctgttctaaactgaaagatatcaatcgggaacccaaaccaacatcagtactttaccttgctttcctatcagtcctttctgaacatgacttgcttatttttgatggggaagattcacgaaaagttgtaatggcccgtgatgaattttatcgtgattataatagcgatctggctcaagcttttgatgataacttcagtccccaagagtcaccgtcacgatataaaatagcgttgcttaaacttttatgtagcaattactattctctttccggaacaacagttggttttgttgaaccatcgcagcttaaatcaaaaaaaatgtgggaagatgtgcagtccaagaagctcaatattgagagcaaggatgttcatgctttagctgttgcttggattgataccttactcactgaatttgcttttgatgaatctattgattcgacactacgaatcaaagccgctggattctacaaacccacttggggtagtcaaggacggtttggaaaagctcttaggaaaaccctgatacagcatcctgctatgggggagctttatgtggaagttttggaggagatttttcgtactcatctgacattaggaaaagatggtgtctactttcttgctccaaatgcactacgtctgaaaatagatctcttgcatgtctggaaacaatgtaatgactgcacggcactaatgccatttgctttagaacattctacttgccttgcttgtggtagtaacagtgtcaaaacagtcgagccgtcggaaagcagctatattaatgcacgaaaaggattctggcgttcgccggtagaagaagttttggtttcaaattcgcggcttctaaaccttagcgttgaagagcatactgctcaactctcacatagagatagggccagcgttcatgccactacagaactctacgaactgagattccaagatgttcttattaatgataacgacaagcccattgatgtacttagttgtacgacgacgatggaagtgggggttgatattggatctctggttgctgttgctttaagaaacgtccctccgcaacgagaaaattatcagcaacgtgctgggcgagcaggccgccgtggcgcatctgtttcaacggtggttacatattctcaaaatggccctcatgatagttattatttccttaatcctgaacgcattgttgcaggttctcctcgtacacctgaagtgaaagtaaataatcccaaaatagccagaagacacgttcattcttttttagttcagaccttttttcacgagttaatggaacaaggaatttataatcccacagagaaaactgccatacttgagaaagcacttggtactacacgagatttttttcatggagcaaaagatactggcctaaatctcgatagctttaataattgggttaaaaaccgtattctatctactaatggtgatttgagaacaagtgttgcagcatggcttcctcctgttcttgaaactggagggctttctgccagtgactggtttgctaaggtagcagaggaatttttaaatacactccatgggctggctgaaattgttccacaaattgccgttcttgttgatgaggaaaatgaagatgatgagcagacttctggtggaatgaaatttgcacaagaagaattacttgagttcctgttttaccatggtttattaccaagttatgcatttcctacaagcctctgtagtttcttggtagaaaaaattgtaaagaatattagaggttcttttgaggtgcgaacagtacaacagcctcagcaatcaatttctcaggctctgagtgaatatgccccgggacgtttgattgttattgataggaaaacctatcgctctggtggtgttttttctaatgcattgaaaggcgaactaaaccgggcaagaaagcttttcaataatcccaaaaagtttattcattgcgataagtgctcttttgtccgcgatcctcataataatcagaatagcgaaaatacttgtccgatctgtggtggcattctaaaagtagaaataatgattcagcccgaagtctttggacctgaaaatgccaaggaacttaatgaggacgacagagagcaagaaatcacctatgtaactgcggcacaatatccacaacctgttgatcctgaagattttaagttcaataatggaggtgctcatattgtttttactcacgcaatagatcagaaactggtgacggtgaaccgagggaaaaatgagggggggtccagtggtttttcagtatgttgcgaatgtggtgcggcctccgtttatgattcctactcaccggcaaagggggcacatgaaagaccgtataaatatatagcaactaaggaaacgcctcgcttatgctctggcgagtataaacgcgtttttctcggacatgatttccgtactgatttgcttttattacgaataaccgttgggtctccgcttgtaactgatacttcaaatgctatcgttttacggatgtatgaagatgcattatatacaatagcggaagcactaaggcttgcagctagtcgccataaacaactggatcttgatcctgctgagtttggctctggtttcagaattttacccactatagaggaagatactcaggcattggatctcttcctttatgatactttatctggcggtgcgggttatgcggaagtagcagcagcgaatctagatgacattcttactgcaacactcgcattgttagaaggttgtgagtgcgatacctcctgtacagattgtctcaatcatttccacaaccagcatatacaaagccgtctcgataggaaactaggtgcatctttacttcgttatgctctatacggaatggttcctcgttgtgcttcacctgatattcaggtagaaaaattgtctcaattgagggcaagtctggaattggatggttttcaatgcctaattaagggaactcaggaggcacctatgattgtgagtttgaatgaccgttctgttgcagtgggaagttaccctggtcttattgatcgacccgactttcaacacgacgtatataagtcaaagaatactaatgctcatatagcctttaatgaatatcttcttcgttcaaatctgccacaagcgcatcaaaatattagaaaattgttgcgctga

SEQ ID NO: 27286 - DNA, 1215 bp, Escherichia coli
atgcacaaatatccctctataatagttaatatcaaccttcgagaagccaaactgaaaaagaaggtacgtgagcatttacaatccttgggttttacaagatctgattctggagcgctccaggccccgggaaataccaaagatgtaatacgggctcttcatagttctcaacgagctgagcggatatttgcaaaccaaaagttcataacgctaagagcggcaaagcttattaaatttttcgcatccggcaatgaggtcattccggataagatttcaccggtacttgaacgtgtaaagtcaggaacctggcaaggagatctctttaggttagcagcattaacttggtccgtacctgtttcaagcggatttggaaggcgtctccggtatcttgtatgggatgaaagcaacggaaaattgatagggctgatcgcaattggtgaccctgtgttcaaccttgcagtccgagataatttgattgggtgggatactcatgccagaagttcccggcttgttaatttgatggatgcatacgtcctcggtgctcttcccccttataatgccctgctgggaggaaaattaattgcatgtctgcttcgtagccgcgatctttatgatgactttgcaaaggtctatggtgataccgttggagtaatatctcaaaaaaagaaacaagcacgtcttttggctattacaacaacatcgtctatggggcgctcatcggtatataaccgtttaaagctggatggaattcaatatttaaaatcgattggatatacaggcggttgggggcattttcatatacctgatagcttgttcattgaattacgtgattacttacgtgatatggatcacgcttatgcagatcattatatgtttggtaatgggcctaactggcgtttacgtacaactaaggcagctttaaatgcactaggatttagagataatttaatgaagcatggaattcaacgtgaagtgtttatcagtcagctagcagaaaatgcaactagtattctgcaaacaggcaaaggtgaaccagatctaacctctttgctttctgctaaagagatagctgagtgtgcgatggcacgatggatggttccacgatcaattcgcaatccagaatatcggctttggaaagcaagagatctatttgattttattagtaatgactcgctaaactttcccccgtttgacgagatagcgaaaacagttgtctaa

SEQ ID NO: 27287 - DNA, 1884 bp, Escherichia coli
atgagttaccaatatagccaagaggcaaaggaacggatctctaagttaggacaatccgaaattgttaactttatcaatgagatttctccaactttacgacgtaaagcttttggttgtttaccaaaagtaccgggattcagggcaggacatcccactgaaattaaagaaaaacagaaaagattgattgggtatatgttccagtcacacccttcctctgaggagagaaaagcatggaaaagtttttctcttttttggcagttttgggctgaagagaaaattgacaaatcatttagtatgattgataatttaggattaaaagaaaactctggctctatttttattagagagcttgctaaaaactttcctaaagttgctagagagaatatcgagcgcctgtttatctttagtgggtttgctgatgatccagacgttataaatgcatttaacctttttcctcctgcagttgttcttgcccgcgatatcgtgattgatactcttccaattcgtttagatgagcttgaagcacgtattagtttaattgccgataatgttgagaaaaaaaataatcatattaaagaacttgagttaaaaatagatgctttttccgaacagtttgataattactttaataatgaaaagagcagtttaaaaataattaatgaactacaatctttgataaactcagagactaaacaatctgatattgctaataaagctattgacgagctttatcattttaatgaaaaaaacaaacagctaatattatctcttcaagaaaaattagattttaatgctctggctatgaatgatatttctgagcatgaaaaattgataaaaagtatggctaatgacatttcagaatttaaaaatgcattaacgatcttgtgtgataataaaataaagaataacgagttagattatgtcaatgaattaaaaaaactcactgaacgaatagatacacttgaaataaacacatctcaagctagcgaagtgagtgtcaccaatagatttacaaaattccatgaaatagcgcactatgaaaattatgagtatctttcatcctccgaagacatatctaatagaatttctttaaatttacaggctgttggattgacaaaaaattcagcagaaaaattggctagattgacattagctaccttcgtttctggacaaatcattcaattcagtggctctttggcagatattatcgcggatgcaattgccattgctattggtgcaccacgttatcacatatggagagttccagttggtattatttctgacatggatgcttttgattttatagagactatagctgaatcatctcgctgtctccttttgaaaggggccaatctttcagcatttgagatttatggagcggcaattagagatatagttgttcaacggcaaatacatccaacaaattatgaccatctggcattgatagctacctggaaacaaggcccagctacattccctgatggaggaatgttggccgagttgggacctgttattgatactgatacattaaaaatgcgtggtttatcagctactttaccccaattgaaaccaggttgtcttgccaaggataaatggacaaatattgatggactacatcttgatagtgttgatgattatgtagatgaattaagagcattactggacgaagctggatttgatgggggaactttgtggaagagaatgattcatattttctatacttcactcataaggatccctaatggaaattatatttatgatctttattctgtcttgtctttttatactcttacatgggcaaaaattaaaggtggccccgtccaaaagatagaagatattgccaatcgtgaattaaaaaattatagtgcaaaaatatcttcttga

SEQ ID NO: 27288 - DNA, 1044 bp, Escherichia coli
atggagtggagagcagtatcacgagacaaagcactggatatgttatcaactgcattaaattgtcgatttgatgatgaagggttgagaatttcagcagtttcagaatgcttaaggagcgtattatatcaatattctatatctgaaacagaagaagctaggcaaactgtaacctcgcttcgactcactagtgcagtaaggcgaaaattggtacctttatggccagacattgctgatattgataatgctatacatccgggcattatgtctatattgaacagcttggctgaattgggtgacatgattaagttagaaggtggtaattggctaacagctcccccacatgcagtacgaattgacaataagatggctgttttttttggtggagagccttcctgtacattttcaacgggcgtggtagctaaatctgctggaagagttcgcttggttgaagaaaaagtgtgtactggaagtgttgaaatctgggatgcaaatgagtggattggtgccccagcagaaggcaatgaagaatggtcatccagactactatctggaactatttccggctttatcgatgcacctggcaatatgagtgaaacgactgcatatgtgcggggaaaatggctccatttgtcagaactttcttttaataaaaagcaaatctacttatgcagaatgtccgttgataatcacttttcctattatttaggagaaattgaagctggacgcttatgtagaatgaattcgttagaatcgtctgataatgtcagaagattacgtttttttctcgatacaaaagataattgtccgctaaaggtccgtatcaaaatatctaatgggctagcaagattaagattaaccagaagattaccaagacgagaaacgaaggtactcctgctaggctggagagaatcaggttttgaaaatgaacattcaggaataacacaccatgtattccccgaggaaatattacccatagtgcgtagcgcttttgaagggcttggtattatttggattaacgaattcacgcgacggaatgaaatatga

SEQ ID NO: 27289 - DNA, 5511 bp, Escherichia coli
atgattaataaaaataaagtaactgaacgttcaggtatacatgataccgtgaaaagccttagtgagaatctgagaaaatacattgaggcacaatatcatatccgggatgaagggttaattgctgagcgacgagcgcttttacagcaaaatgaaactattgctcaagctccttatatagaagcaaccccaatttatgaacctggtgcgccatacagtgaattgcctattcccgaagcagcaagtaatgtgctaactcaactatcagaacttggaattggcctctatcaacgcccctataaacaccaatcacaggcacttgagtcatttcttggcgaagacgcttctgatctggtcattgcaacaggtacaggctccggtaagactgaaagctttctaatgccaattattggaaaattggcgattgaatcttccgagagacctaaatctgcatcccttccaggttgtagagcaattttattatatccaatgaatgcattagttaacgatcaacttgctcgtatcagacgtctttttggtgattctgaagcctctaagatactgagatctggaagatgtgcccctgtacgctttggcgcttatacgggaagaacgccttaccctggtcgtcgtagctctagacgagacgagctttttatcaaaccccttttcgatgagttttacaataaactcgcaaataacgcccccgtacgtgcggaactgaaccgcattggtcgctggccaagtaaagatcttgatgctttttatggtcaaagcgcatctcaggctaaaacctacgtctcaggcaaaaaaacgggtaagcaatttgttttgaacaattggggggagaggctaattacccagcctgaggatcgtgagctaatgacccggcatgaaatacagaatcgctgtccagaattactgataacgaactactccatgcttgagtatatgctgatgcgacctatcgagcgtaatatttttgagcagactaaggaatggctcaaagctgatgagatgaatgagcttatcttagtgcttgatgaagcgcatatgtatagaggagcagggggagcagaggtagcccttttaatacgtcgcctctgtgctcggttggatattccccgggaacgtatgcgctgcatccttaccagtgctagtctagggtccattgaggatggagaacgttttgcccaagacttaactggcttatcaccaacctcttcgaggaaatttcgaattattgagggtacaagggaatcgcgtcctgagtcacaaattgttaccagtaaagaagctaatgcactggctgaattcgacctaaattcatttcagtgcgtagctgaggatcttgaatctgcatatgcagcaatagagtctcttgccgaacgaatgggctggcaaaagccgatgataaaagatcatagtacactacgtaattggttatttgataatttgactggttttggtcctattgaaacgcttattgaaatagtttcaggtaaagcggttaagctaaatattttgagtgaaaacctttttccagactctccacagcaaatcgcagagcgagcaacagatgcattactcgcattgggttgctatgctcagagggcatccgatagcagagtgcttattccaactcgcatgcatcttttttatcggggattaccaggtctttatgcctgtatagatcccgattgtaatcaacgtttgggtaaccatagcgggccaactatacttggccgcctttatacgaaaccactggatcagtgtaaatgcgcttcaaaagggcgagtctacgaattatttacccaccgtgactgcggtgcggcttttattcgtggatacgttagttccgaaatggactttgtatggcaccagccgaacggaccattatcagaagatgaggatatcgatcttgttcccatagatatattggtcgaggaaacacctcatgtacatagtgattaccaggacagatggctacatatagcaacaggacgcctttctaaacagtgtcaagatgaggattctggttatcgtaaagtctttatacctgaccgagttaagtctggatcagaaattacatttgatgaatgccctgtttgtatgcgtaagacaagaagtgctcagaatgaaccgtctaaaattatggatcatgttacaaaaggggaagcaccttttacaacgttagtacgtacacagatatctcaccagccagcgagtcgtcctattgatggtaaacatcccaatgggggaaaaaaagtacttattttttctgatggccgacaaaaagcagctcggcttgcacgtgatattcctagagatattgagcttgatttgtttcggcaatccattgctctcgcctgttctaaactgaaagatatcaatcgggaacccaaaccaacatcagtactttaccttgctttcctatcagtcctttctgaacatgacttgcttatttttgatggggaagattcacgaaaagttgtaatggcccgtgatgaattttatcgtgattataatagcgatctggctcaagcttttgatgatagcttcagcccccaagagtcaccgtcacgatataaaatagcgttgcttaaacttttatgtagcaattactattctctttccggaacaacagttggttttgttgaaccatcgcagcttaaatcaaaaaaaatgtgggaagatgtgcagtccaagaagctcaatattgagagcaaggatgttcatgctttagctgttgcttggattgataccttactcactgaatttgcttttgatgaatctattgattcgacactacgaatcaaagcagctggattctacaaacccacttggggtagtcaaggacggtttggaaaagctcttaggaaaaccctgatacagcatcctgctatgggggagctttatgtggaagttttggaggagatttttcgtactcatctgacattaggaaaagatggtgtctactttcttgctccaaatgcactacgtttgaaaatagatctcttgcatgtctggaaacaatgtaatgactgcacggcactaatgccatttgctttagaacattctacttgccttgcttgtggtagtaacagtgtcaaaacagtcgagccgtcggaaagcagctatattaatgcacgaaaaggattctggcgttcgccggtagaagaagttttggtttcaaattcgcggcttctaaaccttagcgttgaagagcatactgctcaactctcacatagagatagggccagcgttcatgcaactacagaactctacgaactgagattccaagatgttcttattaatgataacgacaagcccattgatgtacttagttgtacgacgacgatggaagtgggggttgatattggatctctggttgctgttgctttaagaaacgtccctccgcaacgagaaaattatcagcaacgtgctgggcgagcaggccgccgtggcgcatctgtttcaacggtggttacatattctcaaaatggccctcatgatagttattatttccttaatcctgaacgcattgttgcaggttctcctcgtacacctgaagtgaaagtaaataatcccaaaatagccagaagacacgttcattcttttttagttcagaccttttttcacgagttaatggaacaaggaatttataatcccgcagagaaaactgccatacttgagaaagcacttggtactacacgagatttttttcatggagcaaaagatactggcctaaatctcgatagctttaataattgggttaaaaaccgtattctatctactaatggtgatttgagaacaagtgttgcagcatggcttcctcctgttcttgaaactggagggctttctgccagtgactggtttgctaaggtagcagaggaatttttaaatacactccatgggctggctgaaattgttccacaaactgccgttcttgttgatgaggaaaatgaagatgatgagcagacttctggtggaatgaaatttgcacaagaagaattacttgagttcctgttttaccatggtttattaccaagttatgcatttcctacaagcctctgtagtttcttggtagaaaaaattgtaaagaatattagaggttcttttgaggtgcgaacagtacaacagcctcagcaatcaatttctcaggctctgagtgaatatgccccgggacgtttgattgttattgataggaaaacctatcgctctggtggtgttttttctaatgcattgaaaggcgaactaaaccgggcaagaaagcttttcaataatcccaaaaagtttattcattgcgataagtgctcttttgtccgcgatcctcataataatcagaatagcgaaaatacttgtccgatctgtggtggcattctaaaagtagaaataatgattcagcccgaagtctttggacctgaaaatgccaaggaacttaatgaggacgacagagagcaagaaatcacctatgtaacagcggcacaatatccacaacctgttgatcctgaagattttaagttcaataatggaggtgctcatattgtttttactcacgcaatagatcagaaactggtgacggtgaaccgagggaaaaatgagggggagtccagtggtttttcagtatgttgcgaatgtggtgcggcctccgtttatgattcctactcaccggcaaagggggcacatgaaagaccgtataaatatatagcaactaaggaaacgcctcgcttatgctctggcgagtataaacgcgtttttctcggacatgatttccgtactgatttgcttttattacgaataaccgttgggtctccgcttgtaactgatacttcaaatgctatcgttttacggatgtatgaagatgcattatatacaatagcggaagcactaaggcttgcagctagtcgccataaacaactggatcttgatcctgctgagtttggctctggtttcagaattttacccactatagaggaagatactcaggcattggatctcttcctttatgatactttatccggcggtgcgggttatgcggaagtagcagcagcgaatctagatgacattcttactgcaacactcgcattgttagaaagctgtgagtgcgatacctcctgtacagattgtctcaatcatttccacaaccagcatatacaaagccgtctcgataggaaactaggtgcatctttacttcgttatgcactatacggaatggttcctcgttgtgcttcacctgatattcaggtagaaaaattgtctcaattgagggcaagtctggaattggatggttttcaatgcataattaagggaactcaggaggcacctatgattgtgagtttgaatgaccgttctgttgcagtgggaagttatcctggtcttattgatcgacccgactttcaacacgacgtatataagtcaaagcatactaatgctcatatagcctttaatgaatatcttcttcgttcaaatctgccacaatcgcatcaaaatattagaaaaatattgcgctga

SEQ ID NO: 27290 - DNA, 1215 bp, Escherichia coli; identical to SEQ ID NO: 27268

SEQ ID NO: 27291 - DNA, 1647 bp, Escherichia coli; identical to SEQ ID NO: 27269

SEQ ID NO: 27292 - DNA, 1884 bp, Escherichia coli; identical to SEQ ID NO: 27270

SEQ ID NO: 27293 - DNA, 1044 bp, Escherichia coli; identical to SEQ ID NO: 27271

SEQ ID NO: 27294 - DNA, 5511 bp, Escherichia coli
atgattaataaaaataaagtaactgaacgttcaggtatacatgataccgtgaaaagccttagtgaaaatctgagaaaatacattgaggcacaatatcatatccgggatgaagggttaattgctgagcgacgagcgcttttacagcaaaatgaaactattgctcaagctccttatatagaagcaaccccaatttatgaacctggtgcgccatacagtgaattgcctattcccgaagcagcaagtaatgtgctaactcaactatcagaacttggaattggcctctatcaacgcccctataaacaccaatcacaggcacttgagtcatttcttggcgaaaacgcttctgatctggtcattgcaacaggtacaggctccggtaagactgaaagctttctaatgccaattattggaaaattggcgattgaatcttccgagagacctaaatctgcatcccttccaggttgtagagcaattttattatatccaatgaatgcattagttaacgatcaacttgctcgtatcagacgtctttttggtgattctgaagcctctaaaatactgagatctggaagatgtgcccctgtacgctttggcgcttatacgggaagaacgccttaccctggtcgtcgtagctctagacgagacgagctttttatcaaaccccttttcgatgagttttacaataaactcgcaaataacgcccccgtacgtgcggaactgaaccgcattggtcgctggccaagtaaagatcttgatgctttttatgggcaaagcgcatctcaggctaaaacctacgtctcaggcaaaaaaacgggtaagcaatttgttttgaacaattggggggagaggctaattacccagcctgaggatcgtgagctaatgacccggcatgaaatacagaatcgctgtccagaattactgataacgaactactccatgcttgagtatatgctgatgcgacctatcgagcgtaatatttttgagcagactaaggaatggctcaaagctgatgagatgaatgagcttatcttagtgcttgatgaagcgcatatgtatagaggagcagggggagcagaggtagcccttttaatacgtcgcctctgtgctcggttggatattccccgggaacgtatgcgctgcatccttaccagtgctagtctagggtccattgaggatggagaacgttttgcccaagacttaactggcttatcaccaacctcttcgaggaaatttcgaattattgagggtacaagggaatcgcgtcctgagtcacaaattgttaccagtaaagaagctaatgcactggctgaattcgacctaaattcatttcagtgcgtagctgaggatcttgaatctgcatatgcagcaatagagtctcttgccgaacgaatgggctggcaaaagccgatgataaaagatcatagtacactacgtaattggttatttgataatttgactggttttggtcctattgaaacgcttattgaaatagtttcaggtaaagcggttaagctaaatatcttgagtgaaaacctttttccagactctccacagcaaatcgcagagcgagcaacagatgcattactcgcattgggttgctatgctcagagggcatccgatggcagagtgcttattccaactcgcatgcatcttttttatcggggattaccaggtctttatgcctgtatagatcccgattgtaatcaacgtttgggtaaccatagcgggccaactatacttggccgcctttatacgaaaccactggatcaatgtaaatgctcttcaaaagggcgagtctacgaattatttacccaccgtgactgcggtgcggcttttattcgtggatacgttagttccgaaatggactttgtatggcaccagccgaacggaccattatcagaagatgaggatatcgatcttgttcccatagatatattggtcgaggaaacacctcatgtacatagtgattaccaggacagatggctacatatagcaacaggacgcctttctaaacagtgtcaagatgaggattctggttatcgtaaagtctttatacctgaccgagttaagtctggatcagaaattacatttgatgaatgccctgtttgtatgcgtaagacaagaagtgctcagaatgaaccgtctaaaattatggatcatgttacaaaaggggaagcaccttttacaacgttagtacgtacacagatatctcaccagccagcgagtcgtcctattgatggtaaacatcccaatgggggaaaaaaagtacttattttttctgatggccgacaaaaagcagctcggcttgcacgtgatattcctagagatattgagcttgatttgtttcggcaatccattgctctcgcctgttctaaactgaaagatatcaatcgggaacccaaaccaacatcagtactttaccttgctttcctatcagtcctttctgaacatgacttgcttatttttgatggggaagattcacgaaaagttgtaatggcccgtgatgaattttatcgtgattataatagcgatctggctcaagcttttgatgatagcttcagcccccaagagtcaccgtcacgatataaaatagcgttgcttaaacttttatgtagcaattactattctctttccggaacaacagttggttttgttgaaccatcgcagcttaaatcaaaaaaaatgtgggaagatgtgcagtccaagaagctcaatattgagagcaaggatgttcatgctttagctgttgcttggattgataccttactcactgaatttgcttttgatgaatctattgattcgacactacgaatcaaagcagctggattctacaaacccacttggggtagtcaaggacggtttggaaaagctcttaggaaaaccctgatacagtatcctgctatgggggagctttatgtggaagttttggaggagatttttcgtactcatctgacattaggaaaagatggtgtctactttcttgctccaaatgcactacgtctgaaaatagatctcttgcatgtctggaaacaatgtaatgactgcacggcactaatgccatttgctttagaacattctacttgccttgcttgtggtagtaacagtgtcaaaacagtcgagccgtcggaaagcagctatattaatgcacgaaaaggattctggcgttcgccggtagaagaagttttggtttcaaattcgcggcttctaaaccttagcgttgaagagcatactgctcaactctcacatagagatagggccagcgttcatgccactacagaactctacgaactgagattccaagatgttcttattaatgataacgacaagcccattgatgtacttagttgtacgacgacgatggaagtgggggttgatattggatctctggttgctgttgctttaagaaacgtccctccgcaacgagaaaattatcagcaacgtgctgggcgagcaggccgccgtggcgcatctgtttcaacggtggttacatattctcaaaatggccctcatgatagttattatttccttaatcctgaacgcattgttgcaggttctcctcgtacacctgaagtgaaagtaaataatcccaaaatagccagaagacacgttcattcttttttagttcagaccttttttcacgagttaatggaacaaggaatttataatcccgcagagaaaactgccatacttgagaaagcacttggtactacacgagatttttttcatggagcaaaagatactggcctaaatctcgatagctttaataattgggttaaaaaccgtattctatctactaatggtgatttgagaacaagtgttgcagcatggcttcctcctgttcttgaaactggagggctttctgccagtgactggtttgctaaggtagcagaggaatttttaaatacactccatgggctggctgaaattgttccacaaactgccgttcttgttgatgaggaaaatgaagatgatgagcagacttctggtggaatgaaatttgcacaagaagaattacttgagttcctgttttaccatggtttattaccaagttatgcatttcctacaagcctctgtagtttcttggtagaaaaaattgtaaagaatattagaggttcttttgaggtgcgaacagtacaacagcctcagcaatcaatttctcaggctctgagtgaatatgccccgggacgtttgattgttattgataggaaaacctatcgctctggtggtgttttttctaatgcattgaaaggcgaactaaaccgggcaagaaagcttttcaataatcccaaaaagtttattcattgcgataagtgctcttttgtccgcgatcctcataataatcagaatagcgaaaatacttgtccgatctgtggtggcattctaaaagtagaaataatgattcagcccgaagtctttggacctgaaaatgccaaggaacttaatgaggacgacagagagcaagaaatcacctatgtaacagcggcacaatatccacaacctgttgatcctgaagattttaagttcaataatggaggtgctcatattgtttttactcacgcaatagatcagaaactggtgacggtgaaccgagggaaaaatgagggggagtccagtggtttttcagtatgttgcgaatgtggtgcggcctccgtttatgattcctactcaccggcaaagggggcacatgaaagaccgtataaatatatagcaactaaggaaacgcctcgcttatgctctggcgagtataaacgcgtttttctcggacatgatttccgtactgatttgcttttattacgaataaccgttgggtctccgcttgtaactgatacttcaaatgctatcgttttacggatgtatgaagatgcattatatacaatagcggaagcactaaggcttgcagctagtcgccataaacaactggatcttgatcctgctgagtttggctctggtttcagaattttacccactatagaggaagatactcaggcattggatctcttcctttatgatactttatccggcggtgcgggttatgcggaagtagcagcagcgaatctagatgacattcttactgcaacactcgcattgttagaaagctgtgagtgcgatacctcctgtacagattgtctcaatcatttccacaaccagcatatacaaagccgtctcgataggaaactaggtgcatctttacttcgttatgcactatacggaatggttcctcgttgtgcttcacctgatattcaggtagaaaaattgtctcaattgagggcaagtctggaattggatggttttcaatgcataattaagggaactcaggaggcacctatgattgtgagtttgaatgaccgttctattgcagtgggaagttatcctggtcttattgatcgacccgactttcaacacgacgtatataagtcaaagcatactaatgctcatatagcctttaatgaatatcttcttcgttcaaatctgccacaatcgcatcaaaatattagaaaaatgttgcgctga

SEQ ID NO: 27295 - DNA, 1215 bp, Escherichia coli; identical to SEQ ID NO: 27268

SEQ ID NO: 27296 - DNA, 1647 bp, Escherichia coli; identical to SEQ ID NO: 27269

SEQ ID NO: 27297 - DNA, 1884 bp, Escherichia coli; identical to SEQ ID NO: 27270

SEQ ID NO: 27298 - DNA, 1044 bp, Escherichia coli; identical to SEQ ID NO: 27271

SEQ ID NO: 27299 - DNA, 5511 bp, Escherichia coli
atgattaataaaaataaagtaattgaacgttcaggtatacatgataccgtgaaaagccttagtgaaaatctgagaaaatacattgaggcacaatatcatatccgggatgaagggttaattgctgagcgacgagcgcttttacagcaaaatgaaactattgctcaagctccttatatagaagcaaccccaatttatgaacctggtgcgccatacagtgaattgcctattcccgaagcagcaagtaatgtgctaactcaactatcagaacttggaattggcctctatcaacgcccctataaacaccaatcacaggcacttgagtcatttcttggcgaaaacgcttctgatctggtcattgcaacaggtacaggctccggtaagactgaaagctttctaatgccaattattggaaaattggcgattgaatcttccgagagacctaaatctgcatcccttccaggttgtagagcaattttattatatccaatgaatgcattagttaacgatcaacttgctcgtatcagacgtctttttggtgattctgaagcctctaaaatactgagatctggaagatgtgcccctgtacgctttggcgcttatacgggaagaacgccttaccctggtcgtcgtagctctagacgagacgagctttttatcaaaccccttttcgatgagttttacaataaactcgcaaataacgcccccgtacgtgcggaactgaaccgcattggtcgctggccaagtaaagatcttgatgctttttatgggcaaagcgcatctcaggctaaaacctacgtctcaggcaaaaaaacgggtaagcaatttgttttgaacaattggggggagaggctaattacccagcctgaggatcgtgagctaatgacccggcatgaaatacagaatcgctgtccagaattactgataacgaactactccatgcttgagtatatgctgatgcgacctatcgagcgtaatatttttgagcagactaaggaatggctcaaagctgatgagatgaatgagcttatcttagtgcttgatgaagcgcatatgtatagaggagcagggggagcagaggtagcccttttaatacgtcgcctctgtgctcggttggatattccccgggaacgtatgcgctgcatccttaccagtgctagtctagggtccattgaggatggagaacgttttgcccaagacttaactggcttatcaccaacctcttcgaggaaatttcgaattattgagggtacaagggaatcgcgtcctgagtcacaaattgttaccagtaaagaagctaatgcactggctgaattcgacctaaattcatttcagtgcgtagctgaggatcttgaatctgcatatgcagcaatagagtctcttgccgaacgaatgggctggcaaaagccgatgataaaagatcatagtacactacgtaattggttatttgataatttgactggttttggtcctattgaaacgcttattgaaatagtttcaggtaaagcggttaagctaaatatcttgagtgaaaacctttttccagactctccacagcaaatcgcagagcgagcaacagatgcattactcgcattgggttgctatgctcagagggcatccgatggcagagtgcttattccaactcgcatgcatcttttttatcggggattaccaggtctttatgcctgtatagatcccgattgtaatcaacgtttgggtaaccatagcgggccaactatacttggccgcctttatacgaaaccactggatcaatgtaaatgcgcttcaaaagggcgagtctacgaattatttacccaccgtgactgcggtgcggcttttattcgtggatacgttagttccgaaatggactttgtatggcaccagccgaacggaccattatcagaagatgaggatatcgatcttgttcccatagatatattggtcgaggaaacacctcatgtacatagtgattaccaggacagatggctacatatagcaacaggacgcctttctaaacagtgtcaagatgaggattctggttatcgtaaagtctttatacctgaccgagttaagtctggatcagaaattacatttgatgaatgccctgtttgtatgcgtaagacaagaagtgctcagaatgaaccgtctaaaattatggatcatgttacaaaaggggaagcaccttttacaacgttagtacgtacacagatatctcaccagccagcgagtcgtcctattgatggtaaacatcccaatgggggaaaaaaagtacttattttttctgatggccgacaaaaagcagctcggcttgcacgtgatattcctagagatattgagcttgatttgtttcggcaatccattgctctcgcctgttctaaactgaaagatatcaatcgggaacccaaaccaacatcagtactttaccttgctttcctatcagtcctttctgaacatgacttgcttatttttgatggggaagattcacgaaaagttgtaatggcccgtgatgaattttatcgtgattataatagcgatctggctcaagcttttgatgatagcttcagcccccaagagtcaccgtcacgatataaaatagcgttgcttaaacttttatgtagcaattactattctctttccggaacaacagttggttttgttgaaccatcgcagcttaaatcaaaaaaaatgtgggaagatgtgcagtccaagaagctcaatattgagagcaaggatgttcatgctttagctgttgcttggattgataccttactcactgaatttgcttttgatgaatctattgattcgacactacgaatcaaagcagctggattctacaaacccacttggggtagtcaaggacggtttggaaaagctcttaggaaaaccctgatacagtatcctgctatgggggagctttatgtggaagttttggaggagatttttcgtactcatctgacattaggaaaagatggtgtctactttcttgctccaaatgcactacgtctgaaaatagatctcttgcatgtctggaaacaatgtaatgactgcacggcactaatgccatttgctttagaacattctacttgccttgcttgtggtagtaacagtgtcaaaacagtcgagccgtcggaaagcagctatattaatgcacgaaaaggattctggcgttcgccggtagaagaagttttggtttcaaattcgcggcttctaaaccttagcgttgaagagcatactgctcaactctcacatagagatagggccagcgttcatgccactacagaactctacgaactgagattccaagatgttcttattaatgataacgacaagcccattgatgtacttagttgtacgacgacgatggaagtgggggttgatattggatctctggttgctgttgctttaagaaacgtccctccgcaacgagaaaattatcagcaacgtgctgggcgagcaggccgccgtggcgcatctgtttcaacggtggttacatattctcaaaatggccctcatgatagttattatttccttaatcctgaacgcattgttgcaggttctcctcgtacacctgaagtgaaagtaaataatcccaaaatagccagaagacacgttcattcttttttagttcagaccttttttcacgagttaatggaacaaggaatttataatcccgcagagaaaactgccatacttgagaaagcacttggtactacacgagatttttttcatggagcaaaagatactggcctaaatctcgatagctttaataattgggttaaaaaccgtattctatctactaatggtgatttgagaacaagtgttgcagcatggcttcctcctgttcttgaaactggagggctttctgccagtgactggtttgctaaggtagcagaggaatttttaaatacactccatgggctggctgaaattgttccacaaactgccgttcttgttgatgaggaaaatgaagatgatgagcagacttctggtggaatgaaatttgcacaagaagaattacttgagttcctgttttaccatggtttattaccaagttatgcatttcctacaagcctctgtagtttcttggtagaaaaaattgtaaagaatattagaggttcttttgaggtgcgaacagtacaacagcctcagcaatcaatttctcaggctctgagtgaatatgccccgggacgtttgattgttattgataggaaaacctatcgctctggtggtgttttttctaatgcattgaaaggcgaactaaaccgggcaagaaagcttttcaataatcccaaaaagtttattcattgcgataagtgctcttttgtccgcgatcctcataataatcagaatagcgaaaatacttgtccgatctgtggtggcattctaaaagtagaaataatgattcagcccgaagtctttggacctgaaaatgccaaggaacttaatgaggacgacagagagcaagaaatcacctatgtaacagcggcacaatatccacaacctgttgatcctgaagattttaagttcaataatggaggtgctcatattgtttttactcacgcaatagatcagaaactggtgacggtgaaccgagggaaaaatgagggggagtccagtggtttttcagtatgttgcgaatgtggtgcggcctccgtttatgattcctactcaccggcaaagggggcacatgaaagaccgtataaatatatagcaactaaggaaacgcctcgcttatgctctggcgagtataaacgcgtttttctcggacatgatttccgtactgatttgcttttattacgaataaccgttgggtctccgcttgtaactgatacttcaaatgctatcgttttacggatgtatgaagatgcattatatacaatagcggaagcactaaggcttgcagctagtcgccataaacaactggatcttgatcctgctgagtttggctctggtttcagaattttacccaccatagaggaagatactcaggcattggatctcttcctttatgatactttatccggcggtgcgggttatgcggaagtagcagcagcgaatctagatgacattcttactgcaacactcgcattgttagaaagctgtgagtgcgatacctcctgtacagattgtctcaatcatttccacaaccagcatatacaaagccgtctcgataggaaactaggtgcatctttacttcgttatgcactatacggaatggttcctcgttgtgcttcacctgatattcaggtagaaaaattgtctcaattgagggcaagtctggaattggatggttttcaatgcataattaagggaactcaggaggcacctatgattgtgagtttgaatgaccgttctattgcagtgggaagttatcctggtcttattgatcgacccgactttcaacacgacgtatataagtcaaagcatactaatgctcatatagcctttaatgaatatcttcttcgttcaaatctgccacaatcgcatcaaaatattagaaaaatgttgcgctga

SEQ ID NO: 27300 - DNA, 1215 bp, Escherichia coli
atgcacaaagatccctctataatagttaatatcaaccttcgagaagccaaactgaaaaagaaggtacgtgagcatttacaatccttgggttttacaagatctgattctggagcgctccaggccccgggaaataccaaagatgtaatacgggctcttcatagttctcaacgagctgagcggatatttgcaaaccaaaagttcataacgctaagagcggcaaagcttattaaatttttcgcatccggcaatgaggtcattccggataaaatttcaccggtacttgaacgtgtaaagtcaggaacctggcaaggagatctctttaggttagcagcattaacttggtccgtacctgtttcaagcggatttggaaggcgtctccggtatcttgtatgggatgaaagcaacggaaaattgatagggctgatcgcaattggtgaccctgtgttcaaccttgcagtccgagataatttgattgggtgggatactcatgccagaagttcccggcttgttaatttgatggatgcatacgtcctcggtgctcttcccccttataatgccctgctgggaggaaaattaattgcatgtctgcttcgtagccgcgatctttatgatgactttgcaaaggtctatggtgataccgttggagtaatatctcaaaaaaagaaacaagcacgtcttttggctattacaacaacatcgtctatggggcgctcatcggtatataaccgtttaaagctggatggaattcaatatttaaaatcgattggatatacaggcggttgggggcattttcatatacctgatagcttgttcattgaattacgtgattacttacgtgatatggatcacgcttatgcagatcattatatgtttggtaatgggcctaactggcgtttacgtacaactaaggcagctttaaatgtactaggatttagagataatttgatgaagcatggaattcaacgtgaagtttttatcagtcagctagcagaaaatgcaactagtattctgcaaacaggcaaaggtgaaccagatctaacctctttgctttctgctaaagagatagctgagtgtgcgatggcacgatggatggttccacgatcaattcgcaatccagaatatcggctttggaaagcaagagatctatttgattttattagtaatgactcgctaaaatttcccccgtctgacgagatagcgaaaacagttgtctaa

SEQ ID NO: 27301 - DNA, 1647 bp, Escherichia coli; identical to SEQ ID NO: 27274

SEQ ID NO: 27302 - DNA, 1884 bp, Escherichia coli
atgagttaccaatatagccaagaggcaaaggaacggatctctaagttgggacaatccgaaattgttaactttatcaatgagatttctccaactttacgacgtaaagcttttggttgtttaccaaaagtaccgggattcagggcaggacatcccactgaaattaaagaaaaacagaaaagattgattgggtatatgttccagtcacatccttcctctgaggagagaaaagcatggaaaattttttctcttttttggcagttttgggctgaagagaaaattgacaaatcatttagtatgattgataatttaggattaaaagaaaactctggctctatttttattagagagcttgctaaaaactttcctaaagttgctagagagaatatcgagcgcctgtttatctttagtgggtttgctgatgatccagacgttataaatgcatttaacctttttcctcctgcagttgttcttgcccgcgatatcgtggttgatactcttccaattcgtttagatgagcttgaagcacgtattagtttaattgccgataatgtggagaaaaaaaataaccatattaaagagcttgagttaaaaatagatgctttttccgaacggtttgataattactttaataatgaaaagagcaatttaaaaataattaacgaactacaatccttaataaactcagagactaaacaatctgatattgctaataaatctattgacgagctttatcattttaatgaaaaaaacaaacagctaatattatctcttcaagagaaattagattttaatgctctggctatgaatgacatttctgagcatgaaaaattgataaaaagtatggctaatgaaatttcagagttaaaaaatgcattaactatcttgtgtgataataaaagaaagaataacgagttagattatatcaatgaattaaaaaaactcactgaacgaatagatacacttgaaataaacacatctcaagctagcaaagtgagtgtcaccaatagatttacaaaattccatgaaatagcgcactatgaaaattatgaatatctttcatcctccgaagacatatctaatagaatttctttaaatttacaggctgttgggttaacaaaaaattcagcagaaacattggctagattgacattagctaccttcgtttctggacaaatcattcaattcagtggctctttggcagatattatcgcggatgcaattgccattgctattggtgcaccacgttatcacatatggagagttccagttggtattatttctgacatggattcttttgattttatagagactatagctgaatcatctcgctgtctccttttgaaaggggccaatctttcagcatttgagatttatggagcggcaattagagatatagttgttcaacggcaaatacatccaacaaattatgaccatctggcattgatagctacttggaaacaaggccctgctacattccctgatggaggaatgttggccgagttgggaccagttattgatactgatacattaaaaatgcgtggtttatctgctattttaccccaattgaaaccaggttgtcttgccaaggataaatggacaaatattgatggactacagcttgatagtgttgatgattatgtagatgaattaagagcattactggacgaagctggatttgatgggggaactttgtggaagagaatggttcatattttctatacttcactcataagagtccctaatggaaattatatttatgatctttattctgtcttgtctttttatactcttacatgggcaaaaattaaaggtggccccgtccaaaagatagaagatattgccaatcgtgaattaaaaaattatagtgcaaaaatatcttcttga

SEQ ID NO: 27303 - DNA, 1044 bp, Escherichia coli; identical to SEQ ID NO: 27276

SEQ ID NO: 27304 - DNA, 5511 bp, Escherichia coli
atgattaataaaaataaagtaactgaacgttcaggtatacatgataccgtgaaaagccttagtgagaatctgagaaaatacattgaggcacaatatcatatccgggatgaagggttaattgctgagcgacgagcgcttttacagcaaaatgaaactattgctcaagctccttatatagaagcaaccccaatttatgaacctggtgcgccatacagtgaattacctattcccgaagcagcaagtaatgtgctaactcaactatcagaacttggaattggcctctatcaacgcccctataaacaccaatcacaggcacttgagtcatttcttggcgaagacgcttctgatctggtcattgcaacaggtacaggctccggtaagactgaaagctttctaatgccaattattggtaaattggcgattgaatcttccgagagacctaaatctgcatcccttccaggttgtagagcaattttattatatccaatgaatgcattagttaacgatcaacttgctcgtatcagacgtctttttggtgattctgaagcctctaaaatactgagatctggaagatgtgcccctgtacgctttggcgcttatacgggaagaacgccttaccctggtcgtcgtagctctagacgagacgagctttttatcaaaccccttttcgatgagttttacaataaactcgcaaataacgcccctgtacgtgcggaactgaaccgcattggtcgctggccaagtaaagatcttgatgctttttatgggcaaagcgcatctcaggctaaaacctacgtctcaggcaaaaaaacgggtaagcaatttgttttgaacaattggggggagaggctaattacccagcctgaggatcgtgagctaatgacccggcatgaaatgcagaatcgctgtccagaattactgataacgaactactccatgcttgagtatatgctgatgcgacctatcgagcgtaatatttttgagcagactaaggaatggctcaaagctgatgagatgaatgagcttatcttagtgcttgatgaagcgcatatgtatagaggagcagggggagcagaggtagcccttttaatacgtcgcctctgtgctcggttggatattccccgggaacgtatgcgctgcatccttaccagtgctagtctagggtccattgaggatggagaacgttttgcccaagacttaactggcttatcaccaacctcttcgaggaaatttcgaattattgagggtacaagggaatcgcgtcctgagtcacaaattgttaccagtaaagaagctaatgcactggctgaattcgacctaaattcatttcagtgcgtagctgaggatcttgaatctgcatatgcagcaatagagtctcttgccgaacgaatgggctggcaaaagccgatgataaaagatcatagtacactacgtaattggttatttgataatttgactggttttggtcctattgaaacgcttattgaaatagtttcaggtaaagcggttaagctaaatatcttgagtgaaaacctttttccagactctccacagcaaattgcagagcgagcgacagatgcattactcgcattgggttgctatgctcagagggcatccgatggcagagtgcttattccaactcgcatgcatcttttttatcggggattaccaggtctttatgcctgtatagatcccgattgtaatcaacgtttgggtaaccatagtgggccaactatacttggccgcctttatacgaaaccactggatcaatgtaaatgcgcttcaaaagggcgagtctacgaattatttacccaccgtgactgcggtgcggcttttattcgtggatacgttagttccgaaatggactttgtatggcaccagccgaacggaccattatcagaagatgaggatatcgatcttgttcccatagatatattggtcgaggaaacacctcatgtacatagtgattaccaggacagatggctacatatagcaacaggacgcctttctaaacagtgtcaagatgaggattctggttatcgtaaagtctttatacctgaccgagttaagtctggatctgaaattacatttgatgaatgccctgtttgtatgcgtaagacaagaagtgctcagaatgaaccgtctaaaattatggatcatgttacaaaaggggaagcaccttttacaacgttagtacgtacacagatatctcaccagccagcgagtcgtcctattgatggtaaacatcccaatgggggaaaaaaagtacttattttttctgatggccgacaaaaagcagctcggcttgcacgtgatattcctagagatattgagcttgatttgtttcggcaatccattgctctcgcctgttctaaactgaaagatatcaatcgggaacccaaaccaacatcagtactttaccttgctttcctatcagtcctttctgaacatgacttgcttatttttgatggggaagattcacgaaaagttgtaatggcccgtgatgaattttatcgtgattataatagcgatctggctcaagcttttgatgataacttcagtccccaagagtcaccgtcacgatataaaatagcgttgcttaaacttttatgtagcaattactattctctttccggaacaacagttggttttgttgaaccatcgcagcttaaatcaaaaaaaatgtgggaagatgtgcagtccaagaagctcaatattgagagcaaggatgttcatgctttagctgttgcttggattgataccttactcactgaatttgcttttgatgaatctattgattcgacactacgaatcaaagccgctggattctacaaacccacttggggtagtcaaggacggtttggaaaagctcttaggaaaaccctgatacagcatcctgctatgggggagctttatgtggaagttttggaggagatttttcgtactcatctgacattaggaaaagatggtgtctactttcttgctccaaatgcactacgtctgaaaatagatctcttgcatgtctggaaacaatgtaatgactgcacggcactaatgccatttgctttagaacattctacttgccttgcttgtggtagtaacagtgtcaaaacagtcgagccgtcggaaagcagctatattaatgcacgaaaaggattctggcgttcgccggtagaagaagttttggtttcaaattcgcggcttctaaaccttagcgttgaagagcatactgctcaactctcacatagagatagggccagcgttcatgccactacagaactctacgaactgagattccaagatgttcttattaatgataacgacaagcccattgatgtacttagttgtacgacgacgatggaagtgggggttgatattggatctctggttgctgttgctttaagaaacgtccctccgcaacgagaaaattatcagcaacgtgctgggcgagcaggccgccgtggcgcatctgtttcaacggtggttacatattctcaaaatggccctcatgatagttattatttccttaatcctgaacgcattgttgcaggttctcctcgtacacctgaagtgaaagtaaataatcccaaaatagccagaagacacgttcattcttttttagttcagaccttttttcacgagttaatggaacaaggaatttataatcccacagagaaaactgccatacttgagaaagcacttggtactacacgagatttttttcatggagcaaaagatactggcctaaatctcgatagctttaataattgggttaaaaaccgtattctatctactaatggtgatttgagaacaagtgttgcagcatggcttcctcctgttcttgaaactggagggctttctgccagtgactggtttgctaaggtagcagaggaatttttaaatacactccatgggctggctgaaattgttccacaaattgccgctcttgttgatgaggaaaatgaagatgatgagcagacttctggtggaatgaaatttgcacaagaagaattacttgagttcctgttttaccatggtttattaccaagttatgcatttcctacaagcctctgtagtttcttggtagaaaaaattgtaaagaatattagaggttcttttgaggtgcgaacagtacaacagcctcagcaatcaatttctcaggctctgagtgaatatgccccgggacgtttgattgttattgataggaaaacctatcgctctggtggtgttttttctaatgcattgaaaggcgaactaaaccgggcaagaaagcttttcaataatcccaaaaagtttattcattgcgataagtgctcttttgtccgcgatcctcataataatcagaatagcgaaaatacttgtccgatctgtggtggcattctaaaagtagaaataatgattcagcccgaagtctttggacctgaaaatgccaaggaacttaatgaggacgacagagagcaagaaatcacctatgtaactgcggcacaatatccacaacctgttgatcctgaagattttaagttcaataatggaggtgctcatattgtttttactcacgcaatagatcagaaactggtgacggtgaaccgagggaaaaatgagggggggtccagtggtttttcagtatgttgcgaatgtggtgcggcctccgtttatgattcctactcaccggcaaagggggcacatgaaagaccgtataaatatatagcaactaaggaaacgcctcgcttatgctctggcgagtataaacgcgtttttctcggacatgatttccgtactgatttgcttttattacgaataaccgttgggtctccgcttgtaactgatacttcaaatgctatcgttttacggatgtatgaagatgcattatatacaatagcggaagcactaaggcttgcagctagtcgccataaacaactggatcttgatcctgctgagtttggctctggtttcagaattttacccactatagaggaagatactcaggcattggatctcttcctttatgatactttatctggcggtgcgggttatgcggaagtagcagcagcgaatctagatgacattcttactgcaacactcgcattgttagaaggttgtgagtgcgatacctcctgtacagattgtctcaatcatttccacaaccagcatatacaaagccgtctcgataggaaactaggtgcatctttacttcgttatgctctatacggaatggttcctcgttgtgcttcacctgatattcaggtagaaaaattgtctcaattgagggcaagtctggaattggatggttttcaatgcctaattaagggaactcaggaggcacctatgattgtgagtttgaatgaccgttctgttgcagtgggaagttaccctggtcttattgatcgacccgactttcaacacgacgtatataagtcaaagaatactaatgctcatatagcctttaatgaatatcttcttcgttcaaatctgccacaagcgcatcaaaatattagaaaattgttgcgctga

SEQ ID NO: 27305 - DNA, 1215 bp, Escherichia coli; identical to SEQ ID NO: 27281

SEQ ID NO: 27306 - DNA, 1647 bp, Escherichia coli; identical to SEQ ID NO: 27282

SEQ ID NO: 27307 - DNA, 1884 bp, Escherichia coli
atgagttaccaatatagccaagaggcaaaggaacggctctctaagttgggacaatccgaaattgttaactttatcaatgagatttctccaactttacgacgtaaagcttttggttgtttaccaaaagtaccgggattcagggcaggacatcccactgaaattaaagaaaaacagaaaagattgattgggtatatgttccagtcacatccttcctctgaggagagaaaagcatggaaaagtttttctcttttttggcagttttgggctgaagagaaaattgacaaatcatttagtatgattaataatttaggattaaaagaaaactctggctctatttttattagagagcttgctaaaaactttcctaaagttgctagagagaatatcgagcgcctgtttatctttagtgggtttgctaatgatccagacgttataaatgcatttaacctttttcctcctgcagttgttcttgcccgcgatatcgtggttgatactcttccaattcgtttagatgagcttgaagcacgtattagtttaattgccgataatgtggagaaaaaaaataaccatattaaagagcttgagttaaaaatagatgctttttccgaacggtttgataattactttaataatgaaaagagcaatttaaaaataattaacgaactacaatccttaataaactcagagactaaacaatctgatattgctaataaatctattgacgagctttatcattttaatgaaaaaaacaaacagctaatattatctcttcaagagaaattagattttaatgctctggctatgaatgacatttctgagcatgaaaaattgataaaaagtatggctaatgaaatttcagagttaaaaaatgcattaactatcttgtgtgataataaaagaaagaacaacgagttagattatatcaatgaattaaaaaaactcactgaacgaatagatacactggaaataaacacatctcaagctagcaaagtgagtgtcaccaatagatttacaaaattccatgaaatagcgcactatgaaaattatgaatatctttcatcctccgaagacatatctaatagaatttctttaaatttacaggctgttgggttaacaaaaaattcagcagaaacattggctagattgacattagctaccttcgtttctggacaaatcattcaattcagtggctctttggcagatattatcgcggatgcaattgccattgctattggtgcaccacgttatcacatatggagagttccagttggtattatttctgacatggattcttttgattttatagagactatagctgaatcatctcgctgtctccttttgaaaggggccaatctttcagcatttgagatttatggagcggcaattagagatatagttgttcaacggcaaatacatccaacaaattatgaccatctggcattgatagctacttggaaacaaggccctgctacattccctgatggaggaatgttggccgagttgggaccagttattgatactgatacattaaaaatgcgtggtttatctgctattttaccccaattgaaaccaggttgtcttgccaaggataaatggacaaatattgatggactacagcttgatagtgttgatgattatgtagatgaattaagagcattactggacgaagctggatttgatgggggaactttgtggaagagaatggttcatattttctatacttcactcataagagtccctaatggaaattatatttatgatctttattctgtcttgtctttttatactcttacatgggcaaaaattaaaggtggccccgtccaaaagatagaagatattgccaatcgtgaattaaaaaattatagtgcaaaaatatcttcttga

SEQ ID NO: 27308 - DNA, 1044 bp, Escherichia coli
atggagtggagagcagtatcacgagacaaagcactggatatgttatcaactgcattaaattgtcgatttgatgatgaagggttaagaatttcagcagtttcagaatgcttaaggagcgtattatatcaatattctatatctgaaacagaagaagctaggcaaactgtaacctcgcttcgactcactagtgcagtaaggcgaaaattggtacctttatggccagacattgctgatattgataatgctatacatccgggcattatgtctatattgaacagcttggctgaattgggtgacatgattaagttagaaggtggtaattggctcacagctcccccacatgcagtacgaattgacaataagatggctgttttttttggtggagagccttcctgtacattttcaacgggcgtggtagctaaatctgctggaagagttcgcttggttgaagaaaaagtgtgtactggaagtgttgaaatctgggatgcaaatgagtggattggtgccccagcagaaggcaatgaagaatggtcatccagactactatctggaactatttccggctttatcgatgcgcctagcaatatgagtgaaacgactgcatatgtgcggggaaaatggctccatttgtcagaactttcttttaataaaaagcaaatctacttatgcagaatgtccgttgataatcacttttcctattatttaggagaaattgaagctggacgcttatgtagaatgaattcgttagaatcgtctgatgatgtcagaagattacgtttttttctcgatacaaaagataattgtccgctaaagatccgtatcaaaatatctaatgggctagcaagattaagattaaccagaagattaccaagacgagaaacgaaggtactcctgctaggctggagagaatcaggttttgaaaatgaacattcaggaataacacaccatgtattccccgaggaaatattacccatagtgcgtagcgcttttgaagggcttggtattatttggattaacgaattcacgcgacggaatgaaatatga

SEQ ID NO: 27309 - DNA, 5511 bp, Escherichia coli; identical to SEQ ID NO: 27285

SEQ ID NO: 27310 - DNA, 1215 bp, Escherichia coli; identical to SEQ ID NO: 27268

SEQ ID NO: 27311 - DNA, 1647 bp, Escherichia coli; identical to SEQ ID NO: 27269

SEQ ID NO: 27312 - DNA, 1884 bp, Escherichia coli; identical to SEQ ID NO: 27270

SEQ ID NO: 27313 - DNA, 1044 bp, Escherichia coli; identical to SEQ ID NO: 27271

SEQ ID NO: 27314 - DNA, 5511 bp, Escherichia coli
atgattaataaaaataaagtaactgaacgttcaggtatacatgataccgtgaaaagccttagtgaaaatctgagaaaatacattgaggcacaatatcatatccgggatgaagggttaattgctgagcgacgagcgcttttacagcaaaatgaaactattgctcaagctccttatatagaagcaaccccaatttatgaacctggtgcgccatacagtgaattgcctattcccgaagcagcaagtaatgtgctaactcaactatcagaacttggaattggcctctatcaacgcccctataaacaccaatcacaggcacttgagtcatttcttggcgaaaacgcttctgatctggtcattgcaacaggtacaggctccggtaagactgaaagctttctaatgccaattattggaaaattggcgattgaatcttccgagagacctaaatctgcatcccttccaggttgtagagcaattttattatatccaatgaatgcattagttaacgatcaacttgctcgtatcagacgtctttttggtgattctgaagcctctaaaatactgagatctggaagatgtgcccctgtacgctttggcgcttatacgggaagaacgccttaccctggtcgtcgtagctctagacgagacgagctttttatcaaaccccttttcgatgagttttacaataaactcgcaaataacgcccccgtacgtgcggaactgaaccgcattggtcgctggccaagtaaagatcttgatgctttttatgggcaaagcgcatctcaggctaaaacctacgtctcaggcaaaaaaacgggtaagcaatttgttttgaacaattggggggagaggctaattacccagcctgaggatcgtgagctaatgacccggcatgaaatacagaatcgctgtccagaattactgataacgaactactccatgcttgagtatatgctgatgcgacctatcgagcgtaatatttttgagcagactaaggaatggctcaaagctgatgagatgaatgagcttatcttagtgcttgatgaagcgcatatgtatagaggagcagggggagcagaggtagcccttttaatacgtcgcctctgtgctcggttggatattccccgggaacgtatgcgctgcatccttaccagtgctagtctagggtccattgaggatggagaacgttttgcccaagacttaactggcttatcaccaacctcttcgaggaaatttcgaattattgagggtacaagggaatcgcgtcctgagtcacaaattgttaccagtaaagaagctaatgcactagctgaattcgacctaaattcatttcagtgcgtagctgaggatcttgaatctgcatatgcagcaatagagtctcttgccgaacgaatgggctggcaaaagccgatgataaaagatcatagtacactacgtaattggttatttgataatttgactggttttggtcctattgaaacgcttattgaaatagtttcaggtaaagcggttaagctaaatatcttgagtgaaaacctttttccagactctccacagcaaatcgcagagcgagcaacagatgcattactcgcattgggttgctatgctcagagggcatccgatggcagagtgcttattccaactcgcatgcatcttttttatcggggattaccaggtctttatgcctgtatagatcccgattgtaatcaacgtttgggtaaccatagcgggccaactatacttggccgcctttatacgaaaccactggatcaatgtaaatgcgcttcaaaagggcgagtctacgaattatttacccaccgtgactgcggtgcggcttttattcgtggatacgttagttccgaaatggactttgtatggcaccagccgaacggaccattatcagaagatgaggatatcgatcttgttcccatagatatattggtcgaggaaacacctcatgtacatagtgattaccaggacagatggctacatatagcaacaggacgcctttctaaacagtgtcaagatgaggattctggttatcgtaaagtctttatacctgaccgagttaagtctggatcagaaattacatttgatgaatgccctgtttgtatgcgtaagacaagaagtgctcagaatgaaccgtctaaaattatggatcatgttacaaaaggggaagcaccttttacaacgttagtacgtacacagatatctcaccagccagcgagtcgtcctattgatggtaaacatcccaatgggggaaaaaaagtacttattttttctgatggccgacaaaaagcagctcggcttgcacgtgatattcctagagatattgagcttgatttgtttcggcaatccattgctctcgcctgttctaaactgaaagatatcaatcgggaacccaaaccaacatcagtactttaccttgctttcctatcagtcctttctgaacatgacttgcttatttttgatggggaagattcacgaaaagttgtaatggcccgtgatgaattttatcgtgattataatagcgatctggctcaagcttttgatgatagcttcagcccccaagagtcaccgtcacgatataaaatagcgttgcttaaacttttatgtagcaattactattctctttccggaacaacagttggttttgttgaaccatcgcagcttaaatcaaaaaaaatgtgggaagatgtgcagtccaagaagctcaatattgagagcaaggatgttcatgctttagctgttgcttggattgataccttactcactgaatttgcttttgatgaatctattgattcgacactacgaatcaaagcagctggattctacaaacccacttggggtagtcaaggacggtttggaaaagctcttaggaaaaccctgatacagtatcctgctatgggggagctttatgtggaagttttggaggagatttttcgtactcatctgacattaggaaaagatggtgtctactttcttgctccaaatgcactacgtctgaaaatagatctcttgcatgtctggaaacaatgtaatgactgcacggcactaatgccatttgctttagaacattctacttgccttgcttgtggtagtaacagtgtcaaaacagtcgagccgtcggaaagcagctatattaatgcacgaaaaggattctggcgttcgccggtagaagaagttttggtttcaaattctcggcttctaaaccttagcgttgaagagcatactgctcaactctcacatagagatagggccagcgttcatgccactacagaactctacgaactgagattccaagatgttcttattaatgataacgacaagcccattgatgtacttagttgtacgacgacgatggaagtgggggttgatattggatctctggttgctgttgctttaagaaacgtccctccgcaacgagaaaattatcagcaacgtgctgggcgagcaggccgccgtggcgcatctgtttcaacggtggttacatattctcaaaatggccctcatgatagttattatttccttaatcctgaacgcattgttgcaggttctcctcgtacacctgaagtgaaagtaaataatcccaaaatagccagaagacacgttcattcttttttagttcagaccttttttcacgagttaatggaacaaggaatttataatcccgcagagaaaactgccatacttgagaaagcacttggtactacacgagatttttttcatggagcaaaagatactggcctaaatctcgatagctttaataattgggttaaaaaccgtattctatctactaatggtgatttgagaacaagtgttgcagcatggcttcctcctgttcttgaaactggagggctttctgccagtgactggtttgctaaggtagcagaggaatttttaaatacactccatgggctggctgaaattgttccacaaactgccgttcttgttgatgaggaaaatgaagatgatgagcagacttctggtggaatgaaatttgcacaagaagaattacttgagttcctgttttaccatggtttattaccaagttatgcatttcctacaagcctctgtagtttcttggtagaaaaaattgtaaagaatattagaggttcttttgaggtgcgaacagtacaacagcctcagcaatcaatttctcaggctctgagtgaatatgccccgggacgtttgattgttattgataggaaaacctatcgctctggtggtgttttttctaatgcattgaaaggcgaactaaaccgggcaagaaagcttttcaataatcccaaaaagtttattcattgcgataagtgctcttttgtccgcgatcctcataataatcagaatagcgaaaatacttgtccgatctgtggtggcattctaaaagtagaaataatgattcagcccgaagtctttggacctgaaaatgccaaggaacttaatgaggacgacagagagcaagaaatcacctatgtaacagcggcacaatatccacaacctgttgatcctgaagattttaagttcaataatggaggtgctcatattgtttttactcacgcaatagatcagaaactggtgacggtgaaccgagggaaaaatgagggggagtccagtggtttttcagtatgttgcgaatgtggtgcggcctccgtttatgattcctactcaccggcaaagggggcacatgaaagaccgtataaatatatagcaactaaggaaacgcctcgcttatgctctggcgagtataaacgcgtttttctcggacatgatttccgtactgatttgcttttattacgaataaccgttgggtctccgcttgtaactgatacttcaaatgctatcgttttacggatgtatgaagatgcattatatacaatagcggaagcactaaggcttgcagctagtcgccataaacaactggatcttgatcctgctgagtttggctctggtttcagaattttacccactatagaggaagatactcaggcattggatctcttcctttatgatactttatccggcggtgcgggttatgcggaagtagcagcagcgaatctagatgacattcttactgcaacactcgcattgttagaaagctgtgagtgcgatacctcctgtacagattgtctcaatcatttccacaaccagcatatacaaagccgtctcgataggaaactaggtgcatctttacttcgttatgcactatacggaatggttcctcgttgtgcttcacctgatattcaggtagaaaaattgtctcaattgagggcaagtctggaattggatggttttcaatgcataattaagggaactcaggaggcacctatgattgtgagtttgaatgaccgttctattgcagtgggaagttatcctggtcttattgatcgacccgactttcaacacgacgtatataagtcaaagcatactaatgctcatatagcctttaatgaatatcttcttcgttcaaatctgccacaatcgcatcaaaatattagaaaaatgttgcgctga

SEQ ID NO: 27315 - DNA, 1215 bp, Escherichia coli 97.0264; identical to SEQ ID NO: 27268

SEQ ID NO: 27316 - DNA, 1647 bp, Escherichia coli 97.0264; identical to SEQ ID NO: 27269

SEQ ID NO: 27317 - DNA, 1884 bp, Escherichia coli 97.0264
atgagttaccaatatagccaagaggcaaaggaacggatctctaagttgggacaatccgaaattgttaactttatcaatgagatttctccaactttacgacgtaaagcttttggttgtttaccaaaagtaccgggattcagggcaggacatcccactgaaattaaagaaaaacagaaaagattgattgggtatatgttccagtcacatccttcctctgaggagagaaaagcatggaaaagtttttctcttttttggcagttttgggctgaagagaaaattgacaaatcatttagtatgattgataatttaggattaaaagaaaactctggctctatttttattagagagcttgctaaaaactttcctaaagttgctagagagaatatcgagcgcctgtttatctttagtgggtttgctgatgatccagacgttataaatgcatttaacctttttcctcctgcagttgttcttgcccgcgatatcgtgattgatactcttccaattcgtttagatgagcttgaagcacgtattagtttaattgccgataatgttgagaaaaaaaataatcatattaaagaacttgagttaaaaatagatgctttttccgaacagtttgataattactttaataatgaaaagagcagtttaaaaataattaatgaactacaatctttgataaactcagagactaaacaatctgatattgctaataaagctattgacgagctttatcattttaatgaaaaaaacaaacagctaatattatctcttcaagaaaaattagattttaatgctctggctatgaatgatatttctgagcatgaaaaattgataaaaagtatggctaatgacatttcagaatttaaaaatgcattaacgatcttgtgtgataataaaataaagaataacgagttagattatgtcaatgaattaaaaaaaatcactgaacgaatagatacacttgaaataaacacatctcaagctagcgaagtgagtgtcaccaatagatttacaaaattccatgaaatagcgcactatgaaaattatgagtatctttcatcctccgaagacatatctaatagaatttctttaaatttacaggctgttggattgacaaaaaattcagcagaaaaattggctagattgacattagctaccttcgtttctggacaaatcattcaattcagtggctctttggcagatattatcgcggatgcaattgccattgctattggtgcaccacgttatcacatatggagagttccagttggtattatttctgacatggatgcttttgattttatagagactatagctgaatcatctcgctgtctccttttgaaaggggccaatctttcagcatttgagatttatggagcggcaattagagatatagttgttcaacggcaaatacatccaacaaattatgaccatctggcattgatagctacctggaaacaaggcccagctacattccctgatggaggaatgttggccgagttgggacctgttattgatactgatacattaaaaatgcgtggtttatcagctactttaccccaattgaaaccaggttgtcttgccaaggataaatggacaaatattgatggactacatcttgatagtgttgatgattatgtagatgaattaagagcattactggacgaagctggatttgatgggggaactttgtggaagagaatgattcatattttctatacttcactcataaggatccctaatggaaattatatttatgatctttattctgtcttgtctttttatactcttacatgggcaaaaattaaaggtggccccgtccaaaagatagaagatattgccaatcgtgaattaaaaaattatagtgcaaaaatatcttcttga

SEQ ID NO: 27318 - DNA, 1044 bp, Escherichia coli 97.0264
atggagtggagagcagtatcacgagacaaagcactggatatgttatcaactgcattaaattgtcgatttgatgatgaagggttgagaatttcagcagtttcagaatgcttaaggagcgtattatatcaatattctatatctgaaacagaagaagctaggcaaactgtaacctcgcttcgactcactagtgcagtaaggcgaaaattggtacctttatggccagacattgctgatattgataatgctatacatccaggcattatgtctatattgaacagcttggctgaattgggtgacatgattaagttagaaggtggtaattggctaacagctcccccacatgcagtacgaattgacaataagatggctgttttttttggtggagagccttcctgtacattttcaacgggcgtggtagctaaatctgctggaagagttcgcttggttgaagaaaaagtgtgtactggaagtgttgaaatctgggatgcaaatgagtggattggtgccccagcagaaggcaatgaagaatggtcatccagactactatctggaactatttccggctttatcgatgcacctggcaatatgagtgaaacgactgcatatgtgcggggaaaatggctccatttgtcagaactttcttttaataaaaagcaaatctacttatgcagaatgtccgttgataatcacttttcctattatttaggagaaattgaagctggacgcttatgtagaatgaattcgttagaatcgtctgatgatgtcagaagattacgtttttttctcgatacaaaagataattgtccgctaaaggtccgtatcaaaatatctaatgggctagcaagattaagattaaccagaagattaccaagacgagaaacgaaggtactcctgctaggctggagagaatcaggttttgaaaatgaacattcaggaataacacaccatgtattccccgaggaaatattacccatagtgcgtagcgcttttgaagggcttggtattatttggattaacgaattcacgcgacggaatgaaatatga

SEQ ID NO: 27319 - DNA, 5511 bp, Escherichia coli 97.0264
atgattaataaaaataaagtaactgaacgttcaggtatacatgataccgtgaaaagccttagtgaaaatctgagaaaatacattgaggcacaatatcatatccgggatgaagggttaattgctgagcgacgagcgcttttacagcaaaatgaaactattgctcaagctccttatatagaagcaaccccaatttatgaacctggtgcgccatacagtgaattgcctattcccgaagcagcaagtaatgtgctaactcaactatcagaacttggaattggcctctatcaacgcccctataaacaccaatcacaggcacttgagtcatttcttggcgaaaacgcttctgatctggtcattgcaacaggtacaggctccggtaagactgaaagctttctaatgccaattattggaaaattggcgattgaatcttccgagagacctaaatctgcatcccttccaggttgtagagcaattttattatatccaatgaatgcattagttaacgatcaacttgctcgtatcagacgtctttttggtgattctgaagcctctaaaatactgagatctggaagatgtgcccctgtacgctttggcgcttatacgggaagaacgccttaccctggtcgtcgtagctctagacgagacgagctttttatcaaaccccttttcgatgagttttacaataaactcgcaaataacgcccccgtacgtgcggaactgaaccgcattggtcgctggccaagtaaagatcttgatgctttttatgggcaaagcgcatctcaggctaaaacctacgtctcaggcaaaaaaacgggtaagcaatttgttttgaacaattggggggagaggctaattacccagcctgaggatcgtgagctaatgacccggcatgaaatacagaatcgctgtccagaattactgataacgaactactccatgcttgagtatatgctgatgcgacctatcgagcgtaatatttttgagcagactaaggaatggctcaaagctgatgagatgaatgagcttatcttagtgcttgatgaagcgcatatgtatagaggagcagggggagcagaggtagcccttttaatacgtcgcctctgtgctcggttggatattccccgggaacgtatgcgctgcatccttaccagtgctagtctagggtccattgaggatggagaacgttttgcccaagacttaactggcttatcaccaacctcttcgaggaaatttcgaattattgagggtacaagggaatcgcgtcctgagtcacaaattgttaccagtaaagaagctaatgcactggctgaattcgacctaaattcatttcagtgcgtagctgaggatcttgaatctgcatatgcagcaatagagtctcttgccgaacgaatgggctggcaaaagccgatgataaaagatcatagtacactacgtaattggttatttgataatttgactggttttggtcctattgaaacgcttattgaaatagtttcaggtaaagcggttaagctaaatatcttgagtgaaaacctttttccagactctccacagcaaatcgcagagcgagcaacagatgcattactcgcattgggttgctatgctcagagggcatccgatggcagagtgcttattccaactcgcatgcatcttttttatcggggattaccaggtctttatgcctgtatagatcccgattgtaatcaacgtttgggtaaccatagcgggccaactatacttggccgcctttatacgaaaccactggatcaatgtaaatgcgcttcaaaagggcgagtctacgaattatttacccaccgtgactgcggtgcggcttttattcgtggatacgttagttccgaaatggactttgtatggcaccagccgaacggaccattatcagaagatgaggatatcgatcttgttcccatagatatattggtcgaggaaacacctcatgtacatagtgattaccaggacagatggctacatatagcaacaggacgcctttctaaacagtgtcaagatgaggattctggttatcgtaaagtctttatacctgaccgagttaagtctggatcagaaattacatttgatgaatgccctgtttgtatgcgtaagacaagaagtgctcagaatgaaccgtctaaaattatggatcatgttacaaaaggggaagcaccttttacaacgttagtacgtacacagatatctcaccagccagcgagtcgtcctattgatggtaaacatcccaatgggggaaaaaaagtacttattttttctgatggccgacaaaaagcagctcggcttgcacgtgatattcctagagatattgagcttgatttgtttcggcaatccattgctctcgcctgttctaaactgaaagatatcaatcgggaacccaaaccaacatcagtactttaccttgctttcctatcagtcctttctgaacatgacttgcttatttttgatggggaagattcacgaaaagttgtaatggcccgtgatgaattttatcgtgattataatagcgatctggctcaagcttttgatgatagcttcagcccccaagagtcaccgtcacgatataaaatagcgttgcttaaacttttatgtagcaattactattctctttccggaacaacagttggttttgttgaaccatcgcagcttaaatcaaaaaaaatgtgggaagatgtgcagtccaagaagctcaatattgagagcaaggatgttcatgctttagctgttgcttggattgataccttactcactgaatttgcttttgatgaatctattgattcgacactacgaatcaaagcagctggattctacaaacccacttggggtagtcaaggacggtttggaaaagctcttaggaaaaccctgatacagtatcctgctatgggggagctttatgtggaagttttggaggagatttttcgtactcatctgacattaggaaaagatggtgtctactttcttgctccaaatgcactacgtctgaaaatagatctcttgcatgtctggaaacaatgtaatgactgcacggcactaatgccatttgctttagaacattctacttgccttgcttgtggtagtaacagtgtcaaaacagtcgagccgtcggaaagcagctatattaatgcacgaaaaggattctggcgttcgccggtagaagaagttttggtttcaaattcgcggcttctaaaccttagcgttgaagagcatactgctcaactctcacatagagatagggccagcgttcatgccactacagaactctacgaactgagattccaagatgttcttattaatgataacgacaagcccattgatgtacttagttgtacgacgacgatggaagtgggggttgatattggatctctggttgctgttgctttaagaaacgtccctccgcaacgagaaaattatcagcaacgtgctgggcgagcaggccgccgtggcgcatctgtttcaacggtggttacatattctcaaaatggccctcatgatagttattatttccttaatcctgaacgcattgttgcaggttctcctcgtacacctgaagtgaaagtaaataatcccaaaatagccagaagacacgttcattcttttttagttcagaccttttttcacgagttaatggaacaaggaatttataatcccgcagagaaaactgccatacttgagaaagcacttggtactacacgagatttttttcatggagcaaaagatactggcctaaatctcgatagctttaataattgggttaaaaaccgtattctatctactaatggtgatttgagaacaagtgttgcagcatggcttcctcctgttcttgaaactggagggctttctgccagtgactggtttgctaaggtagcagaggaatttttaaatacactccatgggctggctgaaattgttccacaaactgccgttcttgttgatgaggaaaatgaagatgatgagcagacttctggtggaatgaaatttgcacaagaagaattacttgagttcctgttttaccatggtttattaccaagttatgcatttcctacaagcctctgtagtttcttggtagaaaaaattgtaaagaatattagaggttcttttgaggtgcgaacagtacaacagcctcagcaatcaatttctcaggctctgagtgaatatgccccgggacgtttgattgttattgataggaaaacctatcgctctggtggtgttttttctaatgcattgaaaggcgaactaaaccgggcaagaaagcttttcaataatcccaaaaagtttattcattgcgataagtgctcttttgtccgcgatcctcataataatcagaatagcgaaaatacttgtccgatctgtggtggcattctaaaagtagaaataatgattcagcccgaagtctttggacctgaaaatgccaaggaacttaatgaggacgacagagagcaagaaatcacctatgtaacagcggcacaatatccacaacctgttgatcctgaagattttaagttcaataatggaggtgctcatattgtttttactcacgcaatagatcagaaactggtgacggtgaaccgagggaaaaatgagggggagtccagtggtttttcagtatgttgcgaatgtggtgcggcctccgtttatgattcctactcaccggcaaagggggcacatgaaagaccgtataaatatatagcaactaaggaaacgcctcgcttatgctctggcgagtataaacgcgtttttctcggacatgatttccgtactgatttgcttttattacgaataaccgttgggtctccgcttgtaactgatacttcaaatgctatcgttttacggatgtatgaagatgcattatatacaatagcggaagcactaaggcttgcagctagtcgccataaacaactggatcttgatcctgctgagtttggctctggtttcagaattttacccactatagaggaagatactcaggcattggatctcttcctttatgatactttatccggcggtgcgggttatgcggaagtagcagcagcgaatctagatgacattcttactgcaacactcgcattgttagaaagctgtgagtgcgatacctcctgtacagattgtctcaatcatttccacaaccagcatatacaaagccgtctcgataggaaactaggtgcatctttacttcgttatgcactatacggaatggttcctcgttgtgcttcacctgatattcaggtagaaaaattgtctcaattgagggcaagtctggaattggatggttttcaatgcataattaagggaactcaggaggcacctatgattgtgagtttgaatgaccgttctattgcagtgggaagttatcctggtcttattgatcgacccgactttcaacacgacgtatataagtcaaagcatactaatgctcatatagcctttaatgaatatcttcttcgttcaaatctgccacaatcgcatcaaaatattagaaaaatgttgcgctga

SEQ ID NO: 27320 - DNA, 1215 bp, Escherichia coli HVH 153 (3-9344314); identical to SEQ ID NO: 27268

SEQ ID NO: 27321 - DNA, 1647 bp, Escherichia coli HVH 153 (3-9344314); identical to SEQ ID NO: 27269

SEQ ID NO: 27322 - DNA, 1884 bp, Escherichia coli HVH 153 (3-9344314); identical to SEQ ID NO: 27270

SEQ ID NO: 27323 - DNA, 1044 bp, Escherichia coli HVH 153 (3-9344314); identical to SEQ ID NO: 27271

SEQ ID NO: 27324 - DNA, 5511 bp, Escherichia coli HVH 153 (3-9344314)
atgattaataaaaataaagtaactgaacgttcaggtatacatgataccgtgaaaagccttagtgaaaatctgagaaaatacattgaggcacaatatcatatccgggatgaagggttaattgctgagcgacgagcgcttttacagcaaaatgaaactattgctcaagctccttatatagaagcaaccccaatttatgaacctggtgcgccatacagtgaattgcctattcccgaagcagcaagtaatgtgctaactcaactatcagaacttggaattggcctctatcaacgcccctataaacaccaatcacaggcacttgagtcatttcttggcgaaaacgcttctgatctggtcattgcaacaggtacaggctccggtaagactgaaagctttctaatgccaattattggaaaattggcgattgaatcttccgagagacctaaatctgcatcccttccaggttgtagagcaattttattatatccaatgaatgcattagttaacgatcaacttgctcgtatcagacgtctttttggtgattctgaagcctctaaaatactgagatctggaagatgtgcccctgtacgctttggcgcttatacgggaagaacgccttaccctggtcgtcgtagctctagacgagacgagctttttatcaaaccccttttcgatgagttttacaataaactcgcaaataacgcccccgtacgtgcggaactgaaccgcattggtcgctggccaagtaaagatcttgatgctttttatgggcaaagcgcatctcaggctaaaacctacgtctcaggcaaaaaaacgggtaagcaatttgttttgaacaattggggggagaggctaattacccagcctgaggatcgtgagctaatgacccggcatgaaatacagaatcgctgtccagaattactgataacgaactactccatgcttgagtatatgctgatgcgacctatcgagcgtaatatttttgagcagactaaggaatggctcaaagctgatgagatgaatgagcttatcttagtgcttgatgaagcgcatatgtatagaggagcagggggagcagaggtagcccttttaatacgtcgcctctgtgctcggttggatattccccgggaacgtatgcgctgcatccttaccagtgctagtctagggtccattgaggatggagaacgttttgcccaagacttaactggcttatcaccaacctcttcgaggaaatttcgaattattgagggtacaagggaatcgcgtcctgagtcacaaattgttaccagtaaagaagctaatgcactggctgaattcgacctaaattcatttcagtgcgtagctgaggatcttgaatctgcatatgcagcaatagagtctcttgccgaacgaatgggctggcaaaagccgatgataaaagatcatagtacactacgtaattggttatttgataatttgactggttttggtcctattgaaacgcttattgaaatagtttcaggtaaagcggttaagctaaatatcttgagtgaaaacctttttccagactctccacagcaaatcgcagagcgagcaacagatgcattactcgcattgggttgctatgctcagagggcatccgatggcagagtgcttattccaactcgcatgcatcttttttatcggggattaccaggtctttatgcctgtatagatcccgattgtaatcaacgtttgggtaaccatagcgggccaactatacttggccgcctttatacgaaaccactggatcaatgtaaatgcgcttcaaaagggcgagtctacgaattatttacccaccgtgactgcggtgcggcttttattcgtggatacgttagttccgaaatggactttgtatggcaccagccgaacggaccattatcagaagatgaggatatcgatcttgttcccatagatatattggtcgaggaaacacctcatgtacatagtgattaccaggacagatggctacatatagcaacaggacgcctttctaaacagtgtcaagatgaggattctggttatcgtaaagtctttatacctgaccgagttaagtctggatcagaaattacatttgatgaatgccctgtttgtatgcgtaagacaagaagtgctcagaatgaaccgtctaaaattatggatcatgttacaaaaggggaagcaccttttacaacgttagtacgtacacagatatctcaccagccagcgagtcgtcctattgatggtaaacatcccaatgggggaaaaaaagtacttattttttctgatggccgacaaaaagcagctcggcttgcacgtgatattcctagagatattgagcttgatttgtttcggcaatccattgctctcgcctgttctaaactgaaagatatcaatcgggaacccaaaccaacatcagtactttaccttgctttcctatcagtcctttctgaacatgacttgcttatttttgatggggaagattcacgaaaagttgtaatggcccgtgatgaattttatcgtgattataatagcgatctggctcaagcttttgatgatagcttcagcccccaagagtcaccgtcacgatataaaatagcgttgcttaaacttttatgtagcaattactattctctttctggaacaacagttggttttgttgaaccatcgcagcttaaatcaaaaaaaatgtgggaagatgtgcagtccaagaagctcaatattgagagcaaggatgttcatgctttagctgttgcttggattgataccttactcactgaatttgcttttgatgaatctattgattcgacactacgaatcaaagcagctggattctacaaacccacttggggtagtcaaggacggtttggaaaagctcttaggaaaaccctgatacagtatcctgctatgggggagctttatgtggaagttttggaggagatttttcgtactcatctgacattaggaaaagatggtgtctactttcttgctccaaatgcactacgtctgaaaatagatctcttgcatgtctggaaacaatgtaatgactgcacggcactaatgccatttgctttagaacattctacttgccttgcttgtggtagtaacagtgtcaaaacagtcgagccgtcggaaagcagctatattaatgcacgaaaaggattctggcgttcgccggtagaagaagttttggtttcaaattcgcggcttctaaaccttagcgttgaagagcatactgctcaactctcacatagagatagggccagcgttcatgccactacagaactctacgaactgagattccaagatgttcttattaatgataacgacaagcccattgatgtacttagttgtacgacgacgatggaagtgggggttgatattggatctctggttgctgttgctttaagaaacgtccctccgcaacgagaaaattatcagcaacgtgctgggcgagcaggccgccgtggcgcatctgtttcaacggtggttacatattctcaaaatggccctcatgatagttattatttccttaatcctgaacgcattgttgcaggttctcctcgtacacctgaagtgaaagtaaataatcccaaaatagccagaagacacgttcattcttttttagttcagaccttttttcacgagttaatggaacaaggaatttataatcccgcagagaaaactgccatacttgagaaagcacttggtactacacgagatttttttcatggagcaaaagatactggcctaaatctcgatagctttaataattgggttaaaaaccgtattctatctactaatggtgatttgagaacaagtgttgcagcatggcttcctcctgttcttgaaactggagggctttctgccagtgactggtttgctaaggtagcagaggaatttttaaatacactccatgggctggctgaaattgttccacaaactgccgttcttgttgatgaggaaaatgaagatgatgagcagacttctggtggaatgaaatttgcacaagaagaattacttgagttcctgttttaccatggtttattaccaagttatgcatttcctacaagcctctgtagtttcttggtagaaaaaattgtaaagaatattagaggttcttttgaggtgcgaacagtacaacagcctcagcaatcaatttctcaggctctgagtgaatatgccccgggacgtttgattgttattgataggaaaacctatcgctctggtggtgttttttctaatgcattgaaaggcgaactaaaccgggcaagaaagcttttcaataatcccaaaaagtttattcattgcgataagtgctcttttgtccgcgatcctcataataatcagaatagcgaaaatacttgtccgatctgtggtggcattctaaaagtagaaataatgattcagcccgaagtctttggacctgaaaatgccaaggaacttaatgaggacgacagagagcaagaaatcacctatgtaacagcggcacaatatccacaacctgttgatcctgaagattttaagttcaataatggaggtgctcatattgtttttactcacgcaatagatcagaaactggtgacggtgaaccgagggaaaaatgagggggagtccagtggtttttcagtatgttgcgaatgtggtgcggcctccgtttatgattcctactcaccggcaaagggggcacatgaaagaccgtataaatatatagcaactaaggaaacgcctcgcttatgctctggcgagtataaacgcgtttttctcggacatgatttccgtactgatttgcttttattacgaataaccgttgggtctccgcttgtaactgatacttcaaatgctatcgttttacggatgtatgaagatgcattatatacaatagcggaagcactaaggcttgcagctagtcgccataaacaactggatcttgatcctgctgagtttggctctggtttcagaattttacccactatagaggaagatactcaggcattggatctcttcctttatgatactttatccggcggtgcgggttatgcggaagtagcagcagcgaatctagatgacattcttactgcaacactcgcattgttagaaagctgtgagtgcgatacctcctgtacagattgtctcaatcatttccacaaccagcatatacaaagccgtctcgataggaaactaggtgcatctttacttcgttatgcactatacggaatggttcctcgttgtgcttcacctgatattcaggtagaaaaattgtctcaattgagggcaagtctggaattggatggttttcaatgcataattaagggaactcaggaggcacctatgattgtgagtttgaatgaccgttctattgcagtgggaagttatcctggtcttattgatcgacccgactttcaacacgacgtatataagtcaaagcatactaatgctcatatagcctttaatgaatatcttcttcgttcaaatctgccacaatcgcatcaaaatattagaaaaatgttgcgctga

SEQ ID NO: 27325 - DNA, 1215 bp, Escherichia coli HVH 46 (4-2758776); identical to SEQ ID NO: 27268

SEQ ID NO: 27326 - DNA, 1647 bp, Escherichia coli HVH 46 (4-2758776); identical to SEQ ID NO: 27269

SEQ ID NO: 27327 - DNA, 1884 bp, Escherichia coli HVH 46 (4-2758776); identical to SEQ ID NO: 27270

SEQ ID NO: 27328 - DNA, 1044 bp, Escherichia coli HVH 46 (4-2758776); identical to SEQ ID NO: 27271

SEQ ID NO: 27329 - DNA, 5511 bp, Escherichia coli HVH 46 (4-2758776); identical to SEQ ID NO: 27324

SEQ ID NO: 27330 - DNA, 1215 bp, Escherichia coli HVH 46 (4-2758776); identical to SEQ ID NO: 27268

SEQ ID NO: 27331 - DNA, 1647 bp, Escherichia coli HVH 46 (4-2758776); identical to SEQ ID NO: 27269

SEQ ID NO: 27332 - DNA, 1884 bp, Escherichia coli HVH 46 (4-2758776); identical to SEQ ID NO: 27270

SEQ ID NO: 27333 - DNA, 1044 bp, Escherichia coli HVH 46 (4-2758776); identical to SEQ ID NO: 27271

SEQ ID NO: 27334 - DNA, 5511 bp, Escherichia coli HVH 46 (4-2758776); identical to SEQ ID NO: 27324

SEQ ID NO: 27335 - DNA, 1215 bp, Escherichia coli K02; identical to SEQ ID NO: 27300

SEQ ID NO: 27336 - DNA, 1647 bp, Escherichia coli K02
gtgaattacgctattgataagttcaccgggacactgatattagcagctcgagcaacgaaatatgctcaatatgtttgcccagtttgtaaaaaaggtgttaacctccgtaaagggaaggttatacccccatattttgctcatttgcccggacatggtacgtcagactgtgaaaattttgttcccggaaattccatcattatcgaaactattaaaactatttcaaagcgatatatggatttgcgcttattgattcctgtcggaagtaatagtcgagagtggtcattagaattagtgttgccaacctgtaatttatgtagagcaaagataacgttagatgtaggaggcagaagccaaacgcttgatatgaggagtatggtaaagagtcgccagattggtgctgaattatcagtaaaatcttaccgtattgtttcatatagtggtgaacccgatccaaaatttgtaacagaagttgaaagagaatgccccggtttaccttctgagggagcagcagttttcactgctttagggcgtggggcatcgaagggatttccacgagcacaagagttaagatgtactgaaacatttgcctttctttggcgacaccctgttgctccagattttcctgatgaattagaaataaaaagtttagctagtaaacagggatggaatttagctcttgttacaattcctgaagtcccttctgtggagagtatttcatggctaaaatcttttacataccttcctgttgttcctgccagaacatctattacagcaatttggccgttcctaaatcaaaaaacaagtattaatcatgtcgaatgtgttcattctgacacaatattgttgtcagcaaatatggcaccaacatcatcagaaaatgttggaccaactatgtacgcacaaggttcctctttattactttcagcggttggtgttgaaaaatcacctgctttcttcattcttaatcctggagaaaatgactttgtgggcgtttctggctcaattgagcaggacgtaaacttatttttttctttctataaaaaaaacgtttctgtacccagaaaatatccctcaatagatttggtttttactaaggggaataaagaaaagaccatcgtttccttacatcaaagaagatgcattgaagttatgatggaagcacgaatgtttggccataaattagaatacatgtctatgccttctggtgttgaaggagtggcaagaattcaaagacaaactgaaagtagtgttattaagttagtttctaatgatgacattgcagctcatgataagagcatgcggttactatctcctgttgcgttatctcaattatctgattgcttagcaaacttaacatgtcatgtagaaatagattttttaggtcttggtaaaatatttttacctagttcttctatgttatcattagatgacggggaatttattgaattatctcctaatcttcgctcacggatattaagttttatacttcaaatggggcacaccctccatggttttagtttaaataatgattttttattagttgagaatttagtggatttgcagccggaaccacacttattaccgcattatagggcattggtaaaagaagttaagaccaatggatttgaatgtaaccgctttagataa

SEQ ID NO: 27337 - DNA, 1884 bp, Escherichia coli K02; identical to SEQ ID NO: 27275

SEQ ID NO: 27338 - DNA, 1044 bp, Escherichia coli K02; identical to SEQ ID NO: 27276

SEQ ID NO: 27339 - DNA, 5511 bp, Escherichia coli K02
atgattaataaaaataaagtaactgaacgttcaggtatacatgataccgtgaaaagccttagtgagaatctgagaaaatacattgaggcacaatatcatatccgggatgaagggttaattgctgagcgacgagcgcttttacagcaaaatgaaactattgctcaagctccttatatagaagcaaccccaatttatgaacctggtgcgccatacagtgaattacctattcccgaagcagcaagtaatgtgctaactcaactatcagaacttggaattggcctctatcaacgcccctataaacaccaatcacaggcacttgagtcatttcttggcgaagacgcttctgatctggtcattgcaacaggtacaggctccggtaagactgaaagctttctaatgccaattattggtaaattggcgattgaatcttccgagagacctaaatctgcatcccttccaggttgtagagcaattttattatatccaatgaatgcattagttaacgatcaacttgctcgtatcagacgtctttttggtgattctgaagcctctaaaatactgagatctggaagatgtgctcctgtacgctttggcgcttatacgggaagaacgccttaccctggtcgtcgtagctctagacgagacgagctttttatcaaaccccttttcgatgagttttacaataaactcgcaaataacgcccctgtacgtgcggaactgaaccgcattggtcgctggccaagtaaagatcttgatgctttttatgggcaaagcgcatctcaggctaaaacctacgtctcaggcaaaaaaacgggtaagcaatttgttttgaacaattggggggagaggctaattacccagcctgaggatcgtgagctaatgacccggcatgaaatgcagaatcgctgtccagaattactgataacgaactactccatgcttgagtatatgctgatgcgacctatcgagcgtaatatttttgagcagactaaggaatggctcaaagctgatgagatgaatgagcttatcttagtgcttgatgaagcgcatatgtatagaggagcagggggagcagaggtagcccttttaatacgtcgcctctgtgctcggttggatattccccgggaacgtatgcgctgcatccttaccagtgctagtctagggtccattgaggatggagaacgttttgcccaagacttaactggcttatcaccaacctcttcgaggaaatttcgaattattgagggtacaagggaatcgcgtcctgagtcacaaattgttaccagtaaagaagctaatgcactggctgaattcgacctaaattcatttcagtgcgtagctgaggatcttgaatctgcatatgcagcaatagagtctcttgccgaacgaatgggctggcaaaagccgatgataaaagatcatagtacactacgtaattggttatttgataatttgactggttttggtcctattgaaacgcttattgaaatagtttcaggtaaagcggttaagctaaatatcttgagtgaaaacctttttccagactctccacagcaaattgcagagcgagcgacagatgcattactcgcattgggttgctatgctcagagggcatccgatggcagagtgcttattccaactcgcatgcatcttttttatcggggattaccaggtctttatgcctgtatagatcccgattgtaatcaacgtttgggtaaccatagtgggccaactatacttggccgcctttatacgaaaccactggatcaatgtaaatgcgcttcaaaagggcgagtctacgaattatttacccaccgtgactgcggtgcggcttttattcgtggatacgttagttccgaaatggactttgtatggcaccagccgaacggaccattatcagaagatgaggatatcgatcttgttcccatagatatattggtcgaggaaacacctcatgtacatagtgattaccaggacagatggctacatatagcaacaggacgcctttctaaacagtgtcaagatgaggattctggttatcgtaaagtctttatacctgaccgagttaagtctggatctgaaattacatttgatgaatgccctgtttgtatgcgtaagacaagaagtgctcagaatgaaccgtctaaaattatggatcatgttacaaaaggggaagcaccttttacaacgttagtacgtacacagatatctcaccagccagcgagtcgtcctattgatggtaaacatcccaatgggggaaaaaaagtacttattttttctgatggccgacaaaaagcagctcggcttgcacgtgatattcctagagatattgagcttgatttgtttcggcaatccattgctctcgcctgttctaaactgaaagatatcaatcgggaacccaaaccaacatcagtactttaccttgctttcctatcagtcctttctgaacatgacttgcttatttttgatggggaagattcacgaaaagttgtaatggcccgtgatgaattttatcgtgattataatagcgatctggctcaagcttttgatgataacttcagtccccaagagtcaccgtcacgatataaaatagcgttgcttaaacttttatgtagcaattactattctctttccggaacaacagttggttttgttgaaccatcgcagcttaaatcaaaaaaaatgtgggaagatgtgcagtccaagaagctaaatattgagagcaaggatgttcatgctttagctgttgcttggattgataccttactcactgaatttgcttttgatgaatctattgattcgacactacgaatcaaagccgctggattctacaaacccacttggggtagtcaaggacggtttggaaaagctcttaggaaaaccctgatacagcatcctgctatgggggagctttatgtggaagttttggaggagatttttcgtactcatctgacattaggaaaagatggtgtctactttcttgctccaaatgcactacgtctgaaaatagatctcttgcatgtctggaaacaatgtaatgactgcacggcactaatgccatttgctttagaacattctacttgccttgcttgtggtagtaacagtgtcaaaacagtcgagccgtcggaaagcagctatattaatgcacgaaaaggattctggcgttcgccggtagaagaagttttggtttcaaattcgcggcttctaaaccttagcgttgaagagcatactgctcaactctcacatagagatagggccagcgttcatgccactacagaactctacgaactgagattccaagatgttcttattaatgataacgacaagcccattgatgtacttagttgtacgacgacgatggaagtgggggttgatattggatctctggttgctgttgctttaagaaacgtccctccgcaacgagaaaattatcagcaacgtgctgggcgagcaggccgccgtggcgcatctgtttcaacggtggttacatattctcaaaatggccctcatgatagttattatttccttaatcctgaacgcattgttgcaggttctcctcgtacacctgaagtgaaagtaaataatcccaaaatagccagaagacacgttcattcttttttagttcagaccttttttcacgagttaatggaacaaggaatttataatcccacagagaaaactgccatacttgagaaagcacttggtactacacgagatttttttcatggagcaaaagatactggcctaaatctcgatagctttaataattgggttaaaaaccgtattctatctactaatggtgatttgagaacaagtgttgcagcatggcttcctcctgttcttgaaactggagggctttctgccagtgactggtttgctaaggtagcagaggaatttttaaatacactccatgggctggctgaaattgttccacaaattgccgctcttgttgatgaggaaaatgaagatgatgagcagacttctggtggaatgaaatttgcacaagaagaattacttgagttcctgttttaccatggtttattaccaagttatgcatttcctacaagcctctgtagtttcttggtagaaaaaattgtaaagaatattagaggttcttttgaggtgcgaacagtacaacagcctcagcaatcaatttctcaggctctgagtgaatatgccccgggacgtttgattgttattgataggaaaacctatcgctctggtggtgttttttctaatgcattgaaaggcgaactaaaccgggcaagaaagcttttcaataatcccaaaaagtttattcattgcgataagtgctcttttgtccgcgatcctcataataatcagaatagcgaaaatacttgtccgatctgtggtggcattctaaaagtagaaataatgattcagcccgaagtctttggacctgaaaatgccaaggaacttaatgaggacgacagagagcaagaaatcacctatgtaactgcggcacaatatccacaacctgttgatcctgaagattttaagttcaataatggaggtgctcatattgtttttactcacgcaatagatcagaaactggtgacggtgaaccgagggaaaaatgagggggggtccagtggtttttcagtatgttgcgaatgtggtgcggcctccgtttatgattcctactcaccggcaaagggggcacatgaaagaccgtataaatatatagcaactaaggaaacgcctcgcttatgctctggcgagtataaacgcgtttttctcggacatgatttccgtactgatttgcttttattacgaataaccgttgggtctccgcttgtaactgatacttcaaatgctatcgttttacggatgtatgaagatgcattatatacaatagcggaagcactaaggcttgcagctagtcgccataaacaactggatcttgatcctgctgagtttggctctggtttcagaattttacccactatagaggaagatactcaggcattggatctcttcctttatgatactttatctggcggtgcgggttatgcggaagtagcagcagcgaatctagatgacattcttactgcaacactcgcattgttagaaggttgtgagtgcgatacctcctgtacagattgtctcaatcatttccacaaccagcatatacaaagccgtctcgataggaaactaggtgcatctttacttcgttatgctctatacggaatggttcctcgttgtgcttcacctgatattcaggtagaaaaattgtctcaattgagggcaagtctggaattggatggttttcaatgcctaattaagggaactcaggaggcacctatgattgtgagtttgaatgaccgttctgttgcagtgggaagttaccctggtcttattgatcgacccgactttcaacacgacgtatataagtcaaagaatactaatgctcatatagcctttaatgaatatcttcttcgttcaaatctgccacaagcgcatcaaaatattagaaaattgttgcgctga

SEQ ID NO: 27340 - DNA, 1215 bp, Escherichia coli KOEGE 33 (68a); identical to SEQ ID NO: 27281

SEQ ID NO: 27341 - DNA, 1647 bp, Escherichia coli KOEGE 33 (68a); identical to SEQ ID NO: 27282

SEQ ID NO: 27342 - DNA, 1884 bp, Escherichia coli KOEGE 33 (68a); identical to SEQ ID NO: 27283

SEQ ID NO: 27343 - DNA, 1044 bp, Escherichia coli KOEGE 33 (68a); identical to SEQ ID NO: 27308

SEQ ID NO: 27344 - DNA, 5511 bp, Escherichia coli KOEGE 33 (68a); identical to SEQ ID NO: 27285

SEQ ID NO: 27345 - DNA, 1215 bp, Escherichia coli KTE15; identical to SEQ ID NO: 27300

SEQ ID NO: 27346 - DNA, 1647 bp, Escherichia coli KTE15; identical to SEQ ID NO: 27336

SEQ ID NO: 27347 - DNA, 1884 bp, Escherichia coli KTE15; identical to SEQ ID NO: 27275

SEQ ID NO: 27348 - DNA, 1044 bp, Escherichia coli KTE15
atggagtggagagcagtatcacgagacaaagcactggatatgttatcaactgcattaaattgtcgatttgatgatgaagggttgagaatttcagcagtttcagaatgcttaaggagcgtattatatcaatattctatatctgaaacagaagaagctaggcaaactgtaacctcgcttcgactcactagtgcagtaaggcgaaaattggtacctttatggccagacattgctgatattgataatgctatacatccgggcattatgtctatattgaacagcttggctgaattgggtgacatgattaagttagaaggtggtaattggctcacagctcccccacatgcagtacgaattgacaataagatggctgttttttttggtggagagccttcctgtacattttcaacgggcgtggtagctaaatctgctggaagagttcgcttggttgaagaaaaagtgtgtactggaagtgttgaaatctgggatgcaaatgagtggattggtgccccagcagaaggcaatgaagaatggtcatccagactactatctggaactatttccggctttatcgatgcgcctggcaatatgagtgaaacgactgcatatgtgcggggaaaatggctccatttgtcagaactttcttttaataaaaagcaaatctacttatgcagaatgtccgttgataatcacttttcctattatttaggagaaattgaagctggacgcttatgtagaatgaattcgttagaatcgtctgatgatgtcagaagattacgtttttttctcgatacaaaagataattgtccgctaaagatccgtatcaaaatatctaatgggctagcaagattaagattaaccagaagattaccaagacgagaaacgaaggtactcctgctaggctggagagaatcaggttttgaaaatgaacattcaggaataacacaccatgtattccccgaggaaatattacccatagtgcgtagcgcttttgaagggcttggtattatttggattaacgaattcacgcgacggaatgaaatatga

SEQ ID NO: 27349 - DNA, 5511 bp, Escherichia coli KTE15; identical to SEQ ID NO: 27339

SEQ ID NO: 27350 - DNA, 1215 bp, Escherichia coli KTE183; identical to SEQ ID NO: 27300

SEQ ID NO: 27351 - DNA, 1647 bp, Escherichia coli KTE183; identical to SEQ ID NO: 27336

SEQ ID NO: 27352 - DNA, 1884 bp, Escherichia coli KTE183; identical to SEQ ID NO: 27275

SEQ ID NO: 27353 - DNA, 1044 bp, Escherichia coli KTE183; identical to SEQ ID NO: 27276

SEQ ID NO: 27354 - DNA, 5511 bp, Escherichia coli KTE183; identical to SEQ ID NO: 27339

SEQ ID NO: 27355 - DNA, 1215 bp, Escherichia coli KTE34
atgcacaaatatccctctataatagttaatatcaaccttcgagaagccaaactgaaaaagaaggtacgtgagcatttacaatccttgggttttacaagatctgattctggagcgctccaggccccgggaaataccaaagatgtaatacgggctcttcatagttctcaacgagctgagcggatatttgcaaaccaaaagttcataacgctaagagcggcaaagcttattaaatttttcgcatccggcaatgaggtcattccggataagatttcaccggtacttgaacgtgtaaagtcaggaacctggcaaggagatctctttaggttagcagcattaacttggtccgtacctgtttcaagcggatttggaaggcgtctccggtatcttgtatgggatgaaagcaacggaaaattgatagggctgatcgcaattggtgaccctgtgttcaaccttgcagtccgagataatttgattgggtgggatactcatgccagaagttcccggcttgttaatttgatggatgcatacgtcctcggtgctcttcccccttataatgccctgctgggaggaaaattaattgcatgtctgcttcgtagccgcgatctttatgatgactttgcaaaggtctatggtgataccgttggagtaatatctcaaaaaaagaaacaagcacgtcttttggctattacaacaacatcgtctatggggcgctcatcggtatataaccgtttaaagctggatggaattcaatatttcaaatcgattggatatacaggcggttgggggcattttcatatacctgatagcttgttcattgaattacgtgattacttacgtgatatggatcacgcttatgcagatcattatatgtttggtaatgggcctaactggcgtttacgtacaactaaggcagctttaaatgcactaggatttagagataatttgatgaagcatggaattcaacgtgaagtgtttatcagtcagctagcagaaaatgcaactagtattctgcaaacaggcaaaggtgaaccagatctaacctctttgctttctgctaaagagatagctgagtgtgcgatggcacgatggatggttccacgatcaattcgcaatccagaatatcggctttggaaagcaagagatctatttgattttattagtaatgactcgctaaactttcccccgtttgacgagatagcgaaaacagttgtctaa

SEQ ID NO: 27356 - DNA, 1647 bp, Escherichia coli KTE34; identical to SEQ ID NO: 27269

SEQ ID NO: 27357 - DNA, 1884 bp, Escherichia coli KTE34
atgagttaccaatatagccaagaggcaaaggaacggatctctaagttgggacaatccgaaattgttaactttatcaatgagatttctccaactttacgacgtaaagcttttggttgtttaccaaaagtaccgggattcagggcaggacatcccactgaaattaaagaaaaacagaaaagattgattgggtatatgttccagtcacatccttcctctgaggagagaaaagcatggaaaagtttttctcttttttggcagttttgggctgaagagaaaattgacaaatcatttagtatgattgataatttaggattaaaagaaaactctggctctatttttattagagagcttgctaaaaactttcctaaagttgctagagagaatatcgagcgcctgtttatctttagtgggtttgctgatgatccagacgttataaatgcatttaacctttttcctcctgcagttgttcttgcccgcgatatcgtgattgatactcttccaattcgtttagatgagcttgaagcacgtattagtttaattgccgataatgttgagaaaaaaaataatcatattaaagaacttgagttaaaaatagatgctttttccgaacagtttgataattactttaataatgaaaagagcagtttaaaaataattaatgaactacaatctttgataaactcagagactaaacaatctgatattgctaataaagctattgacgagctttatcattttaatgaaaaaaacaaacagctaatattatctcttcaagaaaaattagattttaatgctctggctatgaatgatatttctgagcatgaaaaattgataaaaagtatggctaatgacatttcagaatttaaaaatgcattaacgatcttgtgtgataataaaataaagaataacgagttagattatgtcaatgaattaaaaaaactcactgaacgaatagatacacttgaaataaacacatctcaagctagcgaagtgagtgtcaccaatagatttacaaaattccatgaaatagcgcactatgaaaattatgagtatctttcatcctccgaagacatatctaatagaatttctttaaatttacaggctgttggattgacaaaaaattcagcagaaaaattggctagattgatattagctaccttcgtttctggacaaatcattcaattcagtggctctttggcagatattatcgcggatgcaattgccattgctattggtgcaccacgttatcacatatggagagttccagttggtattatttctgacatggatgcttttgattttatagagactatagctgaatcatctcgctgtctccttttgaaaggggccaatctttcagcatttgagatttatggagcggcaattagagatatagttgttcaacggcaaatacatccaacaaattatgaccatctggcattgatagctacctggaaacaaggcccagctacattccctgatggaggaatgttggccgagttgggacctgttattgatactgatacattaaaaatgcgtggtttatcagctactttaccccaattgaaaccaggttgtcttgccaaggataaatggacaaatattgatggactacatcttgatagtgttgatgattatgtagatgaattaagagcattactggacgaagctggatttgatgggggaactttgtggaagagaatgattcatattttctatacttcactcataaggatccctaatggaaattatatttatgatctttattctgtcttgtctttttatactcttacatgggcaaaaattaaaggtggccccgtccaaaagatagaagatattgccaatcgtgaattaaaaaattatagtgcaaaaatatcttcttga

SEQ ID NO: 27358 - DNA, 1044 bp, Escherichia coli KTE34; identical to SEQ ID NO: 27271

SEQ ID NO: 27359 - DNA, 5511 bp, Escherichia coli KTE34; identical to SEQ ID NO: 27319

SEQ ID NO: 27360 - DNA, 1215 bp, Escherichia coli KTE35; identical to SEQ ID NO: 27355

SEQ ID NO: 27361 - DNA, 1647 bp, Escherichia coli KTE35; identical to SEQ ID NO: 27269

SEQ ID NO: 27362 - DNA, 1884 bp, Escherichia coli KTE35; identical to SEQ ID NO: 27357

SEQ ID NO: 27363 - DNA, 1044 bp, Escherichia coli KTE35; identical to SEQ ID NO: 27271

SEQ ID NO: 27364 - DNA, 5511 bp, Escherichia coli KTE35; identical to SEQ ID NO: 27319

SEQ ID NO: 27365 - DNA, 1215 bp, Escherichia coli KTE72; identical to SEQ ID NO: 27300

SEQ ID NO: 27366 - DNA, 1647 bp, Escherichia coli KTE72; identical to SEQ ID NO: 27336

SEQ ID NO: 27367 - DNA, 1884 bp, Escherichia coli KTE72; identical to SEQ ID NO: 27275

SEQ ID NO: 27368 - DNA, 1044 bp, Escherichia coli KTE72; identical to SEQ ID NO: 27276

SEQ ID NO: 27369 - DNA, 5511 bp, Escherichia coli KTE72; identical to SEQ ID NO: 27339

SEQ ID NO: 27370 - DNA, 1215 bp, Escherichia coli KTE86; identical to SEQ ID NO: 27300

SEQ ID NO: 27371 - DNA, 1647 bp, Escherichia coli KTE86; identical to SEQ ID NO: 27336

SEQ ID NO: 27372 - DNA, 1884 bp, Escherichia coli KTE86; identical to SEQ ID NO: 27275

SEQ ID NO: 27373 - DNA, 1044 bp, Escherichia coli KTE86; identical to SEQ ID NO: 27276

SEQ ID NO: 27374 - DNA, 5511 bp, Escherichia coli KTE86; identical to SEQ ID NO: 27339

SEQ ID NO: 27375 - DNA, 1215 bp, Escherichia coli KTE88; identical to SEQ ID NO: 27300

SEQ ID NO: 27376 - DNA, 1647 bp, Escherichia coli KTE88; identical to SEQ ID NO: 27336

SEQ ID NO: 27377 - DNA, 1884 bp, Escherichia coli KTE88; identical to SEQ ID NO: 27275

SEQ ID NO: 27378 - DNA, 1044 bp, Escherichia coli KTE88; identical to SEQ ID NO: 27276

SEQ ID NO: 27379 - DNA, 5511 bp, Escherichia coli KTE88; identical to SEQ ID NO: 27339

SEQ ID NO: 27380 - DNA, 1215 bp, Escherichia coli KTE89; identical to SEQ ID NO: 27300

SEQ ID NO: 27381 - DNA, 1647 bp, Escherichia coli KTE89; identical to SEQ ID NO: 27336

SEQ ID NO: 27382 - DNA, 1884 bp, Escherichia coli KTE89; identical to SEQ ID NO: 27275

SEQ ID NO: 27383 - DNA, 1044 bp, Escherichia coli KTE89; identical to SEQ ID NO: 27276

SEQ ID NO: 27384 - DNA, 5511 bp, Escherichia coli KTE89; identical to SEQ ID NO: 27339

SEQ ID NO: 27385 - DNA, 1215 bp, Escherichia coli KTE93; identical to SEQ ID NO: 27300

SEQ ID NO: 27386 - DNA, 1647 bp, Escherichia coli KTE93; identical to SEQ ID NO: 27336

SEQ ID NO: 27387 - DNA, 1884 bp, Escherichia coli KTE93; identical to SEQ ID NO: 27275

SEQ ID NO: 27388 - DNA, 1044 bp, Escherichia coli KTE93; identical to SEQ ID NO: 27276

SEQ ID NO: 27389 - DNA, 5511 bp, Escherichia coli KTE93; identical to SEQ ID NO: 27339

SEQ ID NO: 27390 - DNA, 1215 bp, Escherichia coli MP1; identical to SEQ ID NO: 27300

SEQ ID NO: 27391 - DNA, 1647 bp, Escherichia coli MP1; identical to SEQ ID NO: 27336

SEQ ID NO: 27392 - DNA, 1884 bp, Escherichia coli MP1; identical to SEQ ID NO: 27275

SEQ ID NO: 27393 - DNA, 1044 bp, Escherichia coli MP1; identical to SEQ ID NO: 27276

SEQ ID NO: 27394 - DNA, 5511 bp, Escherichia coli MP1; identical to SEQ ID NO: 27339

SEQ ID NO: 27395 - DNA, 1215 bp, Escherichia coli MS 107-1; identical to SEQ ID NO: 27281

SEQ ID NO: 27396 - DNA, 756 bp, Escherichia coli MS 107-1
atgtacgcacaaggttcctctttattactttcagcgattggtgttgaaaaatcacctgctttcttcattcttaatcctggagaaaatgactttgtgggcgtttctggctcaattgagcaggacgtaaacttatttttttctttctataaaaaaaacgtttctgtacccagaaaatatccctcaatagatttggtttttactaagaggaataaagaaaagaccatcgtttccttacatcaaagaagatgcattgaagttatgatggaagcacgaatgtttggccataaattagaatacatgtctatgccttctggtgttgaaggagtggcaagaattcaaagacaaactgaaagtagtgttattaagttagtttctaatgatgacattgcagctcatgataagagcatgcggttactatctcctgttgcgttatctcaattatctgattgcttagcaaacttaacatgtcatgtagaaatagattttttaggtcttggtaaaatatttttacctagttcttctatgttatcattagatgacggggaatttattgaattatctcctaatcttcgctcacggatattaagttttatacttcaaatggggcacaccctccatggttttagtttaaataatgattttttattagttgagaaattagtggatttgcagccggaaccacacttattaccgcattatagagcattggtaaaagaagttaagaccaatggatttgaatgtaaccgctttagataa

SEQ ID NO: 27397 - DNA, 1884 bp, Escherichia coli MS 107-1; identical to SEQ ID NO: 27283

SEQ ID NO: 27398 - DNA, 783 bp, Escherichia coli MS 107-1
atgtctatattgaacagcttggctgaattgggtgacatgattaagttagaaggtggtaattggctcacagctcccccacatgcagtacgaattgacaataagatggctgttttttttggtggagagccttcctgtacattttcaacgggcgtggtagctaaatctgctggaagagttcgcttggttgaagaaaaagtgtgtactggaagtgttgaaatctgggatgcaaatgagtggattggtgccccagcagaaggcaatgaagaatggtcatccagactactatctggaactatttccggctttatcgatgcgcctagcaatatgagtgaaacgactgcatatgtgcggggaaaatggctccatttgtcagaactttcttttaataaaaagcaaatctacttatgcagaatgtccgttgataatcacttttcctattatttaggagaaattgaagctggacgcttatgtagaatgaattcgttagaatcgtctgatgatgtcagaagattacgtttttttctcgatacaaaagataattgtccgctaaagatccgtatcaaaatatctaatgggctagcaagattaagattaaccagaagattaccaagacgagaaacgaaggtactcctgctaggctggagagaatcaggttttgaaaatgaacattcaggaataacacaccatgtattccccgaggaaatattacccatagtgcgtagcgcttttgaagggcttggtattatttggattaacgaattcacgcgacggaatgaaatatga

SEQ ID NO: 27399 - DNA, 5511 bp, Escherichia coli MS 107-1
atgattaataaaaataaagtaactgaacgttcaggtatacatgataccgtgaaaagccttagtgagaatctgagaaaatacattgaggcacaatatcatatccgggatgaagggttaattgctgagcgacgagcgcttttacagcaaaatgaaactattgctcaagctccttatatagaagcaaccccaatttatgaacctggtgcgccatacagtgaattgcctattcccgaagcagcaagtaatgtgctaactcaactatcagaacttggaattggcctctatcaacgcccctataaacaccaatcacaggcacttgagtcatttcttggcgaagacgcttctgatctggtcattgcaacaggtacaggctccggtaagactgaaagctttctaatgccaattattggtaaattggcgattgaatcttccgagagacctaaatctgcatcccttccaggttgtagagcaattttattatatccaatgaatgcattagttaacgatcaacttgctcgtatcagacgtctttttggtgattctgaagcctctaaaatactgagatctggaagatgtgcccctgtacgctttggcgcttatacgggaagaacgccttaccctggtcgtcgtagctctagacgagacgagctttttatcaaaccccttttcgatgagttttacaataaactcgcaaataacgcccccgtacgtgcggaactgaaccgcattggtcgctggccaagtaaagatcttgatgctttttatgggcaaagcgcatctcaggctaaaacctacgtctcaggcaaaaaaacgggtaagcaatttgttttgaacaattggggggagaggctaattacccagcctgaggatcgtgagctaatgacccggcatgaaatgcagaatcgctgtccagaattactgataacgaactactccatgcttgagtatatgctgatgcgacctatcgagcgtaatatttttgagcagactaaggaatggctcaaagctgatgagatgaatgagcttatcttagtgcttgatgaagcgcatatgtatagaggagcagggggagcagaggtagcccttttaatacgtcgcctctgtgctcggttggatattccccgggaacgtatgcgctgcatccttaccagtgctagtctagggtccattgaggatggagaacgttttgcccaagacttaactggcttatcaccaacctcttcgaggaaatttcgaattattgagggtacaagggaatcgcgtcctgagtcacaaattgttaccagtaaagaagctaatgcactggctgaattcgacctaaattcatttcagtgcgtagctgaggatcttgaatctgcatatgcagcaatagagtctcttgccgaacgaatgggctggcaaaagccgatgataaaagatcatagtacactacgtaattggttatttgataatttgactggttttggtcctattgaaacgcttattgaaatagtttcaggtaaagcggttaagctaaatatcttgagtgaaaacctttttccagactctccacagcaaattgcagagcgagcgacagatgcattactcgcattgggttgctatgctcagagggcatccgatggcagagtgcttattccaactcgcatgcatcttttttatcggggattaccaggtctttatgcctgtatagatcccgattgtaatcaacgtttgggtaaccatagtgggccaactatacttggccgcctttatacgaaaccactggatcaatgtaaatgcgcttcaaaagggcgagtctacgaattatttacccaccgtgactgcggtgcggcttttattcgtggatacgttagttccgaaatggactttgtatggcaccagccgaacggaccattatcagaagatgaggatatcgatcttgttcccatagatatattggtcgaggaaacacctcatgtacatagtgattaccaggacagatggctacatatagcaacaggacgcctttctaaacagtgtcaagatgaggattctggttatcgtaaagtctttatacctgaccgagttaagtctggatctgaaattacatttgatgaatgccctgtttgtatgcgtaagacaagaagtgctcagaatgaaccgtctaaaattatggatcatgttacaaaaggggaagcaccttttacaacgttagtacgtacacagatatctcaccagccagcgagtcgtcctattgatggtaaacatcccaatgggggaaaaaaagtacttattttttctgatggccgacaaaaagcagctcggcttgcacgtgatattcctagagatattgagcttgatttgtttcggcaatccattgctctcgcctgttctaaactgaaagatatcaatcgggaacccaaaccaacatcagtactttaccttgctttcctatcagtcctttctgaacatgacttgcttatttttgatggggaagattcacgaaaagttgtaatggcccgtgatgaattttatcgtgattataatagcgatctggctcaagcttttgatgataacttcagtccccaagagtcaccgtcacgatataaaatagcgttgcttaaacttttatgtagcaattactattctctttccggaacaacagttggttttgttgaaccatcgcagcttaaatcaaaaaaaatgtgggaagatgtgcagtccaagaagctcaatattgagagcaaggatgttcatgctttagctgttgcttggattgataccttactcactgaatttgcttttgatgaatctattgattcgccactacgaatcaaagccgctggattctacaaacccacttggggtagtcaaggacggtttggaaaagctcttaggaaaaccctgatacagcatcctgctatgggggagctttatgtggaagttttggaggagatttttcgtactcatctgacattaggaaaagatggtgtctactttcttgctccaaatgcactacgtctgaaaatagatctcttgcatgtctggaaacaatgtaatgactgcacggcactaatgccatttgctttagaacattctacttgccttgcttgtggtagtaacagtgtcaaaacagtcgagccgtcggaaagcagctatattaatgcacgaaaaggattctggcgttcgccggtagaagaagttttggtttcaaattcgcggcttctaaaccttagcgttgaagagcatactgctcaactctcacatagagatagggccagcgttcatgccactacagaactctacgaactgagattccaagatgttcttattaatgataacgacaagcccattgatgtacttagttgtacgacgacgatggaagtgggggttgatattggatctctggttgctgttgctttaagaaacgtccctccgcaacgagaaaattatcagcaacgtgctgggcgagcaggccgccgtggcgcatctgtttcaacggtggttacatattctcaaaatggccctcatgatagttattatttccttaatcctgaacgcattgttgcaggttctcctcgtacacctgaagtgaaagtaaataatcccaaaatagccagaagacacgttcattcttttttagttcagaccttttttcacgagttaatggaacaaggaatttataatcccacagagaaaactgccatacttgagaaagcacttggtactacacgagatttttttcatggagcaaaagatactggcctaaatctcgatagctttaataattgggttaaaaaccgtattctatctactaatggtgatttgagaacaagtgttgcagcatggcttcctcctgttcttgaaactggagggctttctgccagtgactggtttgctaaggtagcagaggaatttttaaatacactccatgggctggctgaaattgttccacaaattgccgttcttgttgatgaggaaaatgaagatgatgagcagacttctggtggaatgaaatttgcacaagaagaattacttgagttcctgttttaccatggtttattaccaagttatgcatttcctacaagcctctgtagtttcttggtagaaaaaattgtaaagaatattagaggttcttttgaggtgcgaacagtacaacagcctcagcaatcaatttctcaggctctgagtgaatatgccccgggacgtttgattgttattgataggaaaacctatcgctctggtggtgttttttctaatgcattgaaaggcgaactaaaccgggcaagaaagcttttcaataatcccaaaaagtttattcattgcgataagtgctcttttgtccgcgatcctcataataatcagaatagcgaaaatacttgtccgatctgtggtggcattctaaaagtagaaataatgattcagcccgaagtctttggacctgaaaatgccaaggaacttaatgaggacgacagagagcaagaaatcacctatgtaactgcggcacaatatccacaacctgttgatcctgaagattttaagttcaataatggaggtgctcatattgtttttactcacgcaatagatcagaaactggtgacggtgaaccgagggaaaaatgagggggggtccagtggtttttcagtatgttgcgaatgtggtgcggcctccgtttatgattcctactcaccggcaaagggggcacatgaaagaccgtataaatatatagcaactaaggaaacgcctcgcttatgctctggcgagtataaacgcgtttttctcggacatgatttccgtactgatttgcttttattacgaataaccgttgggtctccgcttgtaactgatacttcaaatgctatcgttttacggatgtatgaagatgcattatatacaatagcggaagcactaaggcttgcagctagtcgccataaacaactggatcttgatcctgctgagtttggctctggtttcagaattttacccactatagaggaagatactcaggcattggatctcttcctttatgatactttatctggcggtgcgggttatgcggaagtagcagcagcgaatctagatgacattcttactgcaacactcgcattgttagaaggttgtgagtgcgatacctcctgtacagattgtctcaatcatttccacaaccagcatatacaaagccgtctcgataggaaactaggtgcatctttacttcgttatgctctatacggaatggttcctcgttgtgcttcacctgatattcaggtagaaaaattgtctcaattgagggcaagtctggaattggatggttttcaatgcctaattaagggaactcaggaggcacctatgattgtgagtttgaatgaccgttctgttgcagtgggaagttaccctggtcttattgatcgacccgactttcaacacgacgtatataagtcaaagaatactaatgctcatatagcctttaatgaatatcttcttcgttcaaatctgccacaagcgcatcaaaatattagaaaattgttgcgctga

SEQ ID NO: 27400 - DNA, 1593 bp, Escherichia coli MS 79-10
agtatgattaataatttaggattaaaagaaaactctggctctatttttattagagagcttgctaaaaactttcctaaagttgctagagagaatatcgagcgcctgtttatctttagtgggtttgctaatgatccagacgttataaatgcatttaacctttttcctcctgcagttgttcttgcccgcgatatcgtggttgatactcttccaattcgtttagatgagcttgaagcacgtattagtttaattgccgataatgtggagaaaaaaaataaccatattaaagagcttgagttaaaaatagatgctttttccgaacggtttgataattactttaataatgaaaagagcaatttaaaaataattaacgaactacaatccttaataaactcagagactaaacaatctgatattgctaataaatctattgacgagctttatcattttaatgaaaaaaacaaacagctaatattatctcttcaagagaaattagattttaatgctctggctatgaatgacatttctgagcatgaaaaattgataaaaagtatggctaatgaaatttcagagttaaaaaatgcattaactatcttgtgtgataataaaagaaagaacaacgagttagattatatcaatgaattaaaaaaactcactgaacgaatagatacactggaaataaacacatctcaagctagcaaagtgagtgtcaccaatagatttacaaaattccatgaaatagcgcactatgaaaattatgaatatctttcatcctccgaagacatatctaatagaatttctttaaatttacaggctgttgggttaacaaaaaattcagcagaaacattggctagattgacattagctaccttcgtttctggacaaatcattcaattcagtggctctttggcagatattatcgcggatgcaattgccattgctattggtgcaccacgttatcacatatggagagttccagttggtattatttctgacatggattcttttgattttatagagactatagctgaatcatctcgctgtctccttttgaaaggggccaatctttcagcatttgagatttatggagcggcaattagagatatagttgttcaacggcaaatacatccaacaaattatgaccatctggcattgatagctacttggaaacaaggccctgctacattccctgatggaggaatgttggccgagttgggaccagttattgatactgatacattaaaaatgcgtggtttatctgctattttaccccaattgaaaccaggttgtcttgccaaggataaatggacaaatattgatggactacagcttgatagtgttgatgattatgtagatgaattaagagcattactggacgaagctggatttgatgggggaactttgtggaagagaatggttcatattttctatacttcactcataagagtccctaatggaaattatatttatgatctttattctgtcttgtctttttatactcttacatgggcaaaaattaaaggtggccccgtccaaaagatagaagatattgccaatcgtgaattaaaaaattatagtgcaaaaatatcttcttga

SEQ ID NO: 27401 - DNA, 783 bp, Escherichia coli MS 79-10; identical to SEQ ID NO: 27398

SEQ ID NO: 27402 - DNA, 5511 bp, Escherichia coli MS 79-10; identical to SEQ ID NO: 27399

SEQ ID NO: 27403 - DNA, 1215 bp, Escherichia coli SWW33; identical to SEQ ID NO: 27300

SEQ ID NO: 27404 - DNA, 1647 bp, Escherichia coli SWW33; identical to SEQ ID NO: 27274

SEQ ID NO: 27405 - DNA, 1884 bp, Escherichia coli SWW33
atgagttaccaatatagccaagaggcaaaggaacggatctctaagttgggacaatccgaaattgttaactttatcaatgagatttctccaactttacgacgtaaagcttttggttgtttaccaaaagtaccgggattcagggcaggacatcccactgaaattaaagaaaaacagaaaagattgattgggtatatgttccagtcacatccttcctctgaggagagaaaagcatggaaaagtttttctcttttttggcagttttgggctgaagagaaaattgataaatcatttagtatgattgataatttaggattaaaagaaaactctggctctatttttattagagagcttgctaaaaactttcctaaagttgctagagagaatatcgagcgcctgtttatctttagtgggtttgctgatgatccagacgttataaatgcatttaacctttttcctcctgcagttgttcttgcccgcgatatcgtggttgatactcttccaattcgtttagatgagcttgaagcacgtattagtttaattgccgataatgtggagaaaaaaaataaccatattaaagagcttgagttaaaaatagatgctttttccgaacggtttgataattactttaataatgaaaagagcaatttaaaaataattaacgaactacaatccttaataaactcagagactaaacaatctgatattgctaataaatctattgacgagctttatcattttaatgaaaaaaacaaacagctaatattatctcttcaagagaaattagattttaatgctctggctatgaatgacatttctgagcatgaaaaattgataaaaagtatggctaatgaaatttcagagttaaaaaatgcattaactatcttgtgtgataataaaagaaagaataacgagttagattatatcaatgaattaaaaaaactcactgaacgaatagatacacttgaaataaacacatctcaagctagcaaagtgagtgtcaccaatagatttacaaaattccatgaaatagcgcactatgaaaattatgaatatctttcatcctccgaagacatatctaatagaatttctttaaatttacaggctgttgggttaacaaaaaattcagcagaaacattggctagattgacattagctaccttcgtttctggacaaatcattcaattcagtggctctttggcagatattatcgcggatgcaattgccattgctattggtgcaccacgttatcacatatggagagttccagttggtattatttctgacatggattcttttgattttatagagactatagctgaatcatctcgctgtctccttttgaaaggggccaatctttcagcatttgagatttatggagcggcaattagagatatagttgttcaacggcaaatacatccaacaaattatgaccatctggcattgatagctacttggaaacaaggccctgctacattccctgatggaggaatgttggccgagttgggaccagttattgatactgatacattaaaaatgcgtggtttatctgctattttaccccaattgaaaccaggttgtcttgccaaggataaatggacaaatattgatggactacagcttgatagtgttgatgattatgtagatgaattaagagcattactggacgaagctggatttgatgggggaactttgtggaagagaatggttcatattttctatacttcactcataagagtccctaatggaaattatatttatgatctttattctgtcttgtctttttatactcttacatgggcaaaaattaaaggtggccccgtccaaaagatagaagatattgccaatcgtgaattaaaaaattatagtgcaaaaatatcttcttga

SEQ ID NO: 27406 - DNA, 1044 bp, Escherichia coli SWW33; identical to SEQ ID NO: 27276

SEQ ID NO: 27407 - DNA, 5511 bp, Escherichia coli SWW33
atgattaataaaaataaagtaactgaacgttcaggtatacatgataccgtgaaaagccttagtgagaatctgagaaaatacattgaggcacaatatcatatccgggatgaagggttaattgctgagcgacgagcgcttttacagcaaaatgaaactattgctcaagctccttatatagaagcaaccccaatttatgaacctggtgcgccatacagtgaattacctattcccgaagcagcaagtaatgtgctaactcaactatcagaacttggaattggcctctatcaacgcccctataaacaccaatcacaggcacttgagtcatttcttggcgaagacgcttctgatctggtcattgcaacaggtacaggctccggtaagactgaaagctttctaatgccaattattggtaaattggcgattgaatcttccgagagacctaaatctgcatcccttccaggttgtagagcaattttattatatccaatgaatgcattagttaacgatcaacttgctcgtatcagacgtctttttggtgattctgaagcctctaaaatactgagatctggaagatgtgcccctgtacgctttggcgcttatacgggaagaacgccttaccctggtcgtcgtagctctagacgagacgagctttttatcaaaccccttttcgatgagttttacaataaactcgcaaataacgcccctgtacgtgcggaactgaaccgcattggtcgctggccaagtaaagatcttgatgctttttatgggcaaagcgcatctcaggctaaaacctacgtctcaggcaaaaaaacgggtaagcaatttgttttgaacaattggggggagaggctaattacccagcctgaggatcgtgagctaatgacccggcatgaaatgcagaatcgctgtccagaattactgataacgaactactccatgcttgagtatatgctgatgcgacctatcgagcgtaatatttttgagcagactaaggaatggctcaaagctgatgagatgaatgagcttatcttagtgcttgatgaagcgcatatgtatagaggagcagggggagcagaggtagcccttttaatacgtcgcctctgtgctcggttggatattccccgggaacgtatgcgctgcatccttaccagtgctagtctagggtccattgaggatggagaacgttttgcccaagacttaactggcttatcaccaacctcttcgaggaaatttcgaattattgagggtacaagggaatcgcgtcctgagtcacaaattgttaccagtaaagaagctaatgcactggctgaattcgacctaaattcatttcagtgcgtagctgaggatcttgaatctgcatatgcagcaatagagtctcttgccgaacgaatgggctggcaaaagccgatgataaaagatcatagtacactacgtaattggttatttgataatttgactggttttggtcctattgaaacgcttattgaaatagtttcaggtaaagcggttaagctaaatatcttgagtgaaaacctttttccagactctccacagcaaattgcagagcgagcgacagatgcattactcgcattgggttgctatgctcagagggcatccgatggcagagtgcttattccaactcgcatgcatcttttttatcggggattaccaggtctttatgcctgtatagatcccgattgtaatcaacgtttgggtaaccatagtgggccaactatacttggccgcctttatacgaaaccactggatcaatgtaaatgcgcttcaaaagggcgagtctacgaattatttacccaccgtgactgcggtgcggcttttattcgtggatacgttagttccgaaatggactttgtatggcaccagccgaacggaccattatcagaagatgaggatatcgatcttgttcccatagatatattggtcgaggaaacacctcatgtacatagtgattaccaggacagatggctacatatagcaacaggacgcctttctaaacagtgtcaagatgaggattctggttatcgtaaagtctttatacctgaccgagttaagtctggatctgaaattacatttgatgaatgccctgtttgtatgcgtaagacaagaagtgctcagaatgaaccgtctaaaattatggatcatgttacaaaaggggaagcaccttttacaacgttagtacgtacacagatatctcaccagccagcgagtcgtcctattgatggtaaacatcccaatgggggaaaaaaagtacttattttttctgatggccgacaaaaagcagctcggcttgcacgtgatattcctagagatattgagcttgatttgtttcggcaatccattgctctcgcctgttctaaactgaaagatatcaatcgggaacccaaaccaacatcagtactttaccttgctttcctatcagtcctttctgaacatgacttgcttatttttgatggggaagattcacgaaaagttgtaatggcccgtgatgaattttatcgtgattataatagcgatctggctcaagcttttgatgataacttcagtccccaagagtcaccgtcacgatataaaatagcgttgcttaaacttttatgtagcaattactattctctttccggaacaacagttggttttgttgaaccatcgcagcttaaatcaaaaaaaatgtgggaagatgtgcagtccaagaagctaaatattgagagcaaggatgttcatgctttagctgttgcttggattgataccttactcactgaatttgcttttgatgaatctattgattcgacactacgaatcaaagccgctggattctacaaacccacttggggtagtcaaggacggtttggaaaagctcttaggaaaaccctgatacagcatcctgctatgggggagctttatgtggaagttttggaggagatttttcgtactcatctgacattaggaaaagatggtgtctactttcttgctccaaatgcactacgtctgaaaatagatctcttgcatgtctggaaacaatgtaatgactgcacggcactaatgccatttgctttagaacattctacttgccttgcttgtggtagtaacagtgtcaaaacagtcgagccgtcggaaagcagctatattaatgcacgaaaaggattctggcgttcgccggtagaagaagttttggtttcaaattcgcggcttctaaaccttagcgttgaagagcatactgctcaactctcacatagagatagggccagcgttcatgccactacagaactctacgaactgagattccaagatgttcttattaatgataacgacaagcccattgatgtacttagttgtacgacgacgatggaagtgggggttgatattggatctctggttgctgttgctttaagaaacgtccctccgcaacgagaaaattatcagcaacgtgctgggcgagcaggccgccgtggcgcatctgtttcaacggtggttacatattctcaaaatggccctcatgatagttattatttccttaatcctgaacgcattgttgcaggttctcctcgtacacctgaagtgaaagtaaataatcccaaaatagccagaagacacgttcattcttttttagttcagaccttttttcacgagttaatggaacaaggaatttataatcccacagagaaaactgccatacttgagaaagcacttggtactacacgagatttttttcatggagcaaaagatactggcctaaatctcgatagctttaataattgggttaaaaaccgtattctatctactaatggtgatttgagaacaagtgttgcagcatggcttcctcctgttcttgaaactggagggctttctgccagtgactggtttgctaaggtagcagaggaatttttaaatacactccatgggctggctgaaattgttccacaaattgccgctcttgttgatgaggaaaatgaagatgatgagcagacttctggtggaatgaaatttgcacaagaagaattacttgagttcctgttttaccatggtttattaccaagttatgcatttcctacaagcctctgtagtttcttggtagaaaaaattgtaaagaatattagaggttcttttgaggtgcgaacagtacaacagcctcagcaatcaatttctcaggctctgagtgaatatgccccgggacgtttgattgttattgataggaaaacctatcgctctggtggtgttttttctaatgcattgaaaggcgaactaaaccgggcaagaaagcttttcaataatcccaaaaagtttattcattgcgataagtgctcttttgtccgcgatcctcataataatcagaatagcgaaaatacttgtccgatctgtggtggcattctaaaagtagaaataatgattcagcccgaagtctttggacctgaaaatgccaaggaacttaatgaggacgacagagagcaagaaatcacctatgtaactgcggcacaatatccacaacctgttgatcctgaagattttaagttcaataatggaggtgctcatattgtttttactcacgcaatagatcagaaactggtgacggtgaaccgagggaaaaatgagggggggtccagtggtttttcagtatgttgcgaatgtggtgcggcctccgtttatgattcctactcaccggcaaagggggcacatgaaagaccgtataaatatatagcaactaaggaaacgcctcgcttatgctctggcgagtataaacgcgtttttctcggacatgatttccgtactgatttgcttttattacgaataaccgttgggtctccgcttgtaactgatacttcaaatgctatcgttttacggatgtatgaagatgcattatatacaatagcggaagcactaaggcttgcagctagtcgccataaacaactggatcttgatcctgctgagtttggctctggtttcagaattttacccactatagaggaagatactcaggcattggatctcttcctttatgatactttatctggcggtgcgggttatgcggaagtagcagcagcgaatctagatgacattcttactgcaacactcgcattgttagaaggttgtgagtgcgatacctcctgtacagattgtctcaatcatttccacaaccagcatatacaaagccgtctcgataggaaactaggtgcatctttacttcgttatgctctatacggaatggttcctcgttgtgcttcacctgatattcaggtagaaaaattgtctcaattgagggcaagtctggaattggatggttttcaatgcctaattaagggaactcaggaggcacctatgattgtgagtttgaatgaccgttctgttgcagtgggaagttaccctggtcttattgatcgacccgactttcaacacgacgtatataagtcaaagaatactaatgctcatatagcctttaatgaatatcttcttcgttcaaatctgccacaagcgcatcaaaatattagaaaattgttgcgctga

SEQ ID NO: 27408 - DNA, 1647 bp, Escherichia coli TA271; identical to SEQ ID NO: 27269

SEQ ID NO: 27409 - DNA, 1212 bp, Escherichia coli TA271
ttgataaactcagagactaaacaatctgatattgctaataaagctattgacgagctttatcattttaatgaaaaaaacaaacagctaatattatctcttcaagaaaaattagattttaatgctctggctatgaatgatatttctgagcatgaaaaattgataaaaagtatggctaatgacatttcagaatttaaaaatgcattaacgatcttgtgtgataataaaataaagaataacgagttagattatgtcaatgaattaaaaaaactcactgaacgaatagatacacttgaaataaacacatctcaagctagcgaagtgagtgtcaccaatagatttacaaaattccatgaaatagcgcactatgaaaattatgagtatctttcatcctccgaagacatatctaatagaatttctttaaatttacaggctgttggattgacaaaaaattcagcagaaaaattggctagattgacattagctaccttcgtttctggacaaatcattcaattcagtggctctttggcagatattatcgcggatgcaattgccattgctattggtgcaccacgttatcacatatggagagttccagttggtattatttctgacatggatgcttttgattttatagagactatagctgaatcatctcgctgtctccttttgaaaggggccaatctttcagcatttgagatttatggagcggcaattagagatatagttgttcaacggcaaatacatccaacaaattatgaccatctggcattgatagctacctggaaacaaggcccagctacattccctgatggaggaatgttggccgagttgggacctgttattgatactgatacattaaaaatgcgtggtttatcagctactttaccccaattgaaaccaggttgtcttgccaaggataaatggacaaatattgatggactacatcttgatagtgttgatgattatgtagatgaattaagagcattactggacgaagctggatttgatgggggaactttgtggaagagaatgattcatattttctatacttcactcataaggatccctaatggaaattatatttatgatctttattctgtcttgtctttttatactcttacatgggcaaaaattaaaggtggccccgtccaaaagatagaagatattgccaatcgtgaattaaaaaattatagtgcaaaaatatcttcttga

SEQ ID NO: 27410 - DNA, 1044 bp, Escherichia coli TA271; identical to SEQ ID NO: 27271

SEQ ID NO: 27411 - DNA, 5511 bp, Escherichia coli TA271
atgattaataaaaataaagtaactgaacgttcaggtatacatgataccgtgaaaagccttagtgaaaatctgagaaaatacattgaggcacaatatcatatccgggatgaagggttaattgctgagcgacgagcgcttttacagcaaaatgaaactattgctcaagctccttatatagaagcaaccccaatttatgaacctggtgcgccatacagtgaattgcctattcccgaagcagcaagtaatgtgctaactcaactatcagaacttggaattggcctctatcaacgcccctataaacaccaatcacaggcacttgagtcatttcttggcgaaaacgcttctgatctggtcattgcaacaggtacaggctccggtaagactgaaagctttctaatgccaattattggaaaattggcgattgaatcttccgagagacctaaatctgcatcccttccaggttgtagagcaattttattatatccaatgaatgcattagttaacgatcaacttgctcgtatcagacgtctttttggtgattctgaagcctctaaaatactgagatctggaagatgtgcccctgtacgctttggcgcttatacgggaagaacgccttaccctggtcgtcgtagctctagacgagacgagctttttatcaaaccccttttcgatgagttttacaataaactcgcaaataacgcccccgtacgtgcggaactgaaccgcattggtcgctggccaagtaaagatcttgatgctttttatgggcaaagcgcatctcaggctaaaacctacgtctcaggcaaaaaaacgggtaagcaatttgttttgaacaattggggggagaggctaattacccagcctgaggatcgtgagctaatgacccggcatgaaatacagaatcgctgtccagaattactgataacgaactactccatgcttgagtatatgctgatgcgacctatcgagcgtaatatttttgagcagactaaggaatggctcaaagctgatgagatgaatgagcttatcttagtgcttgatgaagcgcatatgtatagaggagcagggggagcagaggtagcccttttaatacgtcgcctctgtgctcgattggatattccccgggaacgtatgcgctgcatccttaccagtgctagtctagggtccattgaggatggagaacgttttgcccaagacttaactggcttatcaccaacctcttcgaggaaatttcgaattattgagggtacaagggaatcgcgtcctgagtcacaaattgttaccagtaaagaagctaatgcactggctgaattcgacctaaattcatttcagtgcgtagctgaggatcttgaatctgcatatgcagcaatagagtctcttgccgaacgaatgggctggcaaaagccgatgataaaagatcatagtacactacgtaattggttatttgataatttgactggttttggtcctattgaaacgcttattgaaatagtttcaggtaaagcggttaagctaaatatcttgagtgaaaacctttttccagactctccacagcaaatcgcagagcgagcaacagatgcattactcgcattgggttgctatgctcagagggcatccgatggcagagtgcttattccaactcgcatgcatcttttttatcggggattaccaggtctttatgcctgtatagatcccgattgtaatcaacgtttgggtaaccatagcgggccaactatacttggccgcctttatacgaaaccactggatcaatgtaaatgcgcttcaaaagggcgagtctacgaattatttacccaccgtgactgcggtgcggcttttattcgtggatacgttagttccgaaatggactttgtatggcaccagccgaacggaccattatcagaagatgaggatatcgatcttgttcccatagatatattggtcgaggaaacacctcatgtacatagtgattaccaggacagatggctacatatagcaacaggacgcctttctaaacagtgtcaagatgaggattctggttatcgtaaagtctttatacctgaccgagttaagtctggatcagaaattacatttgatgaatgccctgtttgtatgcgtaagacaagaagtgctcagaatgaaccgtctaaaattatggatcatgttacaaaaggggaagcaccttttacaacgttagtacgtacacagatatctcaccagccagcgagtcgtcctattgatggtaaacatcccaatgggggaaaaaaagtacttattttttctgatggccgacaaaaagcagctcggcttgcacgtgatattcctagagatattgagcttgatttgtttcggcaatccattgctctcgcctgttctaaactgaaagatatcaatcgggaacccaaaccaacatcagtactttaccttgctttcctatcagtcctttctgaacatgacttgcttatttttgatggggaagattcacgaaaagttgtaatggcccgtgatgaattttatcgtgattataatagcgatctggctcaagcttttgatgatagcttcagcccccaagagtcaccgtcacgatataaaatagcgttgcttaaacttttatgtagcaattactattctctttccggaacaacagttggttttgttgaaccatcgcagcttaaatcaaaaaaaatgtgggaagatgtgcagtccaagaagctcaatattgagagcaaggatgttcatgctttagctgttgcttggattgataccttactcactgaatttgcttttgatgaatctattgattcgacactacgaatcaaagcagctggattctacaaacccacttggggtagtcaaggacggtttggaaaagctcttaggaaaaccctgatacagtatcctgctatgggggagctttatgtggaagttttggaggagatttttcgtactcatctgacattaggaaaagatggtgtctactttcttgctccaaatgcactacgtctgaaaatagatctcttgcatgtctggaaacaatgtaatgactgcacggcactaatgccatttgctttagaacattctacttgccttgcttgtggtagtaacagtgtcaaaacagtcgagccgtcggaaagcagctatattaatgcacgaaaaggattctggcgttcgccggtagaagaagttttggtttcaaattcgcggcttctaaaccttagcgttgaagagcatactgctcaactctcacatagagatagggccagcgttcatgccactacagaactctacgaactgagattccaagatgttcttattaatgataacgacaagcccattgatgtacttagttgtacgacgacgatggaagtgggggttgatattggatctctggttgctgttgctttaagaaacgtccctccgcaacgagaaaattatcagcaacgtgctgggcgagcaggccgccgtggcgcatctgtttcaacggtggttacatattctcaaaatggccctcatgatagttattatttccttaatcctgaacgcattgttgcaggttctcctcgtacacctgaagtgaaagtaaataatcccaaaatagccagaagacacgttcattcttttttagttcagaccttttttcacgagttaatggaacaaggaatttataatcccgcagagaaaactgccatacttgagaaagcacttggtactacacgagatttttttcatggagcaaaagatactggcctaaatctcgatagctttaataattgggttaaaaaccgtattctatctactaatggtgatttgagaacaagtgttgcagcatggcttcctcctgttcttgaaactggagggctttctgccagtgactggtttgctaaggtagcagaggaatttttaaatacactccatgggctggctgaaattgttccacaaactgccgttcttgttgatgaggaaaatgaagatgatgagcagacttctggtggaatgaaatttgcacaagaagaattacttgagttcctgttttaccatggtttattaccaagttatgcatttcctacaagcctctgtagtttcttggtagaaaaaattgtaaagaatattagaggttcttttgaggtgcgaacagtacaacagcctcagcaatcaatttctcaggctctgagtgaatatgccccgggacgtttgattgttattgataggaaaacctatcgctctggtggtgttttttctaatgcattgaaaggcgaactaaaccgggcaagaaagcttttcaataatcccaaaaagtttattcattgcgataagtgctcttttgtccgcgatcctcataataatcagaatagcgaaaatacttgtccgatctgtggtggcattctaaaagtagaaataatgattcagcccgaagtctttggacctgaaaatgccaaggaacttaatgaggacgacagagagcaagaaatcacctatgtaacagcggcacaatatccacaacctgttgatcctgaagattttaagttcaataatggaggtgctcatattgtttttactcacgcaatagatcagaaactggtgacggtgaaccgagggaaaaatgagggggagtccagtggtttttcagtatgttgcgaatgtggtgcggcctccgtttatgattcctactcaccggcaaagggggcacatgaaagaccgtataaatatatagcaactaaggaaacgcctcgcttatgctctggcgagtataaacgcgtttttctcggacatgatttccgtactgatttgcttttattacgaataaccgttgggtctccgcttgtaactgatacttcaaatgctatcgttttacggatgtatgaagatgcattatatacaatagcggaagcactaaggcttgcagctagtcgccataaacaactggatcttgatcctgctgagtttggctctggtttcagaattttacccactatagaggaagatactcaggcattggatctcttcctttatgatactttatccggcggtgcgggttatgcggaagtagcagcagcgaatctagatgacattcttactgcaacactcgcattgttagaaagctgtgagtgcgatacctcctgtacagattgtctcaatcatttccacaaccagcatatacaaagccgtctcgataggaaactaggtgcatctttacttcgttatgcactatacggaatggttcctcgttgtgcttcacctgatattcaggtagaaaaattgtctcaattgagggcaagtctggaattggatggttttcaatgcataattaagggaactcaggaggcacctatgattgtgagtttgaatgaccgttctattgcagtgggaagttatcctggtcttattgatcgacccgactttcaacacgacgtatataagtcaaagcatactaatgctcatatagcctttaatgaatatcttcttcgttcaaatctgccacaatcgcatcaaaatattagaaaaatgttgcgctga

SEQ ID NO: 27412 - DNA, 1215 bp, Escherichia coli UMEA 3163-1
atgcacaaagatccctctataatagttaatatcaaccttcgagaagccaaactgaaaaagaaggtacgtgagcatttacaatccttgggttttacaagatctgattctggagcgctccaggccccgggaaataccaaagatgtaatacgggctcttcatagttctcaacgagctgagcggatatttgcaaaccaaaagttcataacgctaagagcggcaaagcttattaaatttttcgcatccggcaatgaggtcattccggataagatttcaccggtacttgaacgtgtaaagtcaggaacctggcaaggagatctctttaggttagcagcattaacttggtccgtacctgtttcaagcggatttggaaggcgtctccggtatcttgtatgggatgaaagcaacggaaaattgatagggctgatcgcaattggtgaccctgtgttcaaccttgcagtccgagataatttgattgggtgggatactcatgccagaagttcccggcttgttaatttgatggatgcatacgtcctcggtgctcttcccccttataatgccctgctgggaggaaaattaattgcatgtctgcttcgtagccgcgatctttatgatgactttgcaaaggtctatggtgataccgttggagtaatatctcaaaaaaagaaacaagcacgtcttttggctattacaacaacatcgtctatggggcgctcatcggtatataaccgtttaaagctggatggaattcaatatttaaaatcgattggatatacaggcggttgggggcattttcatatacctgatagcttgttcattgaattacgtgattacttacgtgatatggatcacgcttatgcagatcattatatgtttggtaatgggcctaactggcgtttacgtacaactaaggcagctttaaatgtactaggatttagagataatttgatgaagcatggaattcaacgtgaagtttttatcagtcagctagcagaaaatgcaactagtattctgcaaacaggcaaaggtgaaccagatctaacctctttgctttctgctaaagagatagctgagtgtgcgatggcacgatggatagttccacgatcaattcgcaatccagaatatcggctttggaaagcaagagatctatttgattttattagtaatgactcgctaaaatttcccccgtctgacgagatagcgaaaacagttgtctaa

SEQ ID NO: 27413 - DNA, 1647 bp, Escherichia coli UMEA 3163-1; identical to SEQ ID NO: 27282

SEQ ID NO: 27414 - DNA, 1884 bp, Escherichia coli UMEA 3163-1; identical to SEQ ID NO: 27283

SEQ ID NO: 27415 - DNA, 1044 bp, Escherichia coli UMEA 3163-1; identical to SEQ ID NO: 27276

SEQ ID NO: 27416 - DNA, 5511 bp, Escherichia coli UMEA 3163-1
atgattaataaaaataaagtaactgaacgttcaggtatacatgataccgtgaaaagccttagtgagaatctgagaaaatacattgaggcacaatatcatatccgggatgaagggttaattgctgagcgacgagcgcttttacagcaaaatgaaactattgctcaagctccttatatagaagcaaccccaatttatgaacctggtgcgccatacagtgaattgcctattcccgaagcagcaagtaatgtgctaactcaactatcagaacttggaattggcctctatcaacgcccctataaacaccaatcacaggcacttgagtcatttcttggcgaagacgcttctgatctggtcattgcaacaggtacaggctccggtaagactgaaagctttctaatgccaattattggtaaattggcgattgaatcttccgagagacctaaatctgcatcccttccaggttgtagagcaattttattatatccaatgaatgcattagttaacgatcaacttgctcgtatcagacgtctttttggtgattctgaagcctctaaaatactgagatctggaagatgtgcccctgtacgctttggcgcttatacgggaagaacgccttaccctggtcgtcgtagctctagacgagacgagctttttatcaaaccccttttcgatgagttttacaataaactcgcaaataacgcccccgtacgtgcggaactgaaccgcattggtcgctggccaagtaaagatcttgatgctttttatgggcaaagcgcatctcaggctaaaacctacgtctcaggcaaaaaaacgggtaagcaatttgttttgaacaattggggggagaggctaattacccagcctgaggatcgtgagctaatgacccggcatgaaatgcagaatcgctgtccagaattactgataacgaactactccatgcttgagtatatgctgatgcgacctatcgagcgtaatatttttgagcagactaaggaatggctcaaagctgatgagatgaatgagcttatcttagtgcttgatgaagcgcatatgtatagaggagcagggggagcagaggtagcccttttaatacgtcgcctctgtgctcggttggatattccccgggaacgtatgcgctgtatccttaccagtgctagtctagggtccattgaggatggagaacgttttgcccaagacttaactggcttatcaccaacctcttcgaggaaatttcgaattattgagggtacaagggaatcgcgtcctgagtcacaaattgttaccagtaaagaagctaatgcactggctgaattcgacctaaattcatttcagtgcgtagctgaggatcttgaatctgcatatgcagcaatagagtctcttgccgaacgaatgggctggcaaaagccgatgataaaagatcatagtacactacgtaattggttatttgataatttgactggttttggtcctattgaaacgcttattgaaatagtttcaggtaaagcggttaagctaaatatcttgagtgaaaacctttttccagactctccacagcaaattgcagagcgagcgacagatgcattactcgcattgggttgctatgctcagagggcatccgatggcagagtgcttattccaactcgcatgcatcttttttatcggggattaccaggtctttatgcctgtatagatcccgattgtaatcaacgtttgggtaaccatagtgggccaactatacttggccgcctttatacgaaaccactggatcaatgtaaatgcgcttcaaaagggcgagtctacgaattatttacccaccgtgactgcggtgcggcttttattcgtggatacgttagttccgaaatggactttgtatggcaccagccgaacggaccattatcagaagatgaggatatcgatcttgttcccatagatatattggtcgaggaaacacctcatgtacatagtgattaccaggacagatggctacatatagcaacaggacgcctttctaaacagtgtcaagatgaggattctggttatcgtaaagtctttatacctgaccgagttaagtctggatctgaaattacatttgatgaatgccctgtttgtatgcgtaagacaagaagtgctcagaatgaaccgtctaaaattatggatcatgttacaaaaggggaagcaccttttacaacgttagtacgtacacagatatctcaccagccagcgagtcgtcctattgatggtaaacatcccaatgggggaaaaaaagtacttattttttctgatggccgacaaaaagcagctcggcttgcacgtgatattcctagagatattgagcttgatttgtttcggcaatccattgctctcgcctgttctaaactgaaagatatcaatcgggaacccaaaccaacatcagtactttaccttgctttcctatcagtcctttctgaacatgacttgcttatttttgatggggaagattcacgaaaagttgtaatggcccgtgatgaattttatcgtgattataatagcgatctggctcaagcttttgatgataacttcagtccccaagagtcaccgtcacgatataaaatagcgttgcttaaacttttatgtagcaattactattctctttccggaacaacagttggttttgttgaaccatcgcagcttaaatcaaaaaaaatgtgggaagatgtgcagtccaagaagctcaatattgagagcaaggatgttcatgctttagctgttgcttggattgataccttactcactgaatttgcttttgatgaatctattgattcgacactacgaatcaaagccgctggattctacaaacccacttggggtagtcaaggacggtttggaaaagctcttaggaaaaccctgatacagcatcctgctatgggggagctttatgtggaagttttggaggagatttttcgtactcatctgacattaggaaaagatggtgtctactttcttgctccaaatgcactacgtctgaaaatagatctcttgcatgtctggaaacaatgtaatgactgcacggcactaatgccatttgctttagaacattctacttgccttgcttgtggtagtaacagtgtcaaaacagtcgagccgtcggaaagcagctatattaatgcacgaaaaggattctggcgttcgccggtagaagaagttttggtttcaaattcgcggcttctaaaccttagcgttgaagagcatactgctcaactctcacatagagatagggccagcgttcatgccactacagaactctacgaactgagattccaagatgttcttattaatgataacgacaagcccattgatgtacttagttgtacgacgacgatggaagtgggggttgatattggatctctggttgctgttgctttaagaaacgtccctccgcaacgagaaaattatcagcaacgtgctgggcgagcaggccgccgtggcgcatctgtttcaacggtggttacatattctcaaaatggccctcatgatagttattatttccttaatcctgaacgcattgttgcaggttctcctcgtacacctgaagtgaaagtaaataatcccaaaatagccagaagacacgttcattcttttttagttcagaccttttttcacgagttaatggaacaaggaatttataatcccacagagaaaactgccatacttgagaaagcacttggtactacacgagatttttttcatggagcaaaagatactggcctaaatctcgatagctttaataattgggttaaaaaccgtattctatctactaatggtgatttgagaacaagtgttgcagcatggcttcctcctgttcttgaaactggagggctttctgccagtgactggtttgctaaggtagcagaggaatttttaaatacactccatgggctggctgaaattgttccacaaattgccgttcttgttgatgaggaaaatgaagatgatgagcagacttctggtggaatgaaatttgcacaagaagaattacttgagttcctgttttaccatggtttattaccaagttatgcatttcctacaagcctctgtagtttcttggtagaaaaaattgtaaagaatattagaggttcttttgaggtgcgaacagtacaacagcctcagcaatcaatttctcaggctctgagtgaatatgccccgggacgtttgattgttattgataggaaaacctatcgctctggtggtgttttttctaatgcattgaaaggcgaactaaaccgggcaagaaagcttttcaataatcccaaaaagtttattcattgcgataagtgctcttttgtccgcgatcctcataataatcagaatagcgaaaatacttgtccgatctgtggtggcattctaaaagtagaaataatgattcagcccgaagtctttggacctgaaaatgccaaggaacttaatgaggacgacagagagcaagaaatcacctatgtaactgcggcacaatatccacaacctgttgatcctgaagattttaagttcaataatggaggtgctcatattgtttttactcacgcaatagatcagaaactggtgacggtgaaccgagggaaaaatgagggggggtccagtggtttttcagtatgttgcgaatgtggtgcggcctccgtttatgattcctactcaccggcaaagggggcacatgaaagaccgtataaatatatagcaactaaggaaacgcctcgcttatgctctggcgagtataaacgcgtttttctcggacatgatttccgtactgatttgcttttattacgaataaccgttgggtctccgcttgtaactgatacttcaaatgctatcgttttacggatgtatgaagatgcattatatacaatagcggaagcactaaggcttgcagctagtcgccataaacaactggatcttgatcctgctgagtttggctctggtttcagaattttacccactatagaggaagatactcaggcattggatctcttcctttatgatactttatctggcggtgcgggttatgcggaagtagcagcagcgaatctagatgacattcttactgcaacactcgcattgttagaaggttgtgagtgcgatacctcctgtacagattgtctcaatcatttccacaaccagcatatacaaagccgtctcgataggaaactaggtgcatctttacttcgttatgctctatacggaatggttcctcgttgtgcttcacctgatattcaggtagaaaaattgtctcaattgagggcaagtctggaattggatggttttcaatgcctaattaagggaactcaggaggcacctatgattgtgagtttgaatgaccgttctgttgcagtgggaagttaccctggtcttattgatcgacccgactttcaacacgacgtatataagtcaaagaatactaatgctcatatagcctttaatgaatatcttcttcgttcaaatctgccacaagcgcatcaaaatattagaaaattgttgcgctga

SEQ ID NO: 27417 - DNA, 1215 bp, Escherichia coli UMEA 3391-1; identical to SEQ ID NO: 27300

SEQ ID NO: 27418 - DNA, 1647 bp, Escherichia coli UMEA 3391-1; identical to SEQ ID NO: 27336

SEQ ID NO: 27419 - DNA, 1884 bp, Escherichia coli UMEA 3391-1; identical to SEQ ID NO: 27275

SEQ ID NO: 27420 - DNA, 1044 bp, Escherichia coli UMEA 3391-1; identical to SEQ ID NO: 27276

SEQ ID NO: 27421 - DNA, 5511 bp, Escherichia coli UMEA 3391-1
atgattaataaaaataaagtaactgaacgttcaggtatacatgataccgtgaaaagccttagtgagaatctgagaaaatacattgaggcacaatatcatatccgggatgaagggttaattgctgagcgacgagcgcttttacagcaaaatgaaactattgctcaagctccttatatagaagcaaccccaatttatgaacctggtgcgccatacagtgaattacctattcccgaagcagcaagtaatgtgctaactcaactatcagaacttggaattggcctctatcaacgcccctataaacaccaatcacaggcacttgagtcatttcttggcgaagacgcttctgatctggtcattgcaacaggtacaggctccggtaagactgaaagctttctaatgccaattattggtaaattggcgattgaatcttccgagagacctaaatctgcatcccttccaggttgtagagcaattttattatatccaatgaatgcattagttaacgatcaacttgctcgtatcagacgtctttttggtgattctgaagcctctaaaatactgagatctggaagatgtgctcctgtacgctttggcgcttatacgggaagaacgccttaccctggtcgtcgtagctctagacgagacgagctttttatcaaaccccttttcgatgagttttacaataaactcgcaaataacgcccctgtacgtgcggaactgaaccgcattggtcgctggccaagtaaagatcttgatgctttttatgggcaaagcgcatctcaggctaaaacctacgtctcaggcaaaaaaacgggtaagcaatttgttttgaacaattggggggagaggctaattacccagcctgaggatcgtgagctaatgacccggcatgaaatgcagaatcgctgtccagaattactgataacgaactactccatgcttgagtatatgctgatgcgacctatcgagcgtaatatttttgagcagactaaggaatggctcaaagctgatgagatgaatgagcttatcttagtgcttgatgaagcgcatatgtatagaggagcagggggagcagaggtagcccttttaatacgtcgcctctgtgctcggttggatattccccgggaacgtatgcgctgcatccttaccagtgctagtctagggtccattgaggatggagaacgttttgcccaagacttaactggcttatcaccaacctcttcgaggaaatttcgaattattgagggtacaagggaatcgcgtcctgagtcacaaattgttaccagtaaagaagctaatgcactggctgaattcgacctaaattcatttcagtgcgtagctgaggatcttgaatctgcatatgcagcaatagagtctcttgccgaacgaatgggctggcaaaagccgatgataaaagatcatagtacactacgtaattggttatttgataatttgactggttttggtcctattgaaacgcttattgaaatagtttcaggtaaagcggttaagctaaatatcttgagtgaaaacctttttccagactctccacagcaaattgcagagcgagcgacagatgcattactcgcattgggttgctatgctcagagggcatccgatggcagagtgcttattccaactcgcatgcatcttttttatcggggattaccaggtctttatgcctgtatagatcccgattgtaatcaacgtttgggtaaccatagtgggccaactatacttggccgcctttatacgaaaccactggatcaatgtaaatgcgcttcaaaagggcgagtctacgaattatttacccaccgtgactgcggtgcggcttttattcgtggatacgttagttccgaaatggactttgtatggcaccagccgaacggaccattatcagaagatgaggatatcgatcttgttcccatagatatattggtcgaggaaacacctcatgtacatagtgattaccaggacagatggctacatatagcaacaggacgcctttctaaacagtgtcaagatgaggattctggttatcgtaaagtctttatacctgaccgagttaagtctggatctgaaattacatttgatgaatgccctgtttgtatgcgtaagacaagaagtgctcagaatgaaccgtctaaaattatggatcatgttacaaaaggggaagcaccttttacaacgttagtacgtacacagatatctcaccagccagcgagtcgtcctattgatggtaaacatcccaatgggggaaaaaaagtacttattttttctgatggccgacaaaaagcagctcggcttgcacgtgatattcctagagatattgagcttgatttgtttcggcaatccattgctctcgcctgttctaaactgaaagatatcaatcgggaacccaaaccaacatcagtactttaccttgctttcctatcagtcctttctgaacatgacttgcttatttttgatggggaagattcacgaaaagttgtaatggcccgtgatgaattttatcgtgattataatagcgatctggctcaagcttttgatgataacttcagtccccaagagtcaccgtcacgatataaaatagcgttgcttaaacttttatgtagcaattactattctctttccggaacaacagttggttttgttgaaccatcgcagcttaaatcaaaaaaaatgtgggaagatgtgcagtccaagaagctaaatattgagagcaaggatgttcatgctttagctgttgcttggattgataccttactcactgaatttgcttttgatgaatctattgattcgacactacgaatcaaagccgctggattctacaaacccacttggggtagtcaaggacggtttggaaaagctcttaggaaaaccctgatacagcatcctgctatgggggagctttatgtggaagttttggaggagatttttcgtactcatctgacattaggaaaagatggtgtctactttcttgctccaaatgcactacgtctgaaaatagatctcttgcatgtctggaaacaatgtaatgactgcacggcactaatgccatttgctttagaacattctacttgccttgcttgtggtagtaacagtgtcaaaacagtcgagccgtcggaaagcagctatattaatgcacgaaaaggattctggcgttcgccggtagaagaagttttggtttcaaattcgcggcttctaaaccttagcgttgaagagcatactgctcaactctcacatagagatagggccagcgttcatgccactacagaactctacgaactgagattccaagatgttcttattaatgataacgacaagcccattgatgtacttagttgtacgacgacgatggaagtgggggttgatattggatctctggttgctgttgctttaagaaacgtccctccgcaacgagaaaattatcagcaacgtgctgggcgagcaggccgccgtggcgcatctgtttcaacggtggttacatattctcaaaatggccctcatgatagttattatttccttaatcctgaacgcattgttgcaggttctcctcgtacacctgaagtgaaagtaaataatcccaaaatagccagaagacacgttcattcttttttagttcagaccttttttcacgagttaatggaacaaggaatttataatcccacagagaaaactgccatacttgagaaagcacttggtactacacgagatttttttcatggagcaaaagatactggcctaaatctcgatagctttaataattgggttaaaaaccgtattctatctactaatggtgatttgagaacaagtgttgcagcatggcttcctcctgttcttgaaactggagggctttctgccagtgactggtttgctaaggtagcagaggaatttttaaatacactccatgggctggctgaaattgttccacaaattgccgctcttgttgatgaggaaaatgaagatgatgagcagacttctggtggaatgaaatttgcacaagaagaattacttgagttcctgttttaccatggtttattaccaagttatgcatttcctacaagcctctgtagtttcttggtagaaaaaattgtaaagaatattagaggttcttttgaggtgcgaacagtacaacagcctcagcaatcaatttctcaggctctgagtgaatatgccccgggacgtttgattgttattgataggaaaacctatcgctctggtggtgttttttctaatgcattgaaaggcgaactaaaccgggcaagaaagcttttcaataatcccaaaaagtttattcattgcgataagtgctcttttgtccgcgatcctcataataatcagaatagcgaaaatacttgtccgatctgtggtggcattctaaaagtagaaataatgattcagcccgaagtctttggacctgaaaatgccaaggaacttaatgaggacgacagagagcaagaaatcacctatgtaactgcggcacaatatccacaacctgttgatcctgaagattttaagttcaataatggaggtgctcatattgtttttactcacgcaatagatcagaaactggtgacggtgaaccgagggaaaaatgaggggggggccagtggtttttcagtatgttgcgaatgtggtgcggcctccgtttatgattcctactcaccggcaaagggggcacatgaaagaccgtataaatatatagcaactaaggaaacgcctcgcttatgctctggcgagtataaacgcgtttttctcggacatgatttccgtactgatttgcttttattacgaataaccgttgggtctccgcttgtaactgatacttcaaatgctatcgttttacggatgtatgaagatgcattatatacaatagcggaagcactaaggcttgcagctagtcgccataaacaactggatcttgatcctgctgagtttggctctggtttcagaattttacccactatagaggaagatactcaggcattggatctcttcctttatgatactttatctggcggtgcgggttatgcggaagtagcagcagcgaatctagatgacattcttactgcaacactcgcattgttagaaggttgtgagtgcgatacctcctgtacagattgtctcaatcatttccacaaccagcatatacaaagccgtctcgataggaaactaggtgcatctttacttcgttatgctctatacggaatggttcctcgttgtgcttcacctgatattcaggtagaaaaattgtctcaattgagggcaagtctggaattggatggttttcaatgcctaattaagggaactcaggaggcacctatgattgtgagtttgaatgaccgttctgttgcagtgggaagttaccctggtcttattgatcgacccgactttcaacacgacgtatataagtcaaagaatactaatgctcatatagcctttaatgaatatcttcttcgttcaaatctgccacaagcgcatcaaaatattagaaaattgttgcgctga

SEQ ID NO: 27422 - DNA, 1215 bp, Escherichia coli UMEA 4076-1; identical to SEQ ID NO: 27300

SEQ ID NO: 27423 - DNA, 1647 bp, Escherichia coli UMEA 4076-1; identical to SEQ ID NO: 27274

SEQ ID NO: 27424 - DNA, 1884 bp, Escherichia coli UMEA 4076-1
atgagttaccaatatagccaagaggcaaaggaacggatctctaagttgggacaatccgaaattgttaactttatcaatgagatttctccaactttacgacgtaaagcttttggttgtttaccaaaagtaccgggattcagggcaggacatcccactgaaattaaagaaaaacagaaaagattgattgggtatatgttccagtcacatccttcctctgaggagagaaaagcatggaaaagtttttctcttttttggcagttttgggctgaagagaaaattgacaaatcatttagtatgattgataatttaggattaaaagaaaactctggctctatttttattagagagcttgctaaaaactttcctaaagttgctagagagaatatcgagcgcctgtttatctttagtgggtttgctgatgatccagacgttataaatgcatttaacctttttcctcctgcagttgttcttgcccgcgatatcgtggttgatactcttccaattcgtttagatgagcttgaagcacgtattagtttaattgccgataatgtggagaaaaaaaataaccatattaaagagcttgagttaaaaatagatgctttttccgaacggttcgataattactttaataatgaaaagagcaatttaaaaataattaacgaactacaatccttaataaactcagagactaaacaatctgatattgctaataaatctattgacgagctttatcattttaatgaaaaaaacaaacagctaatattatctcttcaagagaaattagattttaatgctctggctatgaatgacatttctgagcatgaaaaattgataaaaagtatggctaatgaaatttcagagttaaaaaatgcattaactatcttgtgtgataataaaagaaagaataacgagttagattatatcaatgaattaaaaaaactcactgaacgaatagatacacttgaaataaacacatctcaagctagcaaagtgagtgtcaccaatagatttacaaaattccatgaaatagcgcactatgaaaattatgaatatctttcatcctccgaagacatatctaatagaatttctttaaatttacaggctgttgggttaacaaaaaattcagcagaaacattggctagattgacattagctaccttcgtttctggacaaatcattcaattcagtggctctttggcagatattatcgcggatgcaattgccattgctattggtgcaccacgttatcacatatggagagttccagttggtattatttctgacatggattcttttgattttatagagactatagctgaatcatctcgctgtctccttttgaaaggggccaatctttcagcatttgagatttatggagcggcaattagagatatagttgttcaacggcaaatacatccaacaaattatgaccatctggcattgatagctacttggaaacaaggccctgctacattccctgatggaggaatgttggccgagttgggaccagttattgatactgatacattaaaaatgcgtggtttatctgctattttaccccaattgaaaccaggttgtcttgccaaggataaatggacaaatattgatggactacagcttgatagtgttgatgattatgtagatgaattaagagcattactggacgaagctggatttgatgggggaactttgtggaagagaatggttcatattttctatacttcactcataagagtccctaatggaaattatatttatgatctttattctgtcttgtctttttatactcttacatgggcaaaaattaaaggtggccccgtccaaaagatagaagatattgccaatcgtgaattaaaaaattatagtgcaaaaatatcttcttga

SEQ ID NO: 27425 - DNA, 1044 bp, Escherichia coli UMEA 4076-1; identical to SEQ ID NO: 27276

SEQ ID NO: 27426 - DNA, 5511 bp, Escherichia coli UMEA 4076-1; identical to SEQ ID NO: 27407

SEQ ID NO: 27427 - DNA, 1440 bp, Firmicutes bacterium CAG:65
atgtataaagcatttgatactgtatttcaaaaagtagtagatgcgaggattattgcaaaaacttcatatactatgtctgatgagggggttagatatcaatgtttgtgctgtggggaggaagtatatttggctgcagctaatagcactgaaaagaccccgcactttaggcatagaaagggaaataatgatatagagtgtgaaagatatcttggtcagcctggggcaatcgaagaatacgctgctcttagaagagaaaataataagacgcatgttgcatttttctttaataaaaaccaaatgacatttgagataggtctagtgttaactgatgaagaaattgacacttactgtcaaaaccaaaggaaattatgcctgtatacaaaatattgtacgcttccttttttaaacattcctattagtagaggtgtacttagatcaaatgaaatgaactactatacaataactgaatactcgaatgactattatgtatccttagaaggtgaccctttgaaattttcatacctagagataataaaaaaaggttacaaaattaacatttacagaataaacaaacaggatgaacattacaagaaaaatatgtctggattaatatatacagatgtggaatacgtagctatttcagaaagcaaaatgaatgtaaaggaattggtaggtctatatggtatagaagtagtgaaggacgagtctaattttgtaactatgggaaggactttttatgttgttgaattcgtggttaggaaagaaaattatgaaataaaaagatattttcaaaaacatggctacaaaatcgaaacgtcagaatcattagagattctttggccacccatgtattctacagacacgacgttagttactacagcagataccatatatgtttcttctagttttaggttgattcctcatggaaatattaatatagtgggagacaaaatagaagaggatggaggagtttataagatttctatagatacaagaacaattattaatgaaaagaatattgatgtattaattgttaagaataatgttctatgtcatgattattcgggaaaagaaccagagctaatttatctcaataagtttaatgtccctaatgactacgattattttcttttttcaaaagatggttgtgtaagacttatttctggatctaatgtatatcttacacaaggggataaaatcataggatacaagaatggtttgattaaggtgtatattaatggagtcccggataacgtatcttcgcttgaaaagaggataaatgatattgtaaaataccatcctcaatcagaaccatttgtacctgacgaatttatgaacattgaagtaaatgatattattttaaattatcttgaaacttgctatagatccggggtgataaatagcaccgtaaaaagatatattgaggagaaaaaaatttga

SEQ ID NO: 27428 - DNA, 1908 bp, Firmicutes bacterium CAG:65
ttgaattacatagaagaattaacacaagatgaattaaaatacatttgtaagacaattccgtttagcgctgcaacagggtattttagaaggtatcctaaagagtttacaaaaatacgtccaggctttcgggttaaatccttgacagaagagatggttactaagcttttatatgattttcgatcgagagaattcataggtaactttattactaagactgttaaccagtggataaaagaaatagatgaagaattagaaaagatacttcaagagggcaaaacgcatgaggcagcatatattgaagtactttctcgctctttttttgtggacaatattcccttatattataaaattataggagaagaaaaaacagaagaataccttgcagttatgggcgaggctgtactgtaccaagctgacaaaaataaaaataatcatgcagaaattgagcagattaagaaaaaggaagctgaaagcgataaaaggatagaagaacttaatcagaaaattgcagaaggagaaaaaaagacagatcgcttaagtaagaaggtaatggaccttaattctatacttgaaagaaaagatgccataatagatgatgaaaaaaagaaaaatgatgagatgtcaattactattgcgtctttagaaaaaaaacttacaaaggcagaagaagaggacacaaaaaaagcagaggaatttgttaagaaaacggctcttttgattaatgaatctgaaaaatatgaaaaacagatagatgaacttaaaagtcttttggaagatgcgaacaacactattaatgaatatcaccaaacaattgtttcttcaaaggatggaaaagatgctttaagtgctgctaataaagttcttgagtcgcaagtctctgatttaaagacaaaaatacacgaattggaagaggagatcattacatttaagaccgataaaaatgaatcagaggaaaaggttaatcgtttacagaacgataaagccgcaattgatagttataatgaggaattacagcagacaattcgagatttaaaagaaactcttgaaacagaaaatgattctacaatgaatacggatttatacgataagaatgatgaatcattattacaaatgacaccgttttgtccagaggatatggatgattttgaagaatattttttatacaattttgaaaatattggtatttgtgagacagacgaaggagcaagttctctgatcgaatatatcaagcagattgtatttgatggtataccactgctgattaaacgagggcctgggattaatcttgccaattgtttagtaaatacgatttgtgggcatagcagcgcacaaatatattcatacgagaatggaatacaactttcagacgtagatataatgctgggaacatcaaaggaacggattgtttgccttgatggttttgtgggaaattgtaatgaaattgagcttttagcaatacttggaaagcatcgcaataaaattattattttgacatatatgtatgacaaaacattaaaatacatcccttcagagattctttcgagtgtatggtttattagcatggataaatttagtgcaatcatgcagataaaagatattacagaagattcatctgaaattttggaaaaaacaaatttttatcagaaaatatgtaccgacaatcgtagtcgtaaaatttttatggaaattgcgcaagagtgtggtattgattatggaaccgcatgtgcaatctcaaattctattaaagacgaggcagcaatgaataggatacttcttttcacactgctaccatatgtagccaatgtgcttggaatgaacccatataattgttctaaaagattacagaaatatgcgggagagaccggaaagtgtctaaatagagaaataataatgaggtggtttggatag

SEQ ID NO: 27429 - DNA, 1017 bp, Firmicutes bacterium CAG:65
gtgaataaactaatgaggataatgtcggagaatatgaatatttccgcatatacaggagagtccgaaggggcatatgaatatagaattctatattcagcattaggcctatggtgtcttacgtcagcattgagtgaaaaagaagggaaaaaagaaattagcaaaaatgcgcagactatcttattgcatagtttactagatagatatctgaatgtatgtccgttggcaaagcaatttctgacaggaatccgaaatgttgatattgcagttcatattcgaaatgtatatgaacaaatggggtatttggtaacgcttgaggacaatcaaaatgtattgaatcaaggaggagaaacaataagaattacagataaagatagtatttttttaggaatccctaaagaagagtattggatgaatgggttggggatacacataaaaaatagtggaagagaaatcccgcttaccgaataccttgtacgcgataatttaatgccagaagagtacttgatgtcttgttttaatatatgtgattttgatgaaaaagatatagactgcttggaacttgaatttttcaatccattttacagaggaaaaatttctgaagcatggaaaaaatatcgtaatgctgatatgactattgcaagaaaaagcccatttggtcccttctatagagtaatggaggatacagatgggagactggtttttgcaatcgaaaataataatgattatatagattcaaaaaccggcgcagaatttagaagaatatatatagcacttagagagtactacttgaatccaatggtagtatatgtttgccctattgataaagaatattcccaaatcagaattctaggacagattcccaatcgagagtactattatatgttacttaatgcgtggcctcaaaagtcttttattgatagaaaaaattttattatacgaaatgagctaacctcgcaagtggtaagtttattaacaaatattggattcaaagcaaaagaaggtgagttttatggatag

SEQ ID NO: 27430 - DNA, 5199 bp, Firmicutes bacterium CAG:65
atggatagaaaaacaaatggagtgcagcagtattatcaggaaataagaaatagattaaaaaattatataaaatcagattatctcgctaatagtgaaacattacttctgtatgcggaggatatacttggaaatgattgtaatgatgacatcaatattgcaaaagagccatatattgaaacgtcttcatcctataaaaaggtgatagatggaataaagattgctgacattcctgaaaatgtaagagaagtgcttttaaaacttgttaatgctaatttgggaatatattccactccatttgaacatcaggttagggcgcttacaggtgctttagatggaaaagatttatttgtatcaactggtactggttcaggtaaaacagagtgttttctttggccaattattgcacgtgaagttaaagaggctttggataggcctaaagattttagccttcctgcagttaggacgctcataatttacccaatgaatgcattagtatctgatcaacttgcgcgatttagaaaaattatgggatccgaagaatttataaatatttttacgacatctttaggaactgaacgcattccgcattttggaatgtatacaggaagaaccccctattctggtgaatcaaagaaacaaagcaatattcaacttgcagaaacttttcgtgcgcattatttgattgatgaaaatgcttcacctagtgagatagaaatacagaaaagaagaatagaaggacttaagagtatcaataaatatccggtaagatatggtggagatgcgggccttaagattttcattgaaaatttggaaaaaggtattcataatccgggaccacttgatgcagagtatattactcgttttgagattcaacagaatacaccagatattttgattacaaattattctatgttggaatatatgcttatgcggcagctggaagctggtatttgggacaatactaagaagtggttggaaaagtcggaagataatcggcttatggtagttcttgatgaagctcatatgtatagggggtcctcgggtggtgagattgcgcttcttttggacagattgttttctcgtcttggcattacactcgataaagtgcagtttatccttactacggcgagtatgccatcatcaacgacatccgatgaggcggctatcgctagtttctttgagggacttacagggaaggagtatgataaatgcattccactttttggtaaaaaggaagatataaagaaagaatttagagttgtaacggatgccaaagctcttgtagcagttggcacaagtcaagtgacagcagaagaaatatgcgatagaataaggtcttttgctgaaaaagtatttcgtgtgaagcttccagatgaattctcaacatcagatgctcaagagtggttgtttgataacctgcctgattacgaagcgtatgttatgcttcataaactttgtcgcgatggtgcaaagccacattcattgttgagaaaagaaatatttggtgatagtgagtatgcagcagatgcattagatgcgcttcttatagttgtatcgcttgctaaaaaagaaggaaatattctgttccctgttcgcttacatatgtttgtgagaggacttcagggattatatgcatgttctaatcctaaatgtacgtgtgacgggaaaaaatattctgagaaagaaaaacttcctcttggaaaggtaatttctattccgagagaaagatgtgattgcggtgcaaggatatatgaacttgtaaaccatgttaaatgtggggccttatatttaaaagtatatgtacagaagatgacaggaacaggctattggtatgcttttccaagtagggggcttagaggtggtgcaaatgatcttacagaaatgctcctttatatttgtcctgttgattatgagctaaacataaaagaaaagctaggataccttgatccagttacgggaaaactatatttgagttatcagagcgatgaaactttgcttaaagtagtgtaccctgagtatgatgaaaaaaatgattattatatgtttaaaacgtgtcctaaatgtaaaaagggtatgccattgaaaaaaccgacagattttgctactaaaggtaatattcctttttataatctgacaaaggcgcagttcgaattacaaccaccaagatcagatctaattaatgaaggtaagaaagttcttttgttttcggattctagacagaatgcggctaaacttgcattggatttgtcaaaatcatcagatgcagatggatttagacagtgtgtgttacttgcaacgaacaagttacaagaggatggacgggaacattcattgcaagagctctatcaagcatttcttgaagtttgtattgaacagagattgtatttttttactggaaatagcagggaaaaatttaaagaacatttagatactgcaatgatgaagataagaagaaagaaaagtctttccagagtaaattttgatccgcttccatctgattattatgagcaacttctcactttttttacagagagtccacgctcttttaaggatataggtcttggatttttggcccctatggatagtgctttagaggaatgcttagaagaattagaagatgaggatgatgtagttattaatgagaagctacttagatctctattagtaatattgttttgggatgttatggatggaaatgcagcgttgggcaataatattgaagatgatattcgtagaaaactacctggtcgcagtagaaatcaagcatttgggattgatggagattttatatgctctatagacaaaaaatatattgctggagtaaaaactttaactgaacttgatgatagacaaataagaaaactcttagataagattaagcgtagtttctttggtacaggtgcagagactgatcaaaaatactatcttaaattagataccgttaaaatcgttattacaaatgatgacttcaaatggtatcgttgtgagaagtgtggaaagatttcaccatatatgctgggtaagaaatgcggagcgtgttttgattctgaaaaagttcatatgttaaaaagtgaagaacttactcgttttgatttttggagaaaacctgtgttggcagcattgaacgaaggtgaaaaaattcatactatcaatactgaagagcatacggcgcaattgtcacataaggaaattacaagtgatattcttagtagaactgaagattatgagatacgctttcaagatattgatgtaggcgaagctggtgaagagtctattgatgtcttaagttgtacaacaacaatggaagttggtattgatattggttcattaacagccgttggattaagaaacattcctcctatgagagaaaactatcagcagagagctggtcgcgccggtcgaaagaatgctgggatttcaacgattgttacatatgcttttggaggtgttcatgacagtcattattttagacatccggaagaaatgatttctggtgacccgagaaaaccctggatagacagagacaatcctaaaattgttcaacgccattataacatgaaggctttaaatagttttatgtcgaccgaagcgatgaaaggactatatgatagtattactaaagtaggaattgtaactttttgtgagaaattatcggatgcatttattgatcacgttagaacgcttgattttccaaccgatggaacggtcgaaatgttttgtcaaattagagaaaaggttctttcgaaaggaaaaagaagtgagtattttaatggggacaaggaaacttcggcatttgatgtattttattcagaaggttttattccgtcatattcttttcctaaaaatgtggtaaggttttttgtagagggaaagacagaaaatggaagaagattatcttcgggaattgattatgctccggaaagagatattgcagttgctattagtgagtatgcacctggaagatttattacaattgataaaaaaatttataaaagtggagggttgtacgccaatcccagacccaaaggatttgaaggtaatcaggcagaatactatttcacaagcaaagactataagaaagaaattattgtatgtacagaatgtaattggtttggcgatggaaaggaagcctatgcagaatgcccatattgtcattcagctgtcgagaggcatgtgatgattaagccgtggggatttgctccagcaaaaggtgatccagttaaatttgaagatgaggaagaacaaaagacatatgcggaggccccttattattcgtatgttcctaaggacacagaaatgcagagttataggaatagcaatatatgctttgctaatcttgaaaatcgtcatgtgcttacagtaaatatgggaaaaaagaagaatggtttcaatatttgcacaaaatgtggaggagcagaagttgcagaagctgtttctacaggaaattattatttttcgcagccgtatcatgataggtatttatgccgccatgaaggaactgtggcaacaaatatatacttgggatatgaattcctaacagatatgtttacactggacataaagtatgacacacagaaaatggtatccaatgctgatagtgaagagaagaatattcttcgttctgcagcaacaacacttcatgaggctcttaaaaaggcagtttctctttcgctggatatagattataatgagataaatggcggctggagaactcgtttcgaagaaaacggtgaagcacatattgagatgtttttctatgataatttgacaagtggtgcaggttattcatcattattgggaaagactgaagttcttgatgatgtctttaaacgcgcgtatcaaattttaacagaatgtacatgttcaagggcgtgtaaaaattgtcttgacaacttttataatcaaagaaatcatgacgtttttgatagaacacttgcggcacagcttctggagtatgctcttaataacaaatatccagaggattattcattggaagaacagaaaaaatatctagtaccaattaagaaacttattgcagaagataattctacatctaatgaatttagatttgaagtaattccagcattaaggaaacgtattcgtgatgagaaaggtaagatgtatcttaatccatacaacttatcagattggcttcctaatgcttttatagagtacataagaaaagtacatgaacaataa

SEQ ID NO: 27431 - DNA, 1299 bp, Geobacillus icigianus
atgataagccgcccctttattacatttgaaccattggaacgtgattgggagctttttattacctttccttatttaacgccttctcaagtgatgcaatgtgacgtgcatcatttgcactttaaaataaaatgcaatgaaatgaattcctttatttcctctgcacagctttggcctaactctagtgaaaataaactgtggattgttccaaagcagagctacagtttttcttttgcgactagaaaagatgaagaatgttatgagaaactccgcttgttttggcctgaatatattaaagggtttcaaaaccatacatatttgtttcggccaataaaccaaagcttttgcatgattgagcctagagaactatcactgagtgacacgttttatatgatgtcacggaaaaaaatagagtttccgagggaaatggatgtaacaccattaaatcaaaagtatggatggtttgcctataaaatccgtcttccttttctattggcggagccgttaatagagtggtttcggaaatttggatatgacttgaaaccgccgtattattatttggatatagtcgatccttcagtttttggaagaaaaggcgaagcgatgttaatcggaacaggaaaatgtagaatccaaatatcttttcgtgactttcaactgcaaaagtacagcctagttcatattcaaccggattatacgagtcgggaatatccgctgtcgagttcttatgttgacattatattgcataaaaagggctttcatactttttacattaaaaaacatgaaggaaagatgttatatctattttatgatccaaacgcgaacccatgtttttcggaacgattggaatccggggttgtggttgaccagcggacattggcgctgtgtgaggaaaagagcattttgaaatatacaacggtttcagtaacagatcctcttttgtttccttactggatcaaagaaaaaaatcggtttgccagagagctcagtcaagggggagagttttttcatccatctgttgagaagctttttattcctggggtttgggcgtttgacttttctgctcaagagatgtgcgatttagcccatcccgattggcgcaaagttttattggcgtatatgcagcttgagcaaacaaagtgttgttggatttcaaatgaacaatatcgtttcctagagttttggttgcaaaatgtaggagataaaatattgcgggcaaaactagcctactatgtaaagacgtatcgaaacaaggttccaaaaatagtaaaggaatttattgatggggggagatcgtcgtga

SEQ ID NO: 27432 - DNA, 1983 bp, Geobacillus icigianus
gtgaagacgatatttgggattgtcgaaaaagaaagaaagccaaataaaaaatatgtgtttgttaaagttttagcggaatatcgcgatcaccagttaattgaggttcaggaagcacgattgcattatccaagtgagggggaagtgatatggtctcctgctcctgaagacattcacgcagggaaagtgggattttatacaatcgaagaaagaaatgaggaagactacgcgggaagacttgtatattcaaagtttatcgtaaaaaaggaattggagaatttgaaatattacgaggtatttccgataccgttttcacttgcgcaaaatcatgacattgtttatttgattcagaacggggttgatgccccgcagcagtttagttcagaaattttactcttaacgaacgatgattatttagttggaccttatcgtgtcaaacagacaaaagaacaaaaatgggtgattgattcgtccgacgataagttgctcgaaatacgaaaaaaagggatgcatctcgttaaatataatgataagaacgtcgggatcgagcgatactttgtatcggcgatgctagcgagtcctgtcgaagattatctcgattgtgccactaacgatcggattatgcgttatgctttaaaaacgttgaaagatcagcaacaggttcaggaaatttcacgaaaagtcatcagccagctatccgaattggttagcgatctccctccccaagttcgttatgagcgcattatgcgagccgttgagttgttggataaatatcaaataacaaaggaagatattggtcaatttgaagaagaattattacagtacccagtgattcaaagggaaatagaggataaattagaagaaaggcttgctgcggagaaagcaagaatcgaagatgagcatcgaaaagtattgaacgaaacagaacagttgcgtagaaaaaaagagtatttgctcgttgagatggaagaaatcgaaagacagataaaagaaagggaagaaagactaaaaaaagccgataaggcattggaattaaagattaaggaaatgaaagataatattttccatactttggttgatttactaccttttacgaatttaggcttaaatatctctgtgcataatgaatcagacgatcgaaatcattcgcaatgggtggtgaaggatgttgatgaaacaacagtttattatgaagatataaatcatttaatggcatccattgcagaaaacctatgcatgattggcatgcaggagaataaagcatggttgacagcgaaaacgatcatcggagcgattttgtttcgtaaaccagtcgtggtcaaaggagaatttagttttgaactgtcacaggcaatcggctgggcggtttcaggaaatgatcatctaacggtttttccagatataaagaattttactaataaaacgttgatcaattgcttttctcattatacacggcctgattgtgtaaagtctcttcatttatgccaaattgaaaattcgcctgctgaattgtatttacaatcgtttctcgaccattggcgcgtgtctattgatgagtcgttgccagaattgattttgataagcataaaagaagaaagtgagttgaccgattcgttcattcaaaagctatcgttttcgcctgtgattagcgcaaatgaaatgataacaactcctgatattcggttactaagaaggacgcaccgtttagtctttgggtccatccctgtacctttacttgtagaagctaagatattaaaagaaaagtccagtgagttcaataattttgtggaaattgtgcaagaagtcatgtcgtttacgaaacaaaaagaagcatttaaaaaatggtttcggttattagaggatgaacggctcgaggaagaagctgtgtctgtatgggtcaccaaggtgctactggagccgtacattgctcgtgagcacgcaaaaaagatcttagaagagtttgacagcgaaaatattttgatttag

SEQ ID NO: 27433 - DNA, 954 bp, Geobacillus icigianus
atgttgacagatgcatggagggatacaattatacagtttagacagataaaacgtcatgccctttctttggtgcacttttatgcgttcgaggactataaaatgaacgcggtgcattttcagcggcttatcccgcctttgcaaagattgataaagggatgtttttttgaagatcttcgaaacgttatgaaagaagaaggtcaaaccgaagcacagtcattgctcgaattgttatctggtttaggggaaatattgaagcttgccaatggatattatttgccgttgcccccgcgctgtgtcgaacttcccgtgtctaaaagcttggttgtgcttagcaaccctgaaggaaagagcgacaaatattacggatgcggcaacggctatatggaagaggggagtcatgttccaacgttgatgattgacgaatggatgccttccccgactgtaaatgaatttatcgaaacgctcaaattgcagaacccagtaaaactaagcgatgaaccaacagaactatttttgcctcaaaaacggcgcaaatggcacccatttcaaatgaatcttgtatcaaagtctgattgttatattgctaggtatgcattaaaaaacagtcaaccgctctacttttgggttgagaacatggggaggggggatgcgcgttattacaagatacccgaatattatttagaaacggccaagtatgccttagagtataaggctcaggtgaaaacaacgataaagtgtgcaaaaattcgtgaggatgttatttatgtccgccttttcaaaaagcttcctatgtttgaacagaagatggcgatgcttttttgttttcccctttcttttatcaaactggttgagtggattgtgcctttgtggcattattcagattttatttggattttgcggcgtttggggattggtgaggattcaatacgatgggaaggagttgaaatggaatga

SEQ ID NO: 27434 - DNA, 5361 bp, Geobacillus icigianus
atgatggaatttaccattaactctgtttctgcgcggctgcatcaaaaattgcgcgaatatattgaagcgcaatatccaatcagtcatccctctttgctgttagagcgtagagagttattggattcaccaggggttatttcgaaggagccgtatattgaggccactcctgtttatgagctggggcctacctacgagcagatgaatttgcctgctcattgcaaagaagcaatgacttatttttcggagttatttcctagtgtaggaatttataagaggccgtacgtccatcagcaggaggcgcttgaatcatttttagtggacggacatgatttagttgtagcgactggaaccggctcaggtaaaacggaatcattcttacatcccattttaaactcattaattgatgaaggatttaatagaagggagcagtttcaaacacatgcggttcgggcgttaatactttatccgatgaatgcgctagtcagcgatcaaatcacaagattgcgccagctttttggtgatgagagagtgtccaagtactttcgagatcattttggtcgtcatccattattcggtatgtacacatcaagaacaccttacccgggagagcggacaaaggaaaaagacgactaccagttgaaggagattattgactattatttggatattgaaaagaatcggccacagctagcgctggaaatgaaaaaaagaggaaaatggatagcgaaaaatttaacaaacttctgttcaggcaaaagaggcgactggaaatctcgatatttgacctctcctgatgaccgggaattgtttactagacacgagatgcaaacgattcccccggatattttggtaacgaactattccatgctggagtatatgttgatgcgcccgattgagcggccaatttgggagaaaacaagacaatggctcgcagaagatgaagcgaacacattgattctagtacttgatgaggcgcatatgtaccggggaacgagcggtgcagaggtggctctactcattagaaggctgcaggcaagattaggaattacacgcgatcgattgcgctgcattctaacgagtgcaagtttgggcgcggaggatgatgattcggcggctattgaatttgctgaacaattaacgggtaaactgaaaaaacgttcgtttaagttgatcaaaggagtgaaagaaaaaagaaagcccggaagaattggcacgacagaagaggcctatgcattcgccttgctagacagcgagcagtttaccaatcgcattcatcagtacgatacattgcggtcgaatctcgaggctgtagcaaagcggcttggatggggagatgtcccacataatttagatgagctgccgtcgtatctatataaaagtttagacggttttggaccgctcgaattaattattgaacaaataagcggaaatgctaaaaagttcagcgatattgccaagttggtatttccaagtgtcgatatgaaaacggcccaaaaagcgacgagccatttattaatgttggccaatgcagcgaaggataaagagcgagtgttattgccggtaaggatccatttattctttaaaggtgtatcaggcatttatgtttgcaccaatccgaaatgtgaggaaaaaagagtaaaaggaaacaattcgattttaggaaaaatgtatgattctccgaaattacaatgtacttgcagcaaggaagcaagggtctacgaattgcttacccatcgaaaatgtggaactgcgtttattcgagggtatatatcgaaaaaggacggcaactatttatgggctgaaaaagggaaaggcattgttggcgaggagttgacagagattcacttgctggttgaaccgccctatgaaaaaatacaaaaaggagaacgatcggtgcgtcctgtatggctcgatatcaggacgggatatttaatgaagtcgccgccggaagatcctgaaggttatctaaaattgtatttgcctcatgatgagacaaataagaacaaaaagaaaaagcaaacaattacattccaacaatgtccgtgctgtatgagaaaagtgcagggaacgattacggacttaaaaacaaaaggtgagcagccttttgctaatttagttcgcgagcaatttttattgcaacctcctgtaaagctgaataaacaattgcctaatgagggacggaaagtgctactgttttctgacggacgccaaaaggctgcacgtcttgctagggatattccccatgaagtagagctcgactcttttagacagtccattttattggcggctcaaaaattaattgatcaagatattgaaccgaaactgagcggcgctttatattgttcgttgttgcaagtgattgatgagcataaattatacttttttgaaggacaggatcgaaaatcgttggcctatcatgttcaaattttacacgaggattttgatggcgactatgaggagctgattgaaaacggcgacattgaactgctgcctcgtttcaaaacagaacttcttcgccagctttgccatccactctactcggtttatacaacggccacaggctacgtagagcctgttaaaagagaaatggcaagagtagaaagaaagctaaaagagatattgtcgaaggaagacatttatgtactgactatgctgttcattcaagaaatgctggatagagtggccatagattcaaccattcatttctatgagaggctgaagattagagggttcgggggcgatgattggggagttgagaaaggttatataccgaaaaacttagagaatatcattcatctttatgttcaaagtgaggagcataagaaggaaattgtcgatgcattgtttaaattgtgtacagagtcggaagggagatattatttatctcctagaaaattaaaactgattcccggcatttatacaacttggtataaatgcaatgattgcaaagaaatgaatatcgttgcagcaaaaaacaaatgtgtgaattgtttatcggaaaatatcgagatattaaacgtgaacagtaaacggttggattcagaaaaaggattttggcgttcacctatacaaaaaatattgacaaaccatgagaaaatttcgaacatcaccgttgaagagcataccgctcaactgtcgcaaaaggatgcgaaaatagcgatcgcaacaacagaagagtacgaattgcggttccaagatatcatattagatgttttggaaggacctgtcgatattttaagctgtacaaccacaatggaagtcggcgtcgacatcggttcactgactgccgttggactacgaaatgttccgccacaacgggagaactaccagcagcgtgcgggacgtgctggacggaggggaacggctttatcgaccgtagttacttatgcccagggagggccgcacgattattattattttcaacagcctgaaaaaatgatcagcggttcggctcgcaaacccattgtttatattgataataaaaaaatcaccaaaaggcatttgaacgcatttctcattcaaacgtattttcatgaaaacgtttctacaagtgccgttgcgtcaagcattctcagcagttcgttaggtgatacaaaatcattttttgaaggtactccgccttttaattatgagcagtttaaaaaatggctgaatgacaatatagcctgtcgttttcgcgactacccggtgatttttgacttgattccggatgaggttgtttcgacagaaggaatattagggggggatatggtagagcgaaaatggtatattgttaaggaagcatgtaatgagctagtaagcgagttggaacggaattatgagaaagtcaaacatacaatacaacccatcgatggtgacgatatagcggaagtaaatccgaacgataaatttctcgattttttgttcaatcacggcttgcttccaacctatgcatttccacaagatttatgcagtttttacattgaaggaaaggatgaaagaacggggagaataatcgttaaacaacgaccgcaattggagataaacagagcgttgagcgagtatgcgccaggaagacaaattgttgttgataagaaaacatatcgaatagggggaatttatgtacctaatccacacgatccgttaaaaccggctaaagatttgttgcttgacagtttgccggttatcacctattgtgaatcgtgcttatttgtttctttagatccaatccaaacaaaaaaatgttcagtgtgtggtggtgagttgaaaaacagtccattgttgcgaccaacggggttttcgcctgagaaagggatggaggtgaaggaaggagatagggaacaggaattcacctatgcagttcctcctcagttacctattcctgtgtctggcgaaaaactaagtttgaaggcttattcaggttcagaacggcttcaatatgctaatgagatgaacaaacagcttatcgtcatgaataaggggacggatcgacaggaaggattcgaaatctgcacggactgtggggctatttggccagcaggggagagtgaacataaattggcccatgatgtaccttacaggttgaaaacacatcttggtcaaagggatagccgctgtagaggaagtattatgaaagtgtttcttggaaatatatttaactctgatttattactattgcggatgagttttgatgaaaaagtcgattttcacccgaatcatcaatgggttcatgacggtttgaagacgattggcgaggcgctcgtattggctgcaagccgggtattggacatcgattataatgaattgctgtcaggatatcgcattcttccattagaaacaaaaagtccacaacatctgtatcaagccgatgtttatctgtttgatactttatccgggggagctgggtattcacacattgcaggggaaatgctccctgatattattaaaatggcaagggaaattttgcatgaatgcgaaaaccattgcgagacatcttgctataaatgcttaagacattactccaatcaattttatcatcatcagttaaatcgttttgtcgccttagagttgcttgattatatcgttaaaggtgaattgaaggcattaacattaacggaacaacaaaaagtgttagcccctattaagcgcatgttagaaatacacaatgaaaaattcgaggaattcgaagaaggaggacaatatctcattaaagtcaaatcgaaagggaatcgcttaattggcgcaaaaaataatatagaaaggatgttggtatgcgcatacagccatcctgctattgcgtatgtttcggcttatgaagttttgcatgatttgcccaatgtatatttaaatgttgtagaacgcaaacaacagttgctcgtttga

SEQ ID NO: 27435 - DNA, 1521 bp, Geobacillus sp. B4113_201601
atggaaagagcatttaacccgttaggacaacttgttcatgcgaaaaacgcacataagtatggggttgtctatacgtgtccatgctgcggcgcgagagtatttaaagcagaaggaagggtgcagtccgctcactttcgtcacgaacgcgggcaagggtctgaacgatgcgaactttatgttcaacgtttgtcaggttcatctcatcttcatgattattcagtgatgataagccgcccctttattacatttgaaccattggaacgtgattgggagctttttattacctttccttatttaacgccttctcaagtgatgcaatgtgacgtgcatcatttgcactttaaaataaaatgcaatgaaatgaattcctttatttcctctgcacagctttggcctaactctagtgaaaataaactgtggattgttccaaagcagagctacagtttttcttttgcgactagaaaagatgaagaatgttatgagaaactccgcttgttttggcctgaatatattaaagggtttcaaaaccatacatatttgtttcggccaataaaccaaagcttttgcatgattgagcctagagaactatcactgagtgacacgttttatatgatgtcacggaaaaaaatagagtttccgagggaaatggatgtaacaccattaaatcaaaagtatggatggtttgcctataaaatccgtcttccttttctattggcggagccgttaatagagtggtttcggcaatttggatatgacttgaaaccgccgtattattatttggatatagtcgatccttcagtttttggaagaaaaggcgaagcgatgttaatcggaacaggaaaatgtagaatccaaatatcttttcgtgactttcaactgcaaaagtacagcctagttcatattcaaccggattatacgagtcgggaatatccgctgtcgagttcttatgttgacattatattgcataaaaagggctttcatactttttacattaaaaaacatgaaggaaagatgttatatctattttatgatccaaacgcgaacccatgtttttcggaacgattggaatccggggttgtggttgaccagcggacattggcgctgtgtgaggaaaagagcattttgaaatatacaacggtttcagtaacagatcctcttttgtttccttactggatcaaagaaaaaaatcggtttgccagagagctcagtcaagggggagagttttttcatccatctgttgagaagctttttattcctggggtttgggcgtttgacttttctgctcaagagatgtgcgatttagcccatcccgattggcgcaaagttttattggcgtatatgcagcttgagcaaacaaagtgttgttggatttcaaatgaacaatatcgtttcctagagttttggttgcaaaatgtaggagataaaatattgcgggcaaaactagcctactatgtaaagacgtatcgaaacaaggttccaaaaatagtaaaggaatttattgatggggggagatcgtcgtga

SEQ ID NO: 27436 - DNA, 1983 bp, Geobacillus sp. B4113_201601; identical to SEQ ID NO: 27432

SEQ ID NO: 27437 - DNA, 954 bp, Geobacillus sp. B4113_201601; identical to SEQ ID NO: 27433

SEQ ID NO: 27438 - DNA, 5361 bp, Geobacillus sp. B4113_201601
atgatggaatttaccattaactctgtttctgcgcggctgcatcaaaaattgcgcgaatatattgaagcgcaatatccaatcagtcatccctctttgctgttagagcgtagagagttattggattcaccaggggttatttcgaaggagccgtatattgaggccactcctgtttatgagctggggcctacctacgagcagatgaatttgcctgctcattgcaaagaagcaatgacttatttttcggagttatttcctagtgtaggaatttataagaggccgtacgtccatcagcaggaggcgcttgaatcatttttagtggacggacatgatttagttgtagcgactggaaccggctcaggtaaaacggaatcattcttacatcccattttaaactcattaattgatgaaggatttaatagaagggagcagtttcaaacacatgcggttcgggcgttaatactttatccgatgaatgcgctagtcagcgatcaaatcacaagattgcgccagctttttggtgatgagagagtgtccaagtactttcgagatcattttggtcgtcatccattattcggtatgtacacatcaagaacaccttacccgggagagcggacaaaggaaaaagacgactaccagttgaaggagattattgactattatttggatattgaaaagaatcggccacagctagcgctggaaatgaaaaaaagaggaaaatggatagcgaaaaatttaacaaacttctgttcaggcaaaagaggcgactggaaatctcgatatttgacctctcctgatgaccgggaattgtttactagacacgagatgcaaacgattcccccggatattttggtaacgaactattccatgctggagtatatgttgatgcgcccgattgagcggccaatttgggagaaaacaagacaatggcttgcagaagatgaagcgaacacattgattctagtgcttgatgaggcgcatatgtaccgaggaacgagcggtgcagaggtggctctactcattagaaggctgcaggcaagattaggaattacacgcgatcgattgcgctgcattctaacgagtgcaagtttgggcgcggaggatgatgattcggcggctattgaatttgctgaacaattaacgggtaaactgaaaaaacgttcgtttaagttgatcaaaggagtgaaagaaaaaagaaagcccggaagaattggcacgacagaagaggcctatgcattcgccttgctagacagcgagcagtttaccaatcgcattcatcagtacgatacattgcggtcgaatctccaggctgtagcaaagcggcttggatggggagatgtcccacataatttagatgagctgccgtcgtatctatataaaagtttagacggatttggaccgctcgaattaattattgaacaaataagcggaaatgctaaaaagttcagcgatattgccaagttggtatttccaagtgtcgatatgaaaatggcccaaaaagcgacgagccatttattaatgttggccaatgcagctaaaaataatgagcgagtgttattgccggtaaggatccatttattctttaaaggtgtatcaggcatttatgtctgcaccaatccgaaatgtgaggaaaaaagagtaaaaggaaacgattcgattttaggaaaaatgtatgattctccgaaattacaatgtacttgcagcaaggaagcaagggtctacgaattgcttacccatcgaaaatgtggaactgcatttattcgagggtatatatcgaaaaaggacggcaactacttatgggctgaaaaagggaaaggcattgttggcgaggagttgacagagattcacttgctggttgaaccgccctatgaaaaaatacaaaaaggagaacgatcggtgcgtcctgtatggctcgatatcaggacgggatatttaatgaagtcgccgccggaagatcctgaaggttatctaaaattgtatttgcctcatgatgaggcaaataagaacaaaaagaaaaagcaaacaattacattccaacaatgtccgtgctgtatgagaaaagtgcagggaacgattacggacttaaaaacaaaaggtgagcagccttttgctaatttagttcgcgagcaatttttattgcaacctcctgtaaagctgaataaacaattgcctaatgagggacggaaagtgctactgttttctgacggacgccaaaaggctgcacgtcttgccagggatattccccatgaagtagagctcgactcttttagacagtccattttattggcggctcaaaaattaattgatcaagatattgaaccgaaactgagcggcgctttatattgttcgttgttgcaagtgattgatgagcataaattatacttttttgaaggacaggatcgaaaatcgttggcctatcatgttcaaattttacacgaggattttgatggcgactatgaggagctgattgaaaacggcgacattgaactgctgcctcgtttcaaaacagaacttcttcgccagctttgccatccactctactcggtttatacaacggccacaggctacgtagagcctgttaaaagagaaatggcaagagtagaaagaaagctaaaagagatattgtcgaaggaagacatttatgtactgactatgctgttcattcaagaaatgctggatagagtggccatagattcaaccattcatttctatgagaggctgaagattagagggttcgggggcgatgattggggagttgagaaaggttatataccgaaaaacttagagaatatcattcatctttatgttcaaagtgaggagcataagaaggaaattgtcgatgcattgtttaaattgtgtacagagtcggaagggagatattatttatctcctagaaaattaaaactgattcccggcatttatacaacttggtataaatgcaatgattgcaaagaaatgaatatcgttgcagcaaaaaacaaatgtgtgaattgtttatcggaaaatatcgagatattaaacgtgaacagtaaacggttggattcagaaaaaggattttggcgttcacctatacaaaaaatattgacaaaccatgagaaaatttcgaacatcaccgttgaagagcataccgctcaactgtcgcaaaaggatgcgaaaatagcgatcgcaacaacagaagagtacgaattgcggttccaagatatcatattagatgttttggaaggacctgtcgatattttaagctgtacaaccacaatggaagtcggcgtcgacatcggttcactgactgccgttggactacgaaatgttccgccacaacgggagaactaccagcagcgtgcgggacgtgctggacggaggggaacggctttatcgaccgtagttacttatgcccagggagggccgcacgattattattattttcaacagcctgaaaaaatgatcagcggttcggctcgcaaacccattgtttatattgataataaaaaaatcaccaaaaggcatttgaacgcatttctcattcaaacgtattttcatgaaaacgtttctacaagtgccgttgcgtcaagcattctcagcagttcgttaggtgatacaaaatcattttttgaaggtactccgccttttaattatgagcagtttaaaaaatggctgaatgacaatatcgcctgtcgttttcgcgactatccggtgatttttgacttgattccggatgaggttgtttcgacagaaggaatattaggcggggatatggtagagcgaaaatggtatattgttaaggaagcatgtaatgagctagtaagcgagttggaacggaattatgagaaagtcaaacatacaatacaacccatcgatggtgacgatatagcggaagtaaatccgaacgataaatttctcgattttttgttcaatcacggcttgcttccaacctatgcatttccacaagatttatgcagtttttacatcgaagggaaggatgaaagaacggggagaataatcgttaaacaacgaccgcaattggagataaacagagcgttgagcgagtatgcgccaggaagacaaattgttgttgataagaaaacatatcgaatagggggaatttatgtacctaatccacacgatccgttaaaaccggctaaagatttgttgcttgacagtttgccggttatcacctattgtgaatcgtgcttatttgtttctttggatccaatccaaacgaaaaaatgttcagtgtgtggtggtgagttgaaaaacagtccgttgttgcgaccaacggggttttcgcctgagaaagggatggaggtgaaggaaggagatagggagcaggaattcacctatgcagttcctcctcagttacctattcctgtgtctggcgaaaaactaagtttgaaggcttattcaggttcagaacggcttcaatatgctaatgagatgaacaaacagcttatcgtcatgaataaggggacggatcgacaggaaggattcgaaatctgcacggactgtggggctatttggccagcaggggagagtgaacataaattggcccatgatgtaccttacaggttgaaaacacatcttggtcaaagggatagccgctgtagaggaagtattatgaaagtgtttcttggaaatatatttaactctgatttattactattgcggatgagttttgatgaaaaagtcgattttcacccgaatcatcaatgggttcatgacggtttgaagacgattggcgaggcgctcgtattggctgcaagccgggtattggacatcgattataatgaattgctgtcaggatatcgcattcttccattagaaacaaaaagtccacaacatctgtatcaagccgatgtttatctgtttgatactttatccgggggagctgggtattcacacattgcaggggaaatgctccctgatattattaaaatggcaagggaaattttgcatgaatgcgaaaaccattgcgagacatcttgctataaatgcttaagacattactccaatcaattttatcatcatcagttaaatcgttttgtcgccttagagttgcttgattatatcgttaaaggtgaattgaaggcattaacattaacggaacaacaaaaagtgttagcccctattaagcgcatgttagaaatacacaatgaaaaattcgaggaattcgaagaaggaggacaatatctcattaaagtcaaatcgaaagggaatcgcttaattggcgcaaaaaataatatagaaaggatgttggtatgcgcatacagccatcctgctattgcgtatgtttcggcttatgaagttttgcatgatttgcccaatgtatatttaaatgttgtagaacgcaaacaacagttgctcgtttga

SEQ ID NO: 27439 - DNA, 550 bp, Geobacillus sp. T6
aggttttcatactttttatattaaaaaacatgaaggaaagatgttacatctattttatgatccaaacgcgaacccatatttttcggaacgattggaatccggggttgtggttgaccagcggacattggcgctgtgtgaggaaaaaagcatcttgaaatacacaacggtttcggtaacagatcctcttttgtttccttactggatcaaagaaaaaaatcggtttgccagagagctcagtcaagggggagagttttttcatccatctgttgagaagctttttattcctggggtttgggcgtttgacttttctgctcaagagatgtgcgatttagcccatcccgattggcgcaaagttttattggcgtatatgcagcttgagcaaacaaagtgttgttggatttcaaatgaacaatatcgttttctagagtttttgttgcaagatgtaggggataaaatgttgcgggcaaaactagcctactatgtaaagacgtatcgaaacaaggttccaaaaatagtaaaggaatttattgatgggaggagatcgtcgtga

SEQ ID NO: 27440 - DNA, 954 bp, Geobacillus sp. T6
atgttgatagatgcatgggagaatataattatacaattcagacaaataaaacgtcatgtcctttctttggtgcacttttatgcattcgaggactataaaatgaacccggtgcattttcagcggcttatcccgcctttgcaaagattgctaaaggggcgcttttttgaagatcttcgaaacgttatgaaagaagaagatcaaaccgaagcacagtcattgctcgaactgttatctggtttgggggaaatattgaagcttgccaatggatattatttgccgttgcccccgcgctgtgtcgaacttcccgtgtctaaaagcttggttgtgctcagcaaccctgaaggaaagagcgacaggtattacgggtgcggcaacggttatatggaagagggcagtcatgttccaacgttgatgattgacgaatggatgacttcaccgactgtaaatgaatttatcgaaacactcaaattgcagaacccagtaaaactaaacgatgaaccaacagaactatttttgcctcaaaaacggcgcaaatggcacccatttcaaatgaatcttgcatcaaagtctgattgttatattgctaggtatgcattaaaaaacagtcaaccgctctacttttgggttgagaacatggggaggggtgatgcgcgttattacaagatacccgaatattatttagaaacggctaagtatgccttagagtataaggctcaggtgaaaacaacgataaagtgtgcaaaaattcgtgaagatattatttatgtccgtctttttaaaaagtttcctgtgtttgaacaaaagatggcgatgcttttttgtttcccgctttcctttatcaaaccgattgagtggattgtgcctttgtggcattattcagattttatttgggttttgcggcgcttggggattgatgaggattcaatacgatgggaaggagtcgaaatgggatga

SEQ ID NO: 27441 - DNA, 5361 bp, Geobacillus sp. T6
atgatggaatttaccattaactccgtttctgcacggctgcatcaaaaattgcgcgaatatattgaagctcaatatccaatcagccatccctctttgctgttagagcgcagagagttattggattcaccaggggtcatttcgaaggagccttatattgaggccactcctgtttatgagctggggcctgcctacgagcagatgaatttacctgctcattgtaaagaagcaatgacttatttttcggagttgtctcctagtgtaggaatttataagaggccgtacgtccatcagcaggaggcgcttgaatcatttttagtggatggacatgatttagttgtagcgactggaaccggctcaggtaaaacggaatcattcttacatcccattttaaactcattaattgatgaaggatttaatagaagggaacagtttcaaatacatgcggttcgggcgttaatactatatccgatgaatgcgctagtcagcgatcaaatcacaagattgcgccagctttttggtgatgagagagtgtccaagtactttcgggatcatttcggccgtcatccattattcggtatgtacacatcaagaacaccttacccgggagagcggacaaaggaaaaagacgactaccagttgaaggagattattgattattatttggatattgaaaagaatcggccgcaactggcgctggaaatgaaaaaaagagggaaatggatagcgaaaaatttaacaaactttcgttcaggcaaaaaaggcgactggaaatctcgatatttgacctctcctgacgaccgggaattgtttactagacacgagatgcaaacgactcccccggatattttggtaacgaactattccatgctggagtatatgttgatgcgcccgattgagcggccaatttgggagaaaacaagacaatggcttgcagaagatgaagcgaacacattgattctagtgcttgatgaggcgcatatgtaccgaggaacgagtggtgcagaggtggctctactcattagaaggttgcaggcaagattaggaattacacgcgatcgattgcgctgcattctaacgagtgcaagtttgggcgcggaggatgataattctgcggctattgagtttgctgaacaattaacgggcaaactgaaaaaacgttcgtttaagttgatcaaaggagtgaaagaaaaaagaaagtccggaagaattggcacgacagaagaggcctatgcattcgccttgctagacagcgagcagtttaccaatcgcattcatcagtacgatacattgcggtcgaatctccaggctgtagcaaagcggcttggatggggagatgtcccacataatttagatgagctgccgtcgtatttatataaaagcttagacggatttggaccgctcgaattaattattgaacaaataagcggaaatgctaaaaagttcagcgatattgccaagttagtatttccaagtgtcgatatgaaaatggcccaaaaagcgacaagccatttattaatgttggccaatgcagcgaaaaataatgagcgagtgctattgccggtaaggatccatttattctttaaaggtgtatcaggcatttatgtttgcaccaatccgaaatgtgaggaaaaaagagtaaaaggaaacgattcgattttaggaaaaatgtatgattctccgaaattacaatgtacttgcagcaaggaagcaagggtctacgaattgcttacccatcgaaaatgtggaactgcatttattcgagggtatatatcgaaaaaggacggcaactacttatgggctgaaaaagggaaaggcattgttggcgaggagttgacagagattcacttgctggttgaaccgccccatgaaaaaatacaaaaaggagaacgatcggtgcgccctgtatggctcgatatcaggacgggatacttaatgaagtcgccgccggaagatcctgaaggttatctaaaattgtatttgcctcatgatgaggcaaataagaacaaaaagaaaaagcaaacaattacattccaaaaatgtccgtgctgtatgagaaaagtgcagggaacgattacagacttaaaaacaaaaggtgagcagccttttgctaatttagttcgcgagcaatttttattgcaacctccggtaaagctgaataaacaattgcctaatgagggacggaaagtgctgctgttttctgacggacgccaaaaggctgcacgtcttgctagggatattccccatgaagtagagcttgactcttttagacagtccattttattggcggctcaaaaattaattgatcaagatattgaaccgaaactgagcggcgctttatattgttcgttgctgcaagtgattgatgagcataaattatacttttttgaaggacaggatcgaaaatcgttggcctatcatgttcaaattttacatgaggattttgatggcgactatgaggagctgattgaaaacggcgacattgaactgctgcctcgtttcaaaacagaacttcttcgccagctttgccatccactctactctgtttatacaacggccacaggctacgtagagcctgttaaaagagaaatggcaagagtagaaagaaagctaaaagagatattgtcgaaagaagacatttatgtactgactatgctgtttattcaagaaatgctggatagagtggccatagattcaaccattcatttctatgagaggctgaagattagagggttcgggggcgatgattggggagttgagaaaggttatataccgaaaaacttagagaatatcattcatctttatgttcaaagtgaggagcataagaaggaaattgtcgatgcattgtttaaattgtgtacagaatcggaagggagatattatttatcccctagaaaattaaaactgattcccggcatttatacaacttggtataaatgcaatgattgcaaagaaatgaatatcgttgcagcaaaaaacaaatgtgtgaattgtttatcggaaaatatcgagatattagacgtgaacagtaaacggttagattcagaaaaaggattttggcgttcacctatacaaaaaatattgacaaaccatgagaaaatttcgaacgtcaccgttgaagagcataccgctcaactgtcgcaaaaggatgcgaaaatagcgatcgcaacaacagaagagtacgaattgcggttccaagatatcatattagatgttttagaaggacctgtcgatattttaagctgtacaaccacaatggaagttggcgtcgacatcggttcactgactgccgttggactacgaaatgttccgccacaacgtgagaactaccagcagcgtgcgggacgtgctggacggaggggaacggctttatcgaccgtagttacttatgcccagggagggccgcacgattattattattttcaacagcctgaaaaaatgatcagcggttcggctcgcaaacccattgtttatattgataataaaaaaatcaccaaaaggcatttgaacgcatttctcattcaaacgtattttcatgaaaacgtttctacaagtgccgttgcgtcaagcattctcagcagttcgttaggtgatacaaaatcattttttgaaggtgctccgccttttaattatgagcagtttaaaaaatggctgaatgacaatatcgcctgtcgttttcgcgactatccggtgatttttgacttgattccggatgaggttgtttcgacagaaggaatattaggcggggatatggtagaacgaaaatggtatattgttgaggaagcatgtaatgagctagtaagcgagttggaacggaattatgagaaagtcaaacatacaatacaacccatcgatggtgacgatatagcggaagtaaatccgaacgataaatttctcgattttttgttcaatcacggcttgcttccaacctatgcatttccacaagatttatgcagtttttacatcgaagggaaggatgaaagaacggggagaataatcgttaaacaacgaccgcaattggagataaatagagcgttgagcgagtatgcgccaggaagacaaattgttgttgataagaaaacatatcgaatagggggaatttatgtacctaatccacacgatccgttaaaaccggctaaagatttgttgcttgacagtttgccggttatcacctattgtgaatcgtgcttatttgtttctttggatccaatccaaacgaaaaaatgttcagtgtgtggtggtgagttgaaaaacagtccgttgttgcgaccaacggggttttcgcctgagaaagggatggaggtgaaggaaggagatagggaacaggaattcacctatgcagttcctcctcagttacctattcctgtgtctggcgaaaaactaagtttgaaggcttattcaggttcagagcggcttcaatatgctaatgagatgaacaaacagcttatcgtcatgaataaagggacggatcgacaggaaggattcgaaatctgcacggattgtggggctatttggccagcaggggagagtgaacataaattgacccatgatgtaccttacaggttgaaaacacatcttggtcaaagggatagccgctgtagaggaagtattatgaaagtgtttcttggaaatatatttaactctgatttattactattgcggatgagttttgatgaaaaagtcgattttcacccgaatcatcaatgggttcatgacggtttgaagacgattggcgaggcgctcgtattggctgcaagccgggtattggacatcgattataatgagttactgtctggatatcgcattcttccattagagacaaaaagtccacaacatctgtatcaagctgatgtttacctgtttgatactttatccggaggagcggggtattcacacattgcaggggaaatgctccctgatattattaaaatggcaagggaaattttgtatgaatgcgaaaaccattgcgagacatcttgttataaatgcttaagacattactccaatcaattttatcatcatcagttaaatcgttttgtcgccctagagttgcttgattatatcgttaaaggtgaattgaagacattaacattaacggaacaacaaaaagtgttggcccccattaagcgcatgttagaaatacacaatgaaaaattcgaggaattcgaagaagggggacgatatctcattaaagtcaaatcgaaagggaatcgcttaattggcgcaaaaaataatatagaaagaatgttggtatgcgcatacagccagcctgctattgcgtatgtttcggcttatgaagttttgcatgatttgcccaatgtatatttaaatgttgtagaaggcaaacaacagttgctcgtttga

SEQ ID NO: 27442 - DNA, 1299 bp, Geobacillus sp. Y412MC52
atgataagccgcccctttattacatttgaaccattggaacgtgattgggagctttttattacctttccttatttaacgccttctcaagtgatgcaatgtgacgtgcatcatttgcactttaaaataaaatgcaatgaaatgaattcctttatttcctctgcacagctttggcctaactctagtgaaaataaactgtggattgttccaaagcagagctacagtttttcttttgcgactagaaaagatgaagaatgttatgagaaactcggcttgttttggcctgaatatattaaagggtttcaaaaccatacatatttgtttcggccaataaaccaaagcttttgcatgattgagcctagagaactatcactgagtgatacgttttatatgatgtcacgaaaaaaaatagagtttccgagggaaatggatgtaacaccattaaatcaaaagtatggatggtttgcctataaaatccgtcttccttttctattggcggagccgttaatagagtggtttcggcaatttggatatgacttgaaaccgccgtattattatttggatatagttgtcccttcaatttttggcagaaaaggagaagcgatgttaatcggaacaggaaaatgtagaatccaaatatctttccgtgactttcaaccgcaaaagtacagcctagttcatattcaaccggattatacgagtcgggaatatccgctgtcgagttcttatgttgacattatattgcataaaaaaggttttcatactttttatattaaaaaacatgaaggaaagatgttacatctattttatgatccaaacgcgaacccatatttttcggaacgattggaatccggggttgtggttgaccagcggacattggcgctgtgtgaggaaaagagcatcttgaaatacacaacggtttcggtaacagatcctcttttgtttccttactggatcaaagaaaaaaatcggtttgccagagagctcagtcaagggggagagttttttcatccatctgttgagaagctttttattcctggggtttgggcgtttgacttttctgctcaagagatgtgcgatttagcccatcccgattggcgcaaagttttattggcgtatatgcagcttgagcaaacaaagtgttgttggatttcaaatgaacaatatcgttttctagagtttttgttgcaagatgtaggggataaaatgttgcgggcaaaactagcctactatgtaaagacgtatcgaaacaaggttccaaaaatagtaaaggaatttattgatgggaggagatcgtcgtga

SEQ ID NO: 27443 - DNA, 1983 bp, Geobacillus sp. Y412MC52
gtgaagacgatatttgggattgtcgaaaaagaaagaaagccaaataaaaaatatgtgtttgttaaagttttagcggaatatcgcgatcaccagttaattgaggttcaggaagcacgattgcattatccaagtgagggggaagtgatatggtctcctgctcctgaagacattcacgcagggaaagtgggattttatacagttgaagaaagaaatgaggaagaatacacaggaagacctgtatattcaaagtttatcgtaagaaaagaattggagaatttaaaatattatgaggtattcccaataccgttttcacttgcgcaaaatcatgacattgtttatttgattcagaacgggtttgatgccccgcagcagtttagttcagaaattttactcttaacgaatgatgattatttagttgggccttaccgtgtcaaacagacaaaagaacaaaaatgggtgattgattcgtccgacgataagttgctcgaaatacgaaaaaaagggatgcatctcgttaaatataatgataagaacgtcgggatcgaacgatactttgtatcggcgatgctagcgagccctgtcgaagattatctcgattgtgccactaacgctcggattatgcgttatgctttaaaaacgttgaaagaccagcaacaggttcaggaaatttcaagaaaagtcatcagtcagctatctgaattggttagcgatctccctccgcaagttcgttatgagcgtattatgcaagccattgagttgttggataaatatcaaataacaaaggaagatattggtcaatttgaggaggaattgttacagtacccagtgattcaaaggaaaatagaggttgaattagaggaaaggtttgctgcggagaaagcaagaatcgaagatgagcatcgaaaagtattgaacgaaacagaacagctgcgtagaaaaaaagagcatttgctagttgagatggaagaaatcgaaagacagataaaagaaagggaagaaagactaaaaaaagccgataaggcattggaattaaagattaaggaaatgaaagataatattttccagactttggctgatttactaccttttatgaatttggggttaaatgtctctgtgcataacgcatcagacgatcgaaatcattcggaatgggtggtgaaggatgttgatgaaacaacagtttattatgaagatataaatcatttaatgacatccattgcagaaaacctatgcatgattggcatgcaggagaataaagcatggttgacagcgaaaacgatcatcggagcgattttgtttcgtaaaccagtcgtggtcaaaggagaatttagttttgaactgtcacaggcaatcggctgggcggttgcaggaaacgatcatctaacggtttttccagatatacggaattttactaataaaacgttgatcaattccttttcttgttatacacggcctgactgtgtaaagtctcttcatttatgccaaattgaaaattcgcctgctgaattgtatttacaatcgtttctcgaccattggcgcgtgtctattgatgagtcgttgccggaattgattttgataagcataaaagaagaaagtgagttgactgattcgttcatccaaaagttgtcgttttcgcctgtgatcagcgcaaatgaaatgataacaactcctgatattcggttactaagaaagacgcatcgtctagtctttggatccatccctgcacgtttacttgtagaaggtaaaatattaaaggaaaaatctagtgagttcaataattttgtggaaattgtgcaagaagtcatgtcgtttacgaaacaaaaagaagcatttaaaaaatggtttcggttattagaggatgaacggtttgaggaagaagccgtgtctgtatgggttgtcaaggtgctactgcagccgtatgttgcccgtgagcaggcaaagaaaatcttagaagagtttgacagcgagaatattttgatttag

SEQ ID NO: 27444 - DNA, 954 bp, Geobacillus sp. Y412MC52
atgttgatagatgcatgggagaatataattatacaattcagacaaataaaacgtcatgtcctttctttggtgcacttttatgcattcgaggactataaaatgaacccggtgcattttcagcggcttatcccgcctttgcaaagattgctaaaggggcgcttttttgaagatcttcgaaacgttatgaaagaagaagatcaaaccgaagcacagtcattgctcgaactgttatctggtttgggggaaatattgaagcttgccaatggatattatttgccgttgcccccgcgctgtgtcgaacttcccgtgtctaaaagcttggttgtgctcagcaaccctgaaggaaagagcgacaagtattacgggtgcggcaacggttatatggaagagggcagtcatgttccaacgttgatgattgatgaatggatgccttcaccgactgtaaatgaatttatcgaaacgctcaaattgcagaacccagtaaaactaaacgatgaaccaacagaactatttttgcctcaaaaacggcgcaaatggcacccatttcaaatgaatcttgcatcaaagtctgattgttatattgctaggtatgcattaaaaaacagtcaaccgctctacttttgggttgagaacatggggaggggtgatgcgcgttattacaagatacccgaatattatttagaaacggctaagtatgccttagagtataaggctcaggtgaaaacaacgataaagtgtgcaaaaattcgtgaagatgttatttatgtccgtctttttaaaaagtttcctgtgtttgaacaaaagatggcgatgcttttttgtttcccgctttcctttatcaaaccgattgagtggattgtgcctttgtggcattattcagattttatttgggttttgcggcgcttggggattgatgaggattcaatacgatgggaaggagtcgaaatgggatga

SEQ ID NO: 27445 - DNA, 5364 bp, Geobacillus sp. Y412MC52
atgatggaatttaccattaactccgtttctgcacggctgcatcaaaaattgcgcgaatatattgaagcgcaatatccaatcagccatccctctttgctgttagagcgcagagagttattggattcaccaggggtcatttcgaaggagccttatattgaggccactcctgtttatgagctggggcctgcctacgagcagatgaatttgcctgctcattgtaaagaagcaatgacttatttttcggagttgtctcctagtgtaggaatttataagaggccgtacgtccatcagcaggaggcgcttgaatcatttttagtggatggacatgatttagttgtagcgactggaaccggctcaggtaaaacggaatcattcttacatcccattttaaactcattaattgatgaaggatttaatagaagggaacagtttcaaacacatgcggttcgggcgttaatactatatccgatgaatgcgctagtcagcgatcaaatcacaagattgcgccagctttttggtgatgagagagtgtccaagtactttcgggatcatttcggccgtcatccattattcggtatgtacacatcaagaacaccttacccgggagagcggacaaaggaaaaagacgactaccagttgaaggagattattgattattatttggatattgaaaagcatcggccgcaactggcgctggaaatgaaaaaaagagggaaatggatagcgaaaaatttaacaaactttcgttcaggcaaaaaaggcgactggaaatctcgatatttgacctctcctgacgaccgggaattgtttactagacacgagatgcaaacgactcccccggatattttggtaacgaactattccatgctggagtatatgttgatgcgcccgattgagcggccaatttgggagaaaacaagacaatggcttgcagaagatgaagcgaacacattgattctagtgcttgatgaggcgcatatgtaccgaggaacgagtggtgcagaggtggctctactcattagaaggttgcaggcaagattaggaattacacgcgatcgattgcgctgcattctaacgagtgcaagtttgggcgcggaggatgataattctgcggctattgagtttgctgaacaattaacgggcaaactgaaaaaacgttcgtttaagttgatcaaaggagtgaaagaaaaaagaaagcccggaagaattggcacgacagaagaggcctatgcattcgccttgctagacagcgagcagtttaccaatcgcattcatcagtacgatacattgcggtcgaatctccaggctgtagcaaagcggcttggatggggagatgtcccacataatttagatgagctgccgtcgtatttatataaaagcttagacggatttggaccgctcgaattaattattgaacaaataagcggaaatgctaaaaagttcagcgatattgccaagttggtatttccaagtgtcgatatgaaagtggcccaaaaagcgacgagccatttattaatgttggccaatgcagcgaaagataatgagcgagtgttattgccggtaaggatccatttattctttaaaggtgtatcaggcatttatgtctgcaccaatccgaaatgtgaggaaaaaagagtaaaaggaaacgattcgattttaggaaaaatgtatgattctccgaaattacaatgtacttgtagcaaggaagcaagggtctacgaattgcttacccatcgaaaatgtggaactgcgtttattcgagggtatatatcgaaaaaggacggcaactacttatgggctgaaaaagggaaaggcattgttggcgaggagttgacagagattcacttgctggttgaaccgccccatgaaaaaatacaaaaaggagaacgatcggtgcgtcctgtatggctcgatatcaggacgggatatttaatgaagtcgccgccggaagatcctgaaggttatctaaaattgtatttgcctcatgatgaggcaaataagaacaaaaagaaaaagcaaacaattacattccaacaatgtccgtgctgtatgagaaaagtgcagggaacgattacggacttaaaaacaaaaggtgagcagccttttgctaatttagttcgcgagcaatttttattgcaacctccggtaaagctgaataaacaattgcctaatgagggacggaaagtgctgctgttttctgacggacgccaaaaggctgcacgtcttgccagggatattccccatgaagtagagctcgactcttttagacagtccattttattggcggctcaaaaattaattgatcaagatattgaaccaaaactgagcggcgctttatattgttcgttgctgcaagtgattgatgagcataaattatacttttttgaaggacaggatcgaaaatcgttggcctatcatgttcaaattttacatgaggattttgatggcgactatgaggagctgattgaaaacggcgacattgaactgctgcctcgtttcaaaacagaacttcttcgccagctttgccatccactctactcggtttatacaacggccacaggctacgtagagcctgttaaaagagaaatggcaagagtagaaagaaagctaaaagagatattgtcgaaggaagacatttatgtactgactatgctgttcattcaagaaatgctggatagagtggccatagattcaaccattcatttctatgagaggctgaagattagagggttcgggggcgatgattggggagttgagaaaggttatataccgaaaaacttagagaatatcattcatctttatgttcaaagtgaggagcataagaaggaaattgtcgatgctttgtttaaattgtgtacagaatcggaaggaagatattatttatcccctagaaaattaaaactgattcccggcatttatacaacttggtataaatgcaatgattgcaaagaaatgaatatcgttgcagcaaaaaataaatgtgtgaattgtttatcggaaaatatcgagatattagacgtgaacagtaaacggttggattcagaaaaaggattttggcgttcacctatacaaaaaatattgacaaaccatgagaaaatttcgaacatcaccgttgaagagcataccgctcaactgtcgcaaaaggatgcgaaaatagcgatcgcaacaacagaagagtacgaattgcggttccaagatatcatattagatgttttagaaggacctgtcgatattttaagctgtacaaccacaatggaagtcggcgtcgacattggttcactgactgccgttggactacgaaatgttccgccacaacgggagaactaccagcagcgtgcgggacgtgctggacggaggggaacggctttatcgaccgtagttacttatgcccagggagggccgcacgattattattattttcaacagcctgaaaaaatgatcagcggttcggctcgcaaacccattgtttatattgataataaaaaaatcaccaaaaggcatttgaacgcatttctcattcaaacgtattttcatgaaaacgtttctgcaagtgccgttgcgtcaagcattctcagcagttcgttaggtgatacaaaatcattttttgaaggtactccgccttttaattatgagcagtttaaaaaatggctgaatgacaatatcgcctgtcgttttcgcgactatcctgtgatttttgacttgattccggatgaggttgtttcgacaggaggaatattaggcgggggggatatggcagagcgaaaatgggatattgttaaggaagcatgtaatgagctagtaagcgagttggaacggaattatgagaaagtcaaacatacaatacaacccatcgatggtgacgatatagcggaagtaaatccgaacgataaatttctcgattttttgttcaatcacggcttgcttccaacctatgcatttccacaagatttatgcagtttttacatcgaagggaaagatgaaagaacggggagaataatcgttaaacaacgaccgcaattggagataaatagagcgttgagcgagtatgcgccaggaagacaaattgttgttgataagaaaacatatcgaatagggggaatttatgtacctaatccacacgatccgttaaaaccggctaaagatttgttgcttgacagtttgccggttatcacctattgtgaatcgtgcttatttgtttctttggatccaatccaaacgaaaaaatgttcagtgtgtggtggtgagttgaaaaacagtccgttgttgcgaccaacggggttttcgcctgagaaagggatggaggtgaaggaaggagatagggagcaggaattcacctatgcagttcctcctcagttacctattcctgtgtctggtgaaaaactaagtttgaaggcttattcaggttcagagcggcttcaatatgctaatgagatgaacaaacagcttatcgtcatgaataaagggacggatcgacaggaaggattcgaaatctgcacggattgtggggctatttggccagcaggggagagtgaacataaattggctcatgatgtaccttacaggttgaaaacacatcttggtcaaagggatagccgctgtagaggaagtattatgaaagtgtttcttgggaatatatttaactctgatttattactattgcggatgagttttgatgaaaaagtcgactttcacccgaatcatcaatgggttcatgacggtttgaagacgattggcgaggcgctcgtattggctgcaagccgggtattggacatcgattataatgagttgctgtcaggatatcgcattcttccattagagacaaaaagttcacaacatctgtatcaagccgatgtttacctgtttgatactttatccggaggagcggggtattcacacattgcaggggaaatgctccctgatattattaaaatggcaagggaaattttgcatgaatgcgaaaaccattgcgagacatcttgctataaatgcttaagacattactccaatcaattttatcatcatcagttaaatcgttttgtcgccctagagttgcttgattatatcgttaaaggtgaattgaaggtattaacattaacggaacaacaaaaagtgttggcccccattaagcgcatgttagaaatacacaatgaaaaattcgaggaattcgaagaagggggacgatatctcattaaagtcaaatcgaaagggaatcgcttaattggcgcaaaaaataatatagaaaggatgttggtatgcgcatacagccagcctgctattgcgtatgtttcggcttatgaagttttgcatgatttgcccaatgtatatttaaatgttgtagaaggcaaacaacagttgctcgtttga

SEQ ID NO: 27446 - DNA, 1299 bp, Geobacillus sp. Y412MC61; identical to SEQ ID NO: 27442

SEQ ID NO: 27447 - DNA, 1983 bp, Geobacillus sp. Y412MC61; identical to SEQ ID NO: 27443

SEQ ID NO: 27448 - DNA, 954 bp, Geobacillus sp. Y412MC61; identical to SEQ ID NO: 27444

SEQ ID NO: 27449 - DNA, 5364 bp, Geobacillus sp. Y412MC61; identical to SEQ ID NO: 27445

SEQ ID NO: 27450 - DNA, 764 bp, Geobacillus stearothermophilus
tgaaaccgccgtattattatttggatatagtcgccccttcagtttttggaagaaaaggcgaagcgatgttaatcggaacaggaaaatgtagaatccaaatatcttttcgtgactttcaactgcaaaagtacagcctagttcatattcaaccggattatacgagtcgggaatatccgctgtcgagttcttatgttgacattatattgcataaaaagggttttcatactttttatattaaaaaacatgaaggaaagatgttacatctattttatgatccaaacgcgaacccatgtttttcggaacgattggaatccggggttgtggttgaccagcggacattggcgctgtgtgaggaaaagagcatcttgaaatatacaacggtttcggtaacagatcctcttttgtttccttactggatcaaagaaaaaaatcggtttgccagagagctcagtcaagggggagagttttttcatccatctgttgagaagctttttattcctggggtttgggcgtttgacttttctgctcaagagatgcgcgatttagcccatcccgattggcgcaaagttttattggcgtatatgcagcttgagcaaacaaagtgttgttggatttcaaatgaacaatatcgtttcctagagtttttgttgcaagatataggggataaaatgttgcgggcaaaactagcctactatgtaaagacgtatcgaaacaaggttccaaaaatagtaaaggaatttattgatgggaggagatcgtcgtga

SEQ ID NO: 27451 - DNA, 1983 bp, Geobacillus stearothermophilus
gtgaagacggtatttgggattgtcgaaaaagaaagaaagccaaataaaaaatatgtgtttgttaaagttttagcggaatatcgcgatcaccagttaattgaggttcaggaagcacgattgcattatccaagtgagggggaagtgatatggtctcctgctcctgaagacattcacgcagggaaagtgggattttatacaatcgaagaaagaaatgaggaagactacgcaggaagacttgtatattcaaagtttatcgtaagaaaagaattggagaatttaaaatattatgaggtatttccgataccgttttcacttgcgcaaaatcatgacattgtttatttgattcagaacgggtttgatgccccgcagcagtttagttcagaaattttactcttaacgaacgatgattatttagttggaccttaccgtgtcaaacagacaaaagaacaaaaatgggtgattgattcgtccgacgataagttgctcgaaatacgaaaaaaagggatgcatctcgttaaatataatgataagaacgtcgggatcgaacgatactttgtatcggcgatgctagcgagccctgtcgaagattatctcgattgtgccactaacgatcggattatgcgttatgctttaaaaacgttgaaagaccagcaacaggttcaggaaatttcacgaaaagtcatcagtcagctatctgaatgggttagcgatctccctccgcaagttcattatgagcgcattatgcgagccattgagttgttggctaaatatcaaataacaaaggaagatattggtcaatttgaggaagaattattacagtacccagcgattcaaaggaaaatagaggataaattagaggaaaggtttgctgcggagaaagcaagaatcgaagatgagcatcgaaaagtattgaacgaaacagaacagctgcgtagaaaaaaagagcatttgctcgttgagatggaagagatcgaaagacagataaaggaaacggaagaaagattaaaaaaagccgatgaagcattggagttaaagatcaaggaaatgaaagataacattttccggactttggctgatttactccctttcgcaaatttagggttaaatgtctccacgcataacgaatcaaacgatcgaaatcattcgcaatgggtggtgaaggatgttgatgaaacaacagtttattatgaagatataaatcatttaatgacatccattgcagaaaacctatgcatgattggcatgcaggagaataaagcatggttgatagcgaaaacgatcatcggagcgatcttgtttcgtaaaccagtcgtggtcaaaggagaatttagttttgaactgtcacaggcaatcggctgggcggttgcaggaaacgatcatctaacggtttttccagatataaagaattttactaataaaacgttgatcaattgcttttctcgttatacacggcctgactgtgtaaagtctcttcatttatgccaaattgaaaattcgcccgctgaattgtatttacaatcgtttctcgactattggcgcgtgtctattgatgagtcgttgccagaattgattttgataagcataaaagaagaaagtgagttgaccgattcgttcattcaaaagctatcgttttcgcctgtgatcagcgcagacgaaatgacgacaactcctgatattctctcattaagaaagacacatcgcttagtcttcggctccatccctgcacatttacttgtagaaggtaaaatattaaaggagaaatccagtgagttcaacaattttttggaaattgtgcaagaagtcatgtcgtttacgaaacaaaaagaagcatttaaaaaatggtttcggttattagaggatgaacggctcgaggaagaagctgtgtctgtatgggtcgtcaaggtgctactgcagccgtatgttgcccgtgagcaggcaaagaagatcttagaagagtttgacagcgagaatattttgatttag

SEQ ID NO: 27452 - DNA, 954 bp, Geobacillus stearothermophilus
atgttgacagatgcatggaagaatacaattatacaatttagacaaataaaacgtcatgtcctttctttggtgcacttttatgcattcgaggactataaaatgaacccggtgcattttcagcggcttatcccgcctttgcaaagattgctaaaggggcgcttttttgaagatcttcgaaacgttatgaaagaagaagatcaaaccgaagcacagtcattgctcgaactgttatctggtttgggggaaatattgaagcttgccaatggatattatttgccgttgcccccgcgctgtgtcgaacttcccgtgtctaaaagcttggttgtgcttagcaaccctgaaggaaagagcgacaagtattacgggtgcggcagcggttatatggaagagggcagtcatgttccaacgttgatgattgacgaatggatgccttcaccgactgtaaatgaatttatcgaaacgctcaaattgcagaacccagtaaaactaaacgatgaaccaacagaactatttttgcctcaaaaacggcgcaaatggcacccatttcaaatgaatcttgcatcaaagtctgattgttatattgctaggtatgcattaaaaaacagtcaaccgctctacttttgggttgagaacatggggaggggtgatgcgcgttattacaagatacccgaatattatttagaaacggccaagtatgccttagagtataaggctcaggtgaaaacaacgataaagtgtgcaaaaattcgtgaggatgttatttatgtccgtctttttaaaaagtttcctgtgtttgaacaaaagatggcgatgcttttttgtttcccgctttcctttatcaaaccgattgagtggattgtgcctttgtggcattattcagattttatttgggttttgcggcgcttggggattgatgaggattcaatacgatgggaaggagtcgaaatgggatga

SEQ ID NO: 27453 - DNA, 5361 bp, Geobacillus stearothermophilus
atgatggaatttaccattaactccgtttctgcacggctgcatcaaaaattgcgcgaatatattgaagcgcaatatccaatcagccatccctctttgctgttagagcgcagagagttattggattcaccaggggtcatttcgaaggagccgtatattgaggccactcctgtttatgagctggggcctgcctatgagcagatgaatttgcctgctcattgcaaagaagcaatgacttatttttcggagttgtctcctagtgtaggaatttataagaggccgtacgtccatcagcaggaggcgcttgaatcatttttagtggatggacatgatttagttgtagcgactggaaccggctcaggtaaaacggaatcattcttacatcccattttaaactcattaattgatgaaggatttaatagaagggaacagtttcaaacacatgcggttcgggcgttaatactatatccgatgaatgcgctagtcagcgatcaaatcacaagattgcgccagctttttggtgatgagagagtgtccaagtactttcgggatcatttcggtcgtcatccattatttggtatgtacacatcaagaacaccttacccgggagagcggacaaaggaaaaagacgactaccagttgaaggagattattgactattatttggatattgaaaagaatcggccgcagctggcgctggaaatgaaaaaaagaggcaaatggatagcgaaaaatttaacaaacttccgttcaggcaaaagaggcgactggaaatctcgatatttgacctctcctgacgaccgggaattgtttactagacacgagatgcaaacgactcccccggatattttggtaacgaactattccatgctggagtatatgttgatgcgcccgattgagcggccaatttgggagaaaacaagacaatggcttgcagaagatgaagcgaacacattgattctagtgcttgatgaggcgcatatgtaccgaggaacgagcggtgcagaggtggctctactcattagaaggctgcaggcaagattaggaattacacgcgatcgattgcgctgcattctaacgagtgcaagtttgggcgcggaggatgatgattcggcggctattgaatttgctgaacaattaacgggtaaactgaaaaaacgttcgtttaagttgatcaaaggagtgaaagaaaaaagaaagcccggaagaattggcacgacagaagaggcctatgcattcgccttgctagacagcgagcagtttaccaatcgcattcatcagtacgatacattgcggtcgaatctccaggctgtagcaaagcggcttggatggggagatgtcccacataatttagatgagctgccgtcgtatctatataaaagtttagacggatttggaccgctcgaattaattattgaacaaataagcggaaatgctaaaaagttcagcgatattgccaagttggtatttccaagtgtcgatatgaaaatggcccaaaaagcgacgagccatttattaatgttggccaatgcagctaaaaataatgagcgagtgttattgccggtaaggatccatttattctttaaaggtgtatcaggcatttatgtctgcaccaatccgaaatgtgaggaaaaaagagtaaaaggaaacgattcgattttaggaaaaatgtatgattctccgaaattacaatgtacttgcagcaaggaagcaagggtctacgaattgcttacccatcgaaaatgtggaactgcatttattcgagggtatatatcgaaaaaggaccgcaactacttatgggctgaaaaagggaaaggcattgttggcgaggagttgacagagattcatttgctggttgaaccgccccatgaaaaaatacaaaaaggagaacgatcggtgcgtcctgtatggctcgatatcaggacgggatatttaatgaagtcgccgccggaagatcctgaaggttatctaaaattgtatttgcctcatgatgaggcaaataagaacaaaaagaaaaagcaaacaattacattccaacaatgtccgtgctgtatgagaaaagtgcagggaacgattacggacttaaaaacaaaaggtgagcagccttttgctaatttagttcgcgagcaatttttattgcaacctccggtaaagctgaataaacaattgcctaatgagggacggaaagtgctgctgttttctgacggacgccaaaaggctgcacgtcttgctagggatattccccatgaagtagagcttgactcttttaggcagtccattttattggcggctcaaaaattaattgatcaagatattgaaccgaaactgagcggcgctttatattgttcgttgttgcaagtgattgatgagcataaattatacttttttgaaggacaggatcgaaaatcgttggcctatcatgttcaaattttacatgaggattttgatggcgactatgaggagctgattgaaaacggcgacattgaactgctgcctcgtttcaaaacagaacttcttcgccagctttgccatccactctactcggtttatacaacggccacaggctacgtagagcctgttaaaagagaaatggcaagagtagaaagaaagctaaaagagatattgtcgaaggaagacatttatgtactgactatgctgttcattcaagaaatgttggatagagtggccgtagattcaaccattcatttctatgagaggctgaagattagagggttcgggggcgatgattggggagttgagaaaggttatataccgaaaaacttagagaatatcattcatctttatgttcaaagtgaggagcataagaaggaaattgtcgatgcattgtttaaattgtgtacagaatcggaagggagatattatttatcccctagaaaattaaaactgattcccggcatttatacaacctggtataaatgtaatgattgcaaagaaatgaatatcgttgtagcaaaaaacaaatgtgtgaattgtttatcggaaaatatcgagatattagacgtgaacagtaaacggttggattcagaaaaaggattttggcgttcacctatacaaaaaatattgacaaaccatgagaaaatttcgaacatcaccgttgaagagcataccgctcaactgtcgcaaaaggatgcgaaaatagcgatcgcaacaacagaagagtacgaattgcggttccaagatatcatattagatgttttagaaggacctgtcgatattttaagctgtacaaccacaatggaagtcggcgtcgacatcggttcactgactgccgttggactacgaaatgttccgccacaacgggagaactaccagcagcgtgcgggacgtgctggacggaggggaacggctttatcgaccgtagttacttatgcccagggagggccgcacgattattattattttcaacagcctgaaaaaatgatcagcggttcggctcgcaaacccattgtttatattgataataaaaaaatcaccaaaaggcatttgaacgcatttctcattcaaacgtattttcatgaaaacgtttctacaagcgccgttgcgtcaagcattctcagcagttcgttaggtgatacaaaatcattttttgaaggtactccgccttttaattatgagcagtttaaaaaatggctgaatgacaatatcgcctgtcgttttcgcgactatccggtgatttttgacttgattccggatgaggttgtttcgacagaaggaatattaggcggggatatggtagagcgaaaatggtatattgttaaggaagcatgtaatgagctagtaagcgagttggaacggaattatgagaaagtcaaacatacaatacaacccatcgatggtgacgatatagcggaagtaaatccgaacgataaatttctcgattttttgttcaatcacggcttgcttccaacctatgcatttccacaagatttatgcagtttttacatcgaagggaaggatgaaagaacggggagaataatcgttaaacaacgaccgcaattggagataaacagagcgttgagcgagtatgcgccaggaagacaaattgttgttgataagaaaacatatcgaatagggggaatttatgtacctaatccacacgatccgttaaaaccggctaaagatttgttgctggacagtttgccggttatcacctattgtgaatcgtgcttatttgtttctttggatccaatccaaacgaaaaaatgttcagtgtgtggtggtgagttgaaaaacagtccgttgttgcgaccaacggggttttcgcctgagaaagggatggaggtgaaggaaggagatagggagcaggaattcacctatgcagttcctcctcagttacctattcctgtgtctggcgaaaaactaagtttgaaggcttattcaggttcagagcggcttcaatatgctaatgagatgaacaaacagcttatcgtcatgaataaagggacggatcgacaggaaggattcgaaatctgcacggattgtggggctatttggccagcaggggagagtgaacataaattggcccatgatgtaccttacaggttgaaaacacatcttggtcaaagggatagccgctgtagaggaagtattatgaaagtgtttcttgggaatatatttaactctgatttattactattgcggatgagttttgatgaaaaagtcgattttcacccgaatcatcaatgggttcatgacggtttgaagacgattggcgaggcgctcgtattggctgcaagccgggtattggacatcgattataatgagttactgtcaggatatcgcattcttccattagagacaaaaagtccacaacatctgtatcaagccgatgtttacctgtttgatactttatctggaggagcggggtattcacacattgcaggggaaatgctccctgatattattaaaatggcaagggaaattttgtatgaatgcgaaaaccactgcgagacatcttgctataaatgcttaagacattactccaatcaattttatcatcatcagttaaatcgttttgtcgccctagagttgcttgattatatcgttaaaggtgaattgaaggcattaacattaacggaacaacaaaaagtgttggcccccattaagcgcatgttagaaatacacaatgaaaaattcgaggaattcgaagaagggggacgctatctcattaaagtcaaatcgaaagggaatcgcttaattggcgcaaaaaataatatagaaaggatgttggtatgcgcatacagccagcctgctattgcgtatgtttcggcttatgaagttttgcatgatttgccgaatgtatatttaaatgttgtagaaggcaaacaccagttgctcgtttga

SEQ ID NO: 27454 - DNA, 1299 bp, Geobacillus stearothermophilus
gtgataagccgcccctttattacatttgaaccattggaacgtgattgggagctttttattacctttccttatttaacgccttctcaagcgatgcaatgtgacgtgcatcatttgcactttaaaataaaatgcaatgaaatgaattcctttatttcctctgcacagctttgtcctaactctagtgaaaataaactgtggattgttccaaagcagagctacagtttttcttttgcgactagaaaagatgaaaaatgttatgagaaactcggcttgttttggcctgaatatattaaagggtttcaaaaccatacatatttgtttcggccaataaaccaaagcttttgcatgattgagcctagagaactatcactgagtgacacgttttatatgatgtcacggaaaaaaatagagtttccgagggaaatggatgtaacaccattaaatcaaaagtatggatggtttgcctataaaatccgtcttccttttctattggcggagccgttaatagagtggtttcggcaatttggatatgacttgaaaccgccgtattattatttggatatagtcgccccttcagtttttggaagaaaaggcgaagcgatgttaatcggaacaggaaaatgtagaatccaaatatcttttcgtgactttcaactgcaaaagtacagcctagttcatattcaaccggattatacgagtcgggaatatccgctgtcgagttcttatgttgacattatattgcataaaaagggttttcatactttttatattaaaaaacatgaaggaaagatgttacatctattttatgatccaaacgcgaacccatgtttttcggaacgattggaatccggggttgtggttgaccagcggacattggcgctgtgtgaggaaaagagcatcttgaaatatacaacggtttcggtaacagatcctcttttgtttccttactggatcaaagaaaaaaatcggtttgccagagagctcagtcaagggggagagttttttcatccatctgttgagaagctttttattcctggggtttgggcgtttgacttttctgctcaagagatgcgcgatttagcccatcccgattggcgcaaagttttattggcgtatatgcagcttgagcaaacaaagtgttgttggatttcaaatgaacaatatcgtttcctagagtttttgttgcaagatataggggataaaatgttgcgggcaaaactagcctactatgtaaagacgtatcgaaacaaggttccaaaaatagtaaaggaatttattgatgggaggagatcgtcgtga

SEQ ID NO: 27455 - DNA, 1983 bp, Geobacillus stearothermophilus; identical to SEQ ID NO: 27451

SEQ ID NO: 27456 - DNA, 954 bp, Geobacillus stearothermophilus; identical to SEQ ID NO: 27452

SEQ ID NO: 27457 - DNA, 5361 bp, Geobacillus stearothermophilus; identical to SEQ ID NO: 27453

SEQ ID NO: 27458 - DNA, 1221 bp, Hoeflea phototrophica DFL-43
atgaattctgttgtcacaattaaatcaagagaagcaattctaaagcgtaaattacggcgtcatttacacagtattggatttgcaaaaacaaaaaatggagaacttattttccagggagagggaaaggagaccgtccgtaatctacaccgcgtccagcgcgaagatcgtataaaggacaataaaaattttcttgaagcaagagcgcctagactttttcatcactttgctgacggaaaacatgtcgacccatctaggatttctccagttattgaacgcgtctcaactggaacgcagcaaggtgacttgtttcgtcttgcatcacttacttggtctgtgccggtttcaaatggtttcggtaggcggctgcgctatcttgtttgggatgagaatagcgggaagttgatgggactgattgcgatcggcgatcctgttttcaatcttgccgttcgtgataggctgatcggctggacgtccaaggaccgaagcgcaaggctggtcaacatcatggacgcctatgtccttggtgcaatacctccttacaaccaattgcttggcggcaagttggtggcgtgtttactccgaagccgtgaactttatgaagatttcaaggcagcctatggcgacacaaccggaataatatctggtgaaggaaagaaagcgcgcctgctagcggtgacgacatcgtcttcgatgggtcgatcatcggtgtataaccgcgtgaagctcgacggtgtccaatatctcgaatcaattggcttcaccggaggatgggggcattttcatatcccggattgcttattcgcagaattgcgcgattatcttcgagatattgatcatagatatgcggaccagcaccgatttggtcagggcccaaactggcgtatgcggacaaccagggcggcacttgcggaactgggcttcaaagaagacatgcttcgccatggcatcaagcgcgaggtattcatcagccgactcgcagcgaacgcagacgcaattctaaaatcaggaacaggcaagcccaatacagatgcgcttttgtcgaccaaagagattgcagggctagcaacagaaagatggatgcagccgcgagcgaagcgacggtctgaatatcaagactggactgttgaagacttaatggggctcttcggaagccaaagccgccagatgctatcccgccttgagcaacaaggttttcacgagaattccgctgcggtgatgtga

SEQ ID NO: 27459 - DNA, 1098 bp, Hoeflea phototrophica DFL-43
atgatctcagtcgtcacccctaaaaatattttgtgctattgtcgctcgcttctggaattgcggggtgaagaccacggtatcaatgacaactttttggcagccatgctcagacgtactgccgggtctctttgtccatgttcgcgtgctgtacttcgcgctgttctggtagagagtctgggccatttggatgatgagccatctacgctgccgacgcgaattgaagcacttattgatgacctgatagtcgtaggcgatttgctcgaactgaccgaggtgacgactggagaagacgaagcaaagggaacatgggtttttgcagcgccgccctcttttgttgaacgaaagagcggcaacatcttcctgaccggaattgttcctgaccaagatcgatggctgcctgaaaacatccgaagtcgtatcttcctgtcgcgtggaatacgatccatcaggccggacgatggggaagacctcgccgtgaggctagctggcgaaggtctcagaagattaccggaaaaaacgtggctccgagcgcccaagacgcttccatcggaaaaagcgctctccaaagcaagtcaacaacttgccaaaaaacaacaatgcgctccggtgcacgggcttgatataatcgacccgaaaacgaaaccgacttattacaaagggcgatggacctcccttaagaatcactctggtttatttgtcgcgcgacgtccacaggagttcggtgcccccctgtggtgtttggtcgaagcggagtccggcatgctcaagcgtgtccttgatctgcctttccgcgggtatcgttggcgtgcgtgcgatgctgcatggcatctgcaaatggcaatagactgtgaacgcggagtgccgcagcgatataaagtcgatcattgcgaagatggcatgtgtcggctgagcttttactccccaattccgctttgggcggaacgaagacttatgatcttcggcagtaaatgccgggtcgagaaaacgttattttcctatgaaattccggttgatgaagcagtccaggaagaggagttcttgcaagagaacctttggattgttcccattgatactaattctgatatgatgagcgcctaa

SEQ ID NO: 27460 - DNA, 5547 bp, Hoeflea phototrophica DFL-43
atgcaaacaatcaaaaaaactgtagaaagcctacatgcttctctcaaggaatacatcgaggccacctaccatatcagcgcgccatccctcattgcgcaacgtcaatcgttgttagataaagacggcgtcattcaccgcgtcccttttcttgaatcaacaccgaaataccaatcgggaaacaaattctcggcaatggccgggttgccaaccgctgcactagagttgttggagcgtctgagtacgccagagaaggatttgcagcgccttgtttatgatccgccctacatgcaccaaggcgactcactgaaagaatgcctgatcaacggtaagagcattgtcatcatgactggaacgggttcgggtaagactgaatccttccttctgccgatcctcggaaaatttgcaagagaagctgaggcgtatcccaaagtgttcgcagaacaagcggcaatgcgagcgcttgtcatgtatccgatgaacgcactcgtgaacgaccaacttggccgactacgggcgatgctgggcgatccgaggctggttgagaccttcaagggttggtgcggaaggccgccgagatttgcccggtacacaagccggacgccctatgccggggttcgtacggcgagtaaggatgggcagcgacttagttcctttggtgacttctatgtcgatgtgcttcagagtgctaagagttccgatcttgagaagagcaaggaggcaggtgcacttctcacggcactcaaagaaagaggaaaatggccagccaaaccagaccttgaggcttggttcggtcaaaaaggtagccgatgggaaagcaagggtagttttgctcgggctgtcacactgccagacgactccgaactccttacacgccatgaagtgcagattgctccgcctgaccttttggtcacgaactactcaatgctcgaatacatgcttatgcggccaattgagaggccaatcttcgacaaaactaaagagtggcttgagaagaaccctggcgagaccttcctagtcgtgcttgatgaggctcacctctatcgtggtgctgcgggtgccgaagtcgggctcttgctgagaagactgcgggaccgtcttggcatacctgaggagcgacttcaggtcatttgtgcgactgcaagtttcgatgatccgacttatgctctcgaatttggcgcgcaactctcgggtgtccctgcgagtacctttgttgccgtaacaggaacgctcgacctcaaatcagatcatgatgcagggacggatgccgatgcgaccgctctcgctgcaattgacctaagagccttctatgaagcggagaccgacgaagcacgtctgagaagtgttgcatcacttctcgcatatcgtggagttgatactgaagaacagacggaaaaggctctttatcaagcacttcgtgacttcgggcctttgggaaggcttgttaacgcaaccatgaaggaggccatcccgatagctgaacttggcgcgcttatcttcccggaaggtgtttcggcagatgtcacggatcaggctgtcacaacccttctggcgctaggtagtgttgcaagaccatcttcgggccttccggggctgttgccttgccgggttcataacttctttcgtggattgcctggcctctgggtttgtatggaccctgattgcaccgaactcgcaaatgaagaacgcggcggcatctgcgggaaaatgtactcccagcctatggacacctgcgactgcggtgcgcgcgtcctggaactattcacatgcagaaattgcggtaccgcgtatgggcgggcctatactgacgacatcgatgagccgcacgacctttggtcagagccgggtaagccacaacggatggcaagtggagagagcgcgccgcttgagcctatcgatttgcttctagaagaatccgctcgtgaggatgtcgctgagccagcggattacgaccttgagacaggacaactcaacccaaatacaattgggccgcgcaccagaacagtcttcatccggcaagggcgcttggttgacgcggcaagtaatgacgatgatggcggaagcgcgccggaaccgcccggaaagtttgttccttgcgccgtttgtggcaagaccgctcgttttggtcgaagctatgttcaggatcaccagaccaagggcgatcaacctttccaggcgttgctgacacgtcaaatccagattcagccacctggcccccaagaggccactcgtttcgcacctctgcgtgggcgcaaggtacttgcgttcagtgactcccggcaagttgcggcacggctggcgcccaacattcaaatgtactcggagcgagactctcttcggccactgatcatcagcggattcaaatggctacaggaccaggaattattgcgccgacgtcttgggcttgatgacctatttcttggtgtgcttttggcatcgcaaaggcttaatgttcgacttcggcccgagttgcatgggcacgaaaactttgatgcagaggatatcgtcgcgaaagcaatcaatgagggcaatctagacgatccagtcgctcttttggacctactcgacgatgtgcatgccaatagtgcgcctgaggctcttttgggaagtatgctcacaaccctttcagaccgcttttatgggatggaagcgctcgcactggcgtcgctttgcgagaaggaccgccatcgcaagaagatccttgatctaccacctatttcaaacctcgcagagactgacgaagcgaaactcgccttagcaagattctggcttcgttgctggaacggattcagcctagcaaaaatgccaggaacttggatcgaccgaccggcctccgacggctaccgtgtgaggtcgcgcaaagagaaggccaagatcgaagctatcaataccgtaatcacggagaaagctgcccggaagctattctgggatcaatggcatcccgaactcatctccacgttcacaaagtccaaggaaggcgggaacaggtatctcaacggaagcgaactatcgttacagtttgagggagactgggtacattgcacgagttgcaagtcggtccataggccaatacccggacatgatcgttgcctggactgtggtaacctttccgtggacgcacttgatccagatagcgatcgcgttttccttgcccgaaaagggttttaccgcaaacctgtcaccgaggcactgcaagagccgccgcgacaaccaatggcgctgatcgcggcggagcataccgcgcaacttaatgctccgcagaacgaagatgtgttctctaaagcagaagaacatgaactgctctttcaggatatcgcgctcgtgggcagcagcctcaggtctcgctctacagctatcgatattctctctagtacaacgacgatggaggttggtattgaccttggcgctctgacaggcgtggcgctgaggaacatgccccctggtcgtgccaattaccagcagcgtgctggacgtgctggtcgtcgtggtaacgccgttgcgacggtcttggcttttggcagcgcagatagccatgacgaacattatttctcgcggccagatgaaatgatccgcggcaaagtaattgacccgaagctgacactggataacccggagattgctcggcggcacatccgtgcctaccttctgcaaggctaccatcaggatcggttgccgacggttgacgctagccaaccgcatgatcttttctctgttcttgggagcgtctcggccttccgtatgccggactcggtgctaaaccgcgatgatttcgcgtcttggctgatggagaatgaagaatcgcttcgcgggcggattgcctcttggctgccgaccgaactctcagatgcagatcggactgaattactcggagaatttgtggcggactgcctgaaggctgtcgatgatgcgatttcgtcggacgcgacaaatgatgacgataaagatggcgaaggcgatgggggagatgaggaagctccggaggaaggggaagagcgtccgcaacaggcctcacagcccaataagcttctggaccgtctcctctattgtgggaagctgccccgctacgcatttcctacggacgtcgcgacattccacgtctttgaccgcgaccgttcctcacccttccgccacatcatgaagtttgcgccatcacagggcttgccgattgcgctttcgcagtatgctcctggcaagcaggtctggattgctggcaagtgctatacctcaggtgcgatctattctgtgatgaagaatgatctcgacgaggcctggcaagcccgcaagctctacatgcaatgctctgagtgcgggtacgcaaagacctacaagcaaggagaggtcgttcgccgtgatacatcggactgcgaagcatgcggcgaaccctgcagcttcggacccgcgcgctattggcttcggccactaggttttgctcatcccgtctttgaagaggaagttacctcacctgatgagattccggagacgagctatgcgacccgagccaagctcacgatggggacgccgccgcgcgatgcagcgggatgggtgcatgccaatgaccggattcgcggcctgagcacacgagaacaccttatggtgtctaacaccggccctgaagacgaaggctatacctactgcgtcaaatgtgggcgtatcgagtccagcacgacaccgaaccccagtcttgctggtccgcaccgcaagccttttccgaccaaggatgacgatctgacgtgcaatggtctcagtccgacacgccatcttttcctcggcacggactttatcacagatattggtctcttctcgatgcgagtggagaaacccatcgaacttcggccagcgcatgactccactaaagtcgcacttcggacggttagtgaggcacttgcgaaggcggcctgtcagttgcttgaaatcgagcctggcgaactaatggctgagtttcgacctgcactgacgaccaaggggaagtccggaaaagaagttgaaatttttctttacgacacactgccgggcggcgctggcttcgcaagccagatggcggagcgtgggcttgaattgttccagaaggcgctgtccattctcaaacactgccctgagaattgcgatggctcgtgctaccgatgcctccgcagctttaagaacaggctcgaacacaggcttcttgaccgtcatgtcggcgtcgagcttcttgagtacctcttgtcaggccaacaacctggcttcaatccacatcggttgaaggcctccactacgctcttgctgaacgatctcaaaagacgctgcgacgatgatatctccttcgaggctggagcgagcgtcacctacggcgagggcaagaccatcgaagttcctattctggctcaatcggcaggaaaatcgtttgttgtcgctttgtcaggacctctgacgagtggccacccaactgacgcaaaccttgctgacctcagagataacagcacgaaataccgcgtcatcgtcgagaacgagcttgaagtgcgcggcaatcttccttgggtcagtcgcaaagtactacagcagattagatcgtga

SEQ ID NO: 27461 - DNA, 1197 bp, Hydrogenophaga sp. Root209
atgggcggaatagccaggatattcaccccggaggcgaagttaaaaaagggcatccgcgctcatttcactcgcttggggttcacgaaggccgatgacggcacgctgattcttccggaggggggcaaggaggtcgttcggcaactgcatgctggtcaacgggcagagcggctgcgcgacagtcgagagtttctcaagcgtgcgcttccggaggctttgccacactttgcgagcggagctgagctagacccttcaaaaattcagttgggtcttatcagggttcacagcggaacaaaagatgccgatctattccgtgtcgcgtccttcacgtggtcggtccctgtatcggccggcttcggccggcgcatgcgatatcttgtctgggaccatcaccacgggcgtctcgctgggatcattgcgctgggtgatcccgtgtacaacctttcggtgcgggacaagttggttggctggtccgtcgaggatcgggcgaaaaggcttgtgaacttgttggacgcctatgtcctgggcgcagtggcgccctacaacatgctcctaacgggtaaggtcgtcgcctgcctggttagatccagggaggtctttgacgacttcaaggcaagctatggcagtaccgtagggatcatttccaacgaggcgaagcgcgcaaatctactcgccgtgacaaccacttcgtcaatgggacgttcgtcgatctataaccgccttcgacttgacggtacgacctacttcgatgccattggatacaccatcggctgggggcacttccacatcaccgatgacatcttcggaaagatgcgtgactaccttcggttgagcaagcatccgtacgccgacaagcacaacttcggcgaggggccgaactggcgcttgagaaccatcaaagtcgccttgaaggaaatcggtatcaacgaatccgtacttcgacacggaatacagcgtgaagtcttcatcagttcgttctgcaagaactcgatcagcatcttaaagaaaggaaagggaaaacccaatctggatgacctgaagacagtcgacgaaatatcggagcttgccaagaatcgctggatcgtgcctcgcgccgagaggcgagacgactacaagcagtgggatcgcagtcagattcgaaccctcattcggggaacggttgctgcagccgaaaagccgctgagcgcgaatgcggcatag

SEQ ID NO: 27462 - DNA, 1083 bp, Hydrogenophaga sp. Root209
atgaacgtcgtcatcctcagccgacagcaggccgtcgagcgcgtggggtactcgctcggtctggatggcagcgggctgaacggggagctctcgcctgcattggttgggcaagcccttcgacgcgcaacttccattcttgcgccgtgcgctcggtatgagctcgaacgcagtgttcgccaaacgctgcagcctctcggatcgcctggagatgtcgtgggtccgatggtgcaggacgttcttgagtccttgatcgtgtatcgcgacttgctagaaatgcgcagcactgctgacgaggtgtgggcgagcgcggaggtgacgattcgcccagcagcaccttcatttgtgaagcgtgaggacggttcgatcgcggtattggggacagccggcgatgtcatcacaccgattcccgaagacctccctgcaaggcttgtgcatcgcggtgcgctacgcctgttagttccgacatctgcggaacccctcgctccccgattgcaggagtttggcttggtcgagctgagcgaaaaggcgtggttgcgacttcccagggttgagccggcgggaaactacgttgaggaatggcatcggcgactccgagaggccccgattgggaatcggcctgagggtctcctgatctgcaagcccactcgtcgcggaacgctttatcgtgatcgatggaatccggctgaggttggggaaacggggctctttgtcgcacgacgcccccagcgcttcggagcgaacctctggtgcttggtcgatcttcagcccaattccaccgcacgcatcgtcgatctattctcaactggcgacaccctgcggtcgtgtgacgttgcatggcagattcagatggccttggacgcgcgcgcaggtctggcgcaagccttccgatgccgcccgaacggagaccgctcgacgatcgacttcttcagcccaattccgtcctgggctgagcgacggctctttctcgttggtcgacggcaggcggggacgggctgcctctattcatatgagatggcaacaactgctgccgacggtgaacgcaggttcctgcgtgagtcgctctggctggttgaacagaattaa

SEQ ID NO: 27463 - DNA, 5556 bp, Hydrogenophaga sp. Root209
atgacagcgaccattcaacagaccatcgacgaacttcggcgcaccttcactgagtacattgaggcgacataccacatcggtcacccgcaggttgtttctcaacgtcggagactgctcgaacaggtcggcggcatcttccagattccatacctggaatcgacgccgcgctacgtcgccggtcagaagtatgacgcgttagaacggttgcctgaagccgcgaaagaagccttcaacaggctgtcatcgcccctggccggtggtaagcaattgatcttcaatccaccgtatatacatcaagcccaggcccttgaagaagtgttggggaacaagaaaaacctgatgatcatgactgggacgggttcggggaagactgagtcttttctgcttccgattctgggcaagctcgccatcgaggcacgagaccggccgactgacttcgccaagtacaacgccgtgcgggccatcgttctctatccgatgaacgccttggtcaacgaccaactcggccgactccgcctgctcttcgggaatccggctgtggtggcgatgttcaaggaatgggctgggcgcccagcccactttgcgagatataccagcagaactccatatgccggcgtccgaagcccggtcaaagacgggaaccggctttcgtcaatcggtgatttcttcgccgagatcgagtcggccaccaggaggcatcgggccgggcggccccacattgctgaagaagatgcacgggcggcgcaattgttcgagagcctgagcgcgcgagggaaatggcctgccaagcaaagcgtcgcggcttggttcgggcaaccgcattcgcagtggcaagacagaaacggcgagtaccggcgtgcagtgctcgggcccgacgatgccgaattgttgacacggcacgaagttcaagccagtcctccggacctgctcatcacgaactattcgatgcttgagtacatgatgatgcggcctatcgaacggcccatctttgaccggacacgcgaatggctccaagcctgcccggacgagcgtattcttgtcgtattggatgaagcccacctctaccgcggtgcgcagggcgcggaagtcggccttctgttgcggcgactgcgggaacggctgggcattggggaggagcgctttcaggtgatttgcgcgacagcaagcttcagcgagcaagggcaagctaccgcgggaaactttggcgcgcaacttaccggtgttcgcgaggacaccttcgttcctatcaccgggaccttggcggagcgcacgccctttgcgcgcggcaccgatgccgatgtctccgccctgtgctcggttgacctggacggcttctaccaagacgggcaatcggcgatggttgccacgcgtgcctttttggattttcgtggtgccccccatcaagctgatctcggatgcgccctctaccgtgctctggaggactacgaacctttcaatcaactggtcaatgagaccatgaaggcagccattcccctcgccgagctaggtccgcttgcatttcaggccgatgcgccgagatcgcacgtggacaaggcggtgagcgttttgcttgcccttgggagccgcgcacgtttggcgcccgaagagccgagccttttgccgtgccgaatccattcgttctttcgagggctacccggcctatgggcttgtatggatcctgcttgctcggagctcgactcgactgagcgtcatgggccgatcggcaaactttttggccaaccgagagatcgatgcgcgtgcggcgcccccgtgctggagtactacacgtgtcgtcattgcgggacttcgtacgcgcgggcctataccaatgatgttgcgaacccacagtacatctgggccaatgcgggggagagacttcaaaccgatgcggggttgttcgaggcctttcatccgctggatcttttgctcgaggaccctccttcgccagagcgcggccgagctgcgacctacgatcttcagacaggacgtttgaacgccgcccatccaagtgagcgtgctcgcctggtgtatctccggcccgaagctggcgccctgactgaagacgctgatgcacacgtagggcgggcaggcccgggcgaatttgttccgtgcggttgctgcggcaagaggcacggccacggccagtcaagcgtgcaagaccatctaacaaaaggggaccagccctttcaagcgttgctcggtacacagatccgggtacagccacccggcccgaggcctgcgacggaattcgcacctttgaggggccgcaaggtgctgattttctcggactcaaggcaggtggctgcgcgtcttgccccaacgcttcagaactattcgctccgcgatgcggttcgggccctgctgcctgtcgggtttcgcctgcttgcggatgaaccgcagatcgccgcatcactggttctgaaccacgcctttctcgccttggtggtcgcggcacaccgattcggggtgcgggtgcgacctgaactcgacacgggcgaatccatgccgatcgtccgtgccgcagccggacaaatgccaacaggcgtggatttgactgaactcattgcggcgcgctgtcctgccaacctgatgagggcaatcgtcaacacgatcaaggacaacggcctcgggctggagccgcttgccattgcctccatttcggagaacgcgcgcatttcggcgcgaattgcagggctgccggtgctgcccggcttggccgtggatgactctggaaagctcgccgtggcacgagcgtggctgcgctgctgggcccgagggccgggcatctggtttggcgacatgccgccggcctggtggagcactgaggtcacaacgcatcgtggtgagttccagccgatggatagggtgctcgtgaccagggaggccaagcgaacgttcaagaaggaatggcttccgcgattgatgacgttcttcacccagagtcttcaggacgggggtgtgcgacttctcgcaaacaatctagccctagagatcggtggccagtgggttcggtgcgctacctgcaagtcggtacaccgtccggtcggcttgctcacgacttgcatcgattgcgggtccacgaatgtgaacacctttgatccggaaacagaccaggttttcgtcgcacgaagggggttttatcgagagccggttgcgctggcaatgacgcagcgcgaaccgaccttcatgtctctgatcgcagcggagcacaccgcgcagttgaatgcagcgcagcccgatgacgctttctctcaagcagagaaccacgagatccggttccaggacatcgatcttgcctggcgagacacagatgcgcgcgcccccgccatcgacgtgctctccagcacaacgacgatggaggttgggatcgatatcggagagttgtccggcgttgcgttgcgaaacatgccgccgggccgtgcgaactatcagcagcgcgcggggcgtgcgggccgtcgaggtacggctgtggcaaccgtcgtggccttcggcagttccgatagtcatgatgaccactacttcacgtcgccagacgagatgattcgcggctccgttgtcgatccacgactgaccctagagaacgtggacatcgcgcgacgccacttgcgcgcctacctgctgcagcgatatcacgaagcgcgaatccctgagctagacgcgcacgccgatccaagcttgttctcagtgctcggcagcgtgcgcgactttcgcgatggccgcggcgcgcttaaccgggaagactttcgagtttggctggcggggcaggcacccgatcttgaagtggccgtgaatcggtggcttcccactcaaatcccaagcgaggcccgctctaggttgatagccgacatggcacacgacgtggcgactgcggttgacgaagccattggcttccgagagcctgttcctgctgagacgaatgaagagcagccgacatccgaaacaacggcggtggacgcaacggcggaagccgaggcaccggcggccgcgggggctgaccaggagacagacttcgcagacccatcggccgacaaactccttgatcgcttgctgtattggggcgtgttaccccggtacgcatttcctacggacgttgctccgttctatgtgttcaaccgagccttgtcgacaccgtttcggccgcgcatggacttcgccccgacacaggggctaaacgtcgcgctctcgcaatacgcacccaacaagcagatctggatcaagggcaagcagtacacgtccaaagccatctactcgcctttccgcgacgttcggtctgatgcctggaggaagcgcaagctttattttgaatgccaggtgtgtggacacgcaaaaacggagccgtatgttgaggagcgccgcagtggccgttttcgatgcgaggcctgtcaaacgccggacagctttggaccaggacggtcgtggttccgtccgcccggctttgctcaccccattgacagagatcccgtgaccgcgccagatgatccgaacgagacagcctacgcaacccgtgccaagctgatcatgcaaactcccggtccggaactgggctggatcgccattggagaccggattcgtgcgttccccaccagggaccaccttctcgtgtcgaattctggccctgaaggggagggctacaactactgcgtctcgtgtggtcggatcgaggcggcgactgacccggagatgaacctgtaccaaccgcactcgcggccgtaccctagtaacgagccaggtccgtgcccgggcaccagagttgccaatcgcatagtgttgggcacggattttcggaccgacattgcgcttttctcattgccgctcgaccgtcctttccgtgtccgacctggcaatgatgaaactgactccgccttgagaaccgtgtgtgaagcagtagcgaaggcggcttgtcagctattggaaatcgagtccggcgaggtccttgcggaatacagacctgcgctcaccgatgctggcgcagccggcttggaggttgagcttttcgtgtacgacaccttggcgggcggagcggggttctcgcctcaactggttgctcgtggcgacgagttgttcaggaaggcgctttccatattggccgactgccccgagagatgcgacgcgtcctgctatcgatgcctgaggagcttccgcaacaagatcgatcacagacttcttgatcgggtgcttggacagcagttgcttcagcatgcgatggcgggaggctataccgcctatccaccagagcgcgcggaagctacttcggatttgctctatgacgacctgcgacggcagctctcagacgattttgctttcgagcgcaacgctgtacgccagcccgcaggtttcggaaaggtgaacgtcccaatcatcctaacgaggcggtcgaccggcgcagagacttggatcgcgatcagttcagcaattgcctgtgacgtgccggtcgatgcgcagctccgtgaaacgctcgcccctgatgatcgtggagctgttctgtgcgtggatgacttgctggtgcgacgccatctagcagctgctgtggatagggttcggctttcgctgaattga

SEQ ID NO: 27464 - DNA, 1260 bp, Hyphomicrobium denitrificans 1NES1
atgcggcagccgccgccggacaaaggcaaatgcactcgcacgttaaggggggatctgttgtcaaaaaaggcgaccgtcgtacgcgtttcgacccgtgaagctggcctcaagaggcgattgcggcgacatctaacctcactcgggttccagagaactgacgaaggggatcttgctccgcccggcaccggcaaggaagcgattcggaccgtccacggagttcaacgcgaggatcggctggcagctaacaagcaatttctgtctgaccaattcctcaagctggcaaagcattttgcctccggcaacgaggttgatccgcagaaaatctcgcctgcgttggagcgtatagaaactggcacatggcaaggcgatctctttcgcctagcggcgctcacgtggtcagttccggtctcaaacgggttcggccgtcgcctccgatatctggtctgggacgagaacaacaacaagctcatgggcatcatcgcgattggcgatccggtgtttaatctgcacgtgcgcgatagccttatcgactggaccgtcaaagatcggagcaagcgcctcgtcaatataatggacgcatacgtgcttggcgcgcttcccccttacaacatgcttctcgggggcaagctcgtcgcgtgcctcctgcgcacgagggatatctacaatgatttcgcaaaagcgtatggcggcacgaagggcatcatttccaaacaggaaaagaaggctcggctgctcgcgatcacaacatcttcctcaatggggcggtcctccgtctataaccgcttgaaactcggcggcgtcgaatatttcaaatcaatcggttatacgggcggatggggacattttcatattcctgacagcttgttcttggacctccgcgattatttgcgtcacatcgatcattcctatgcggactgcaatcgcttcgggcaaggtccgaactggcgccttcgcactacgagggcagctctcgcggccttgggcttcaaggaagacatgctgcggcatggcatacagcgcgaagtcttcttctgccaactcgcaagcaacgccgcgaagttgctgcattccggtgaggggcggccgaatctaacctcgcttctcacagccgaagaggtatcgaagctcgctgttgagcgctggatcgtgccgcgcgcgttgcggcgccccgagttcaaggagtgggaggcggaaaacatcgccgtcttgctgggcgatcagcgcggcaagcttctagcgaagctggcgcgcacggggtga

SEQ ID NO: 27465 - DNA, 1113 bp, Hyphomicrobium denitrificans 1NES1
atggtaatcaccgagctccgaccggatgacgtcctcgccgattgccgccgagcgctgcatctggcggcggctgcgggcacgctcatcgacgatggcctgctggccgcgctgttaaggcgcagcgcgggcatgcgttgtccctgttcgcgagcggcgttgcgggcttcccttgttgaaagccttcagggcctgtctcaggacgtcggacagcttgcggatcgtatcgacgaaattatcgatgctctcatcgtcgcgggcgatctgctcgaactcagcgatgtcgtcaccgacgatccaggagcgaagggcacctgggtttacgcggctccgccgggcttcgtcgcgcgttcgagcggcagcatcttcctcatcggcgtcgttcccgaccaggacacgttcctgccggaagggctcgcttcccgtgtcacccatgaaggcttcacgcggctgatcgcgcagcaaccgggggaagacctgcctgccgaattgcgcgaacagggccttcaggagctgtcggagcatgtttggctgaagtgccctaagatggagtcggcgcaggaaatgctggccgcgctggaataccggctggcgtcgcagccgccgagtggcgctatcggcgacttgcagattctcgactccgctcagcctgtcacttactaccgcggaaggtggacggctccgaaacgccagagcggcaatttcgtcgcccgccgcccccaggaattcggggcttccctttggtgcttcgtcacgctgcaagacggggttccggcaaggctcctggattttccactgaagaagtcgcgctggcgcggctgcgatgcggcatggcacgttcagatggcactcgatcgccgatttggtcacccgcagctctaccggcggcgcgccgccaacgacggagtccgactggatttcttttcaccgctgccgctctgggcggaaaggcggctgataatattcggggggcccgtggctcccgagaagtgcctgatgtcctattggcttccgtcgagcgaagcgaaggtcgaagagcgctttctgcaggaccgactctggctttcggccgcggacggcgcaagtgaagggggttcgcgtgcaaacaatccttga

SEQ ID NO: 27466 - DNA, 5541 bp, Hyphomicrobium denitrificans 1NES1
gtgcaaacaatccttgaaacgatcgagaaccttcacgggtcgctgcgcgattacatcgaggcgacataccatatcagcgcgcgctcgctgatcgagcggcgcaaggaattgctggattgtcctggcgtcattcatcaggtgccctatctggaatcgacgccgcggtatcagaccggcgaaaagttcgcggacatgaaagggctgccaccagcggccctgcaagtctattcattgctcacgaaggcggacggagaccttccgcggctcatctacgatccaccctacaagcaccagtcagagtcgatccgcggctgcctcatcgacggcaaaaacctcgttgtcatgacgggcaccggctcgggcaaaaccgaatccttcctgctgccgattctcggcaagcttgcacgcgaggccaacgcaaaaccggcatccttcagggacaatccggcgatgcgtgcgctgatcctctacccgatgaacgcgctcgtgaacgaccagttggggcggctgcgctccctgttcggcgatccgcgcctggttaagctgttcaagtcatgggccgggaggccgccccgcttcgcccgttacacgagccgaacgccctatgccggcatccgcaccaccaagaaagattccgtcaagctcaagtcattcggtgagttctacgcagacatcgaacgccgtgcgggcggcgaggagtcggacgaccagaaggaggcgaagcgccttctcgccgcgctaaaggagcgcggcaagtggccggccaagccgtaccttaccgcgtggttcggggagaagaattccggatgggccgaccggaagaccggagaattcgttcgcgccgtcaccctaccggacgactccgagttgcttacgcggcacgaagtgcaggccgcgccgcccgatctactcgtcactaactattcgatgctcgaatacatgctcatgcgtccgatcgaacggaccatcttcgacaggacgcgcgaatggctcgaaaagaatccgatcgaaaaatttcttgtcgttctcgacgaagcccacctttacagaggagctgccggcgcggaagtcggcctgcttctgcggcggctgcgcgacaggctgggcgcgtcttccgagcgcttccaagtgatctgcgcgacggcgagctttaaggatcatgagtacgcgccagaattcggcgcgcagatttcgggtctgccgcccgaaacattcatcccgatcaggggctcgctcgatctacgctcgcacagcgccaccgggtcgaaccatgacgcggaggtccttgcctcgatcgacctgaaaacattttacgacgcagtggaggatgtcggccgtctcgctgccatcaaacctcttctggagtatcggcatgtcagcggcagccacaccgccgaggccgcgctttatcacgcgctatccgagttcggccctatgggtctgctggtcaacgcgacgatgcagcaggcgctccccgtcgctgaactcggtcgcgacttgtttcccacctcgccgccagcaactgccgacaccgccgtcacggcgctgatggcgttcggcagcgttgcgaggctcgatccgaaaacgccaggtctgcttccgtgccgcgttcataacttcttccggggcctgccaggcctttgggtttgcatggatcccaattgcagcgagatcgcggaagaggacagagacgggatttgcggcaagatgtacagccagccactggagcgttgcgaatgcggcgctcgtgttctggagctgtatacgtgccggaactgcggcacagcccacgcgcgggcctacaccgacgacgttgacgcgccttcagcgctctggtcgaagcccggccgggcgctccgcatggccgccggcgccacgacgccgctgctgcccctggatcttctgcttgaggagcccgccatcgaggacgtggcggagccggccgattacgatctcgagacggggcggcttaatccgcccaatcttgggtcgcgcacccgcactgtctatgtccgcagcgatcgtgtctgcgaagcggtggacgaggacgacgacgcaacggccggatttgaggcgcgcgggcagtttgtgccttgcgccgtctgcggtaagaccgctcgattcgggcgcagctatgttcaggatcaccagacgaagggtgatcagccatttcaggcgctcgtcgcgcgccagcttcagattcagccgccagcacccgtgccgccgacgcgctttgcgccgctgcaaggacgcaaggttctggcgttctcggactcccgccaggtggcggcccgtctcgccccgaatttgcaaatgtattccgtccgcgattccctgcgtccgctcatcagttggggctatcgccgtctcttgggcgttcctgtacttcgatcgaacctcaatctggaggatctctatctcgccgtgctgcttgcttcaaaggaactgaatgtgcggctgcgcccggaaatgaagccgggcgagagcttcggagccgaagggattgtcgaacgcgctgttcgcgccaaggagaccgaagacgatgcggggcttttgaatctctgcatggaactgcgcaacgaacggccccccgaagccctgctcgacaatatcataaccacaattcaggaccgctttcgcggttttgaagcgcttgcgctcgcgtcgatcgtcgaacgcagcaagcatacaactgccttgcagcaactgccttcgataccaggttttgccgaaacgcccgaagccaaggtgggcctcgcgcgcgcatggctgcgatgctggcaggggcacggtttctggctgagcgccatgccgccggtctggtggcggcggccccgttccgagggcaccagcatccgtggccaaaagggcaagttcaacgcgatgactcgcataatcaatgacaaggcggctctcaagattttctgggataaatggtcgcccgcgctgcttgctcttttcacgcaggactcggacagtggcttcaagcgtctcaggggcagcgagctttcactgctcttcgatggcgcatgggttcattgcgatagctgcaaatccgtccaccgtccggtgccgggactctcgcattgcctcgactgcggcagcagtcaagtcaaagcactcgaccccgataccgatccggtctttttggcgcgcaacggtttctaccgaaagcccgccatcgaggcccagaacgggcgccagcctatggcgctgattgccgccgagcacacagcgcaattgaacgcgccgcaaaacgaagatgtgttctccaaggcggaggagaacgaactgctgtttcaggatatcgccctggcggggcgcaacagcaacgaggctgctattgacgttctgtccagcacgaccacgatggaagtcggaatcgacatcggcgctctgtccggcgtggccctgcgcaacatgccgccaggccgcgccaattatcagcagcggtcgggccgcgccgggcgccgcggcaatgcggttgcaaccgtcgttgccttcggcagcgccgacagccacgacgaacactatttctccgagccggacggcatgatccgcggcgatgttgtcgatccgaagctcacgctcgataatgccgagatcgtacggcgtcacattcgtgcgttcctgcttcagaactaccatcaggaccggctgccgcaggtcgatcccaaccagcggcacgacctgttctccgtgctcggcacggtcgccgaattccgccgtaacacctccatcctgaaccgcgacgatttcgcgtcctggcttaaggaacacgacgaacagcttcagaagcgggtgtcctcatggatacccacggagctgaagccggaggatcgcaaggagttgctggaaggcgtggtggccgactgcctgaaggcggttgatgacgcgatacgccccggacccggtgagacgaacgaggctacggaggcggatgacgacgacgatgagtcagaagacgcggccgaagaaggcgaggagcgcccgcggcagacctcgcgcccgggaaagctgctggaccgcctgctttattgcggcaagctgccccggtacgccttcccgaccgatgtagcgaccttccatgtctttgaccgggaccgttcgtcgcgtttccgtccgatcatgcgctttgcgccgtcgcagggcttgccgatcgcgctgacgcagtacgcgccgggaaagcaggtctggatttccggcaagtgctacacctccggcgcgatttactcggttatgtcggacgaccgtttcacggcatgggagtcaaagcgcatttacatggaatgcagtgagtgcggcttcgcgaagacctttcccatcggagaggcgaaccgcaacgaggtgcgcgactgcgaagcgtgcgggggcgaagacactttcggccccggccgctactggctgcgtccgcctggcttcgcccatccggtcgatgccgaggaagtcacctcgccggatgacatgccggaaacgagctacgccacgcgcgcgaagcttacgatgggaacgccggacgagggtgccggctggcttccagtcaatgaccgcatccgtgttctgccggcgcgcgaccacctgcttgtgtcgaacaccggaccgaaccacgacggctatacatattgcgtcaaatgcggtcgcatcgagtcagcaacggatcccgggccgaagctgctcgggccgcaccgcaaacccttcccggacgatgatgacaagcaaatgtgcgacggcacgagcccgacacgtcacgtcgtcctcgggacggatttcataactgacatcgccctgttctcgatgcgggttgccgcccctctgaagctcaagcccggccactcatcgaccgctgttgcgctgaggacggtcagcgaggccctggcgaaagcagcgtgccagttgcttgaaattgaatcgggcgaactcatggctgaattccgccccgcgcttacgccggggggaacgagcggtcttgaggccgagatattcctctacgatacgctgccgggcggcgccggcttctcgagccagctttccgctaggggcgtagagctgtttcaacgcgctctctacctgatgaaaacatgcgctgccaattgtgatgcgtcctgctaccgctgcctgagaagtttcaagaacaagttcgagcacggcctgctagaccgccacgtcggtgcccaattgcttgaataccttctcaatggcgagcagccgcaattcaacgccgaccgcctcaggacctcgaccgaatttttattcaacgatctactgcggcaaggcgtcggcggcgttcagctcgagttgaatgcgccgttcgccacaccggcgggcgcgttgaccgctcccatcatggcgaccacagccgcggggcagtacatcatcgctctttccggccccttgaccacggatcacccggcagactccgagattgcgaggttccgtgataacgggggcagcattcccgtgattgtcgagaacgagctgatcgtccgaggcaacctgccatgggccacgcggagcgtgctgcaaaagatcggtggcctgtga

SEQ ID NO: 27467 - DNA, 1215 bp, Klebsiella oxytoca 10-5244
atgcacaaagatccctcaataatagttaatgtgaacctgcgtgaagcccggttaaaaaagaaggttcgagaacatttacaatcattgggatttacaaaatctgatgcaggagcgctacaggccccaggaaacacgaaagaggtaatcaggacccttcatagcgctcaacgggctgagcgacttgctgcaaaccaaaatttcataacactcaagtcctcaaaattattgaaattttttgcatctggtaaggatgttattcctgacaagatatcgcctgttcttgagcgggtgtcatcaggaacctggcaaggtgatctgtttaggttagcggcattaacttggtctgtaccggtttcaaacggatttggaaggcgtctccgataccttgtttgggatgaaagcaatggaaaattgatagggttaattgctattggtgaccccgttttcaatcttgccgtcagggatagattgattggttggagtacagaggatagaagctcaagacttgttaatgtgatggatgcgtatgtacttggcgcacttccaccttataattttctgcttgggggaaaactggtagcttgcctacttcgtagtcgcgagttatatgatgactttgcaagagtgtatggcaacagtgtgggggttatatctcaaaagaagaagagagcccgtcttttagcaattacaactacatcatcgatggggcgctcttctgtatacaacagattaaaacttgatggaattcagtatatggaacccattggttatactggcggctgggggcattttcacatacctgatagcttgtttattgaattacgtgattacctgcgcgacatggatcatcgctatgcagaccaccatatgtttgggaatggtcccaactggcgtctacgaacgatgaaggcggctttaaatgcgctaggatttagggatgatatgatgaaacatggaatccaacgcgaagtatttatcagtcagttagctgataatgcaactaatattctgcaaacgggtagaggtaaaccagatcttacatcattgctttctgcgaaagacatcgctgagctagctatggagaggtggatgattcctcgatcaatacgcaaaactgagtatcgttcttggaattcagattatctttttgattttattgataataattggttgagcttggaagtggaaactgataaaaaaaagactattagttaa

SEQ ID NO: 27468 - DNA, 1650 bp, Klebsiella oxytoca 10-5244
gtggactacgccattaacgaggctagtgggaagttagtatcggcttctcaagcattgagatatagtcggtatatatgcccagtttgtaaaaaaggagttagtctccgacggggaaaaataatacctccgtattttgcccattttcgcggatatggcacactcgactgtgagaattttgtccctgctcatttatccttcactacaaaagaaaatatcaacgatattgtaaagcggcgtatggagctgcgtttgttgatctctactgccaaaaagattcgagaatggtcattagagctagcattacccacttgtaacttatgtcaggctaaggtcattcttgacgtagggggacgatctcaaacgattgatatgagaggtatggtaacgcgccgtcagattagtgctgagctctcagctagaccatatcgcatagtatcttttactggcaatcctgatcctgagtttgttagagaagtggaaagggaatgtccgggactaccctcagtaggggctgctgtattcaccgctatgggaggtggtgcatcgaacggatttcctctggcgcaggaattaagatgcactgaaaccttcgctttcctttggcgggagcctgcaagtcccggatttcctgatgaattagacattgatagtctagttagtaggcaaggatggaatttagccattgtgacaatacctgaaactctttccccagagagcatttcatggcttaactccttcacacatcttccaattgttcctgcaaaatcttctattacagctatttggccattccaaactcaagacatcagtattaatcaggtcgagtgcattcattccaattttttactattgtctgcaaatatgatttcgaccccacccaatgaaactgggccgacaatgtgtgctcaaggggcctcttcagtcctctcagcgattggagtagaaaaatcaccggcattctttactcttacccctgataatagtgacatagtaggagtatctgcttcaaatgatcaagatataaaaaaatattattctttttttactaataagataaaaaaccataaatatccttcagttgatctagtttatacaaaaaaaaatggtgtgagagaaatagtctcattgcatcagagaagatgtgttgaacttacaatggaagctcgacagttaggttataagttagaatacttgtctatgccttctggggccgaagggacggccaaaatacagagggaaatagatattagtcgtatcaatcttttttcaagtgatcatatggctcctcatgatagcaatatgagattgctacgttctgatgccttttctaagttatctcaatgtttatctgatgtgaattataatctggatattgagtttaaagggctaggggaattacatcttgctggatttaataaacttggaaaagacattgtcataagtaatgaaatatcttcgagcctacgtcttcgtatattgagcttcatattgcagatgcaatcaattaataatgaagttgtcatggttaatgattctaagttacttgaagtattggaaaaattaaaccctaaacaacacctactaccccactatcgagcattggtaaaagaggttattgccagtggatttgaatttaatcgctttagataa

SEQ ID NO: 27469 - DNA, 1884 bp, Klebsiella oxytoca 10-5244
atgagttatcaatatagccaagaggctaaggagagagtccgtaagttaggacagtctgatattattgattttattggagaggttcctattacccttcggcgcaaggtattcagccttatgcctaaaattcctgggttcagagtaggtcaaccgttagaaataaaagagaaacagaagcgtctcattggatacatgtttcagactcattcctctcctgaggagatatatgcatggaaaagttttgctcttttttggaaactatgggcagaagaaaaaataggtaagccatttacaatatgtgaagagaagggagttgaacctggtactggcttgatttttattaaagaacttgcagatacctttcctaaggcgtcaagagaggatgttgaacgtctttattcttttagcggttttactaatgattcaaaaattacagcagcatttgagttttttcggccagcgaggatacttgctcgtgataatgcactcgatgctcttcccattcgattagatgagttagaagagcgtattgagcttgcaaaatatattattgaagataatgaaagtagtattaaatcgcttaaatcagcaactaattcacttgccacagagttaaaaaaatatgcaaaggataataaacttattttaaagtcgctcattgatttgaaagacattatagaaaaagaggtgaaaagaactgataaggtaaataaggtcgtcgatgatctatctatttctaagaaagatatatatttaaatttagaaaacatcacaattaaaaataatacctatgattcagctatagatgaattttacgagtatggcaaaaatctagattgtataaataaaaagattgttgagattcaaaattcattagagggtatttacgaaaaagaaagcaatgatgatgttcttaatcataatgagaattataaattactcgctgaaagaattgatatccttgactcgaatttcgaaaagaaaagttcgggtttaatttactcccaatgtaatgaaattcatgaaaataaaaccatagagtcagttgaacatgtatcaactcacgatgaagcgtttaatattatttcatcgaatcttcaagctgttggtctgaataaagagtcctctaaagatgtagctagattagtacttgctgcatttatttcaggtcagatagttcaattatgcggttctctagctgatatagtagctgatgcgattgcttctgcagtaggagctcctctttatcatgaatggagagttccagtaggacttatttctgatgctactgcttttgattttgttcagtctgctgccaattcgtcacattgcctagttttgaaaggtgctaacctttcagcatttgaaatttatggcactgcaattagggatattgtggttcagcgtcaaatatatcaaacagattatgatcatcttgcactgattgctacctggaaacaaggtcatgctgtatttcctgacggtggaatgttagctgaattgggcccagtaattgatacagatacattaaaacttcgtggcgtctctgttattttgcctaagttaaaactgggggttttttcaaagagacagtggtctgaaattgaaggcatgcaatcagatgtgactagagaagatatcagtgagttgagagaactattggaagagtctggctttgatggcggtaatttatggaaaagaatgatcagccgtttttatatatcactcatgagtattcctgatggaaattcaacttatgatctttattctgttttattctattatacattgccttgggctcgtgtcaaaaatgggccagttgaaaaaattgcaagtattgctgagcgtgaattaacagaacgtggtgaacagttatctgcgtga

SEQ ID NO: 27470 - DNA, 1029 bp, Klebsiella oxytoca 10-5244
atggaatggacggcagtatcacgagaagaatctcttaaaattatttcggctgcgataaaatgccgactctctaatgaaggattgagaatctcaataatctctgagtgtttgagaagtgtactgtaccaatattctgtttctgatattaaggatactagagaagctgtagcctctcttcgcctcactaatgcagtaaggcgaaagctagcgccattatggccagatgttttagattgtagcaatgtcatttatcctggggctttggctgtgcttgaaagtatggccgaattaggtgacatgattaggttagagggcggtaaatggttgactgcacctttacatgctgtccgtgttgataataagatggcaattttacttggtggagatccatcatatgctcttccattagatatggatgtaaaaactattggtagagtaagactagtcgaacaaagagtttgcaaaggaatagtggagctatgggatgcaaatgagtggataggagctccagttgaaggccatgaaatatggatgtcaaatctgttttcgcgtacatgctctcgattaacggatgttcctaataatatcggagatgtaactgtatacgtaaaaggccgttggcttaaattatcagaaataccttcttgtgaaaaaaatatattgctatgcaggctcgctattggtaccagtttctcatattttttgggggagttcgtggatggagaactatcgaggatgagttctttggagtcatctgatgatgctagaaggttacgcttctatcaggatataagggaagcttgttcattgaaaataaaaataaaaaaagataatggactaataagaatgaaactggttagaccattaccaagaagagagtcaaaggtgcttatgctcggctggcgtgagtcaggccataaatatgagccctcttggatagcacactatatatttcctgaggaagtattaccgatagtgcgttgtacttttgaaggactcggaattgttttagttaatgaatctaaatga

SEQ ID NO: 27471 - DNA, 3912 bp, Klebsiella oxytoca 10-5244
atgattgataaaaataaagtatctgatcgttctggcatacatgagacagtgagaagtctaaccgataatttgcggcaatatatcgaagcgcaatatcatattcgtgatgaaggcctaatcgacgaacgtcgggctctacttcagaaagacgaaacaattgcacaagttccgtatattgaagcaacaccagtttatgaatctggaataacatatagtgaattacctattcctaaagttgcaagtgatattttgactcagttatcggaaatgggagttggtctttacccacgcccttatcaacatcaatctcaagcacttacttcatttcttggggatgaaaaatcagatttagtcatagccacgggtaccggctccggtaaaacggaaagtttcttgatgcctatcatcggtaatttggcgattgaggcaactgaaagacctaagtctgcatctatgccaggttgtagagctattttgctatatccgatgaatgcattagtaaatgatcagttagctcgtattaggcgtctttttggtgattcagaggcatctaaagtgcttatggctggaagagactttcctgtgcgctttggcggatatacgggaagaactccttacccagggcgtcgaagttctaaacgagacgaacagtacattaagccactattcgaagagttttataataagattgcaaacaatgctcctgtgcgagaggcgcttgaaaaaattggtcgttggccaagtaaagacttagatgctttttatgggtcaggtttatcccagtcaaagacttacaaatcaggtaaaaataaaggaaagcaatatgtttcaaacaattggggggagaggttaattacacaatcaggggatcgtgaattaatgactaggcatgagatccaagatagatgcccagagttgttgataaccaactattccatgcttgaatatatgttgatgcgaccaattgagcgtaacatttttgaacagacaagagattggcttaaagctgacgatgagaatgaacttatcctcgtacttgatgaggcacatatgtatcgaggtgcagggggagccgaagtagcgcttctcattcgccgcctttgtgctcgtttgaatattcctcgagaacgaatgcgttgtattttaactagcgcaagccttggatctatcgaggaaggtgaacattttgcacaagatttaactgggttgtcaaaaacatcctcaagaaaatttcgaataattgaaggtacacgggaagtaagaacacccgctcgaatggtttcccaaaaagagcttaaagcgctggctgaatttaatcttaattcatttcagaatgtagctaataatattcagtctgctcttgacgaaatagatgttcttgctgaaaaaatcggttgggataaaccaataataaaagatcacaacacgctgcggaattggttgtttgaaaaacttaccggttttgaaccacttgaaactctaattgaaagcgtttctggaaaagcagtgagattggattttctaagtgaacaagttttccctaatttcccgcaagaaatggcaatacgtgctctagattcactgcttgcattgggctgctatgctcaacgaagctctgataatagagtgctgattcctactcgtatgcatcttttttttaggggattacctggtctttattcctgcattgatcccgaatgtaatcaacgactagcaaatcacagtaagcctacaatacttggacgcttgcatacgaaaccgttagatcattgtacatgttcatcaaaagggcggatctatgaattacttacccatcgtgattgtggtgcggcatttattcgtgggtatgtcgatgcggaaatgaattttgtatggcatcaacctaacggaccattatctgaggaaggaagtatagatttagtttctatagagattttagttgaggaaaatccacaccccaatagtgaatatcaagatcggtggctacatatcgaaacagggcgtctttttaaacaatgccctgataatagcttagggtatcgtaaggtatttataccagacagatttaagccgggcacagatataacattcgatgagtgtccggtttgtatgcgtaagacaagaggtgaacctgatgaaccttcaaaaattatggatcatgtgaccaaaggtgaggccccttttactacattagttcgaacgcagatgtcgcgtcagcctgatagccgtccaacggatattgcacacccaaatggtggaaaaaaagtactcattttttctgacggccgccaaaaagcagctagattagcgcgggatattcccagagacatagaacttgatttattcagacaatctattgcactcgcctgctctaagctgaaagatattactaaagagcctaggccaacacctattctttatctcgctttcctatcagttctatctgaacatgatttactcatttttgatggagaggattctcggaaggttgtaatggctcgtactgagtttgagcgagactatggtagtgatctagcagaggcctttgatgatgattttagaccacaggacccaccgtctcggtacaaaatggcgttgcttaaacttttatgcggcaactactattcactttcaggaactactgtagggttcgtcgaaccattaccagctaaaaaggaaagaatatggaaggaagtccaggggaaaaatattaagatcgaaaaaagtgatatgaatgccttggctattgcttggattgatacattactcactgaattttcttttgatgattctattgattcagctttacgctgcaaagcagctggtttctataagccaaattgggggagtaagggacaatttggaaagtccctgagaaaagctctaaagcatcatccggctatggatgaatccgcagtaaataaattggaagaaatcttccgtaatcaattagcatctgaaaaagatgggacgtggtatctttcaccaaattctcttcgtttacaaattgatctttcacatatatggatgcagtgtccagattgtacggcacttatgccattagttttgggcaaatccacttgtcttgcctgtggtagtaacaatgttaaatcagttgatccgttagaaagcaattacatcaaagctagaaaaggattttggcgttcaccagtagaggatgctttggtttcccattcaaggcttctaaaccttaatgttgaagagcatacagcacagctatcacatagagatcgagctagtgttcatgcaactactgaactctatgaactccgatttcaggatgttctaattaacaattctgataggcctatcgacgttcttagttgtacaactacgatggaggtaggtgttgatattggctctttggttgctgtagcactaaggaatgttccaccacaacgagaaaattatcagcaacgagcaggtcgtgctggtcgtcgaggtgcttctgtttctacggtcgtgacatattctcaaaatggtcctcatgacagttattattttcttaatcctgagtacatcgtcgcaggtgcacctagaacgcctgaagtgaaagttaataaccccaaaatagccagaaggcacgtacattcattcttgattcagacatttttccatgaaaaaatggaacagggtgttaatagccctagtgaaaaaacatctatattggaaaaagcgcttggcactactagcgattttttccatggagcaaaggatactggtctaaatttggattgtttcgatcgctgggtagaggatcggatactctccgagagtggtgatctgagagcaagtgttgagagatggcttccttcagttcttgagactaacggactttctctcggtgagtggtttgacctgcccccacgattagatacaacactcagttag

SEQ ID NO: 27472 - DNA, 1221 bp, Klebsiella pneumoniae MGH 32
ttgaaatcagttaagtgtaagagcaatggagagaaagccccagtagcacaagcctttaccccagaggctagcttaaaacgcaaaatacgctcgcattttacacagctggggtttcaaaaagggccggatggaacactaattcgtcctgactcaggaaaagaatctatccgtcaactgcacagctctcaacgtgaagaacgtctacgctcctctgagcaatttatatctgaattcttgccaagtgccataccatattttgccaacggaaatgagattgatccaactaagattcgcttatcattgataaaagtttctgcgaattcgttcgaatccaaactctttagggcagcatctttaacctggtctgttccagtatcaaatggttacggtcgccgcatgcggtacctcgtgtgggacagagggcatgaccgacttgcaggaatatttgcattaggagatccagtttttaacttatctgtacgtgataatttaatcggatggacatctaatgatcgatcaagtcggctagttaacatacttgatgcttacgttcttggagcggttcccccctacaatatgcttttaggcggtaaagcgattgcctgtttaatccgctcacgagaagtttatgacgatttcctacgaaactatggttcaacgacgggcattatttctggtaaagataaatacgctcacttactagcagtaacaacaagttcttccatggggcgttcatcactttataatcgactgaagctagatagcataagttattttgaaccaatcggttataccgtcggctgggggcattttcatattaccgatgagttatttggggagatgcgtgaatatcttcgactcgcagagcacccgtatgccgatcaacattgctttggcgaaggctcaaattggcggctcagaactatcaaagctgccctgaaacaactcgggattaaccaagctgttttacgtcatggaatccaaagagaggtatttttctgccagctcgctgaaaatgcaaaagaaattctcgcgactggtaagggtacacccgacctttcaaccttaaaaactattgatgaaatatctgaacttgcgcgtaagagatggattgaaccgcgagctctaaggcagggttattataagaactggagacgggacgatatatccttactaattaaaggattaaaactggacgtaataactagtaaaattgcctaa

SEQ ID NO: 27473 - DNA, 2712 bp, Klebsiella pneumoniae MGH 32
gtggactctaaaaaaaataatagcgttcagtttactgcggataatgagatggcagatctgacggataacacaagcaacgtaacggagagtgagttcctgaataaactgcaggaactgatggaacgggaagactctctgacgcaaaaagaaacggttttagcccaaaaggaacaggcgctacaggcggctaaagacgcgatggcccaaaaagaagcagagctgaatgacaaatatgttcatcttcaggagatggagcttcaagcaaaaaacggctctctgcaattctttgaggaaaagttcgcagcattcaaaaaacaactggcgcagcgggaagctcagtgtgtaagtgagcgggaaactctcgaagctgaaaaggaaaaattgcggcaaagagaggtcgctgttcaaaaggcggaaatccaacgggacagggggtatgccgatgaaagggccaggcttgatgatgaactcttcagtctcagaaaagtacaggaaaaggatctggagtcaaaacgcgccagcgccctgacggcccttgaagaagagcttacagtggagagagtctccagaatagcaaacttggggaaagagatagctgaccggctaagcgcgcatgaagcggctattcaacaggataaggatgaactcgaacaaaaaagaaaggcattccttaagaaccaggcggagcttgatgaactcagggatgaacttgagtaccagaaacagcgccttcgctcaaataaagaccgacttgaggaaagagaatccgatctgaaccttgaggtggatgccagggttgctcagcggaaacactctttcgagagtgagaagtctgtgcttaacgatgaaattgcccgtttgagggaatccctcaaaacaagcattgcgctcatttcaaacttcgaagtactgaagcataagctcggtgatgaagatcctgccgccgttttacttaagctgaaaacttatgaagaggaaatcaacaccctgcgcgaggatcttgccacgcgcccaacacaggagatgcgggacgcctttgatcgtttgacgtctgaacagaacgaactgaagctggcctgtgagcgattctctgaagaaaatgaggggctcagaagtgcagcacgcgcacagtcagatctggaaatgcaggtagcggaactgaccgataaaaacaaatcgctgctgaggcggtttgaatcagtggatgccgacaacaaccgattgatggaggagcttaaacgcttgcaatcctcttacgaacgggaacaggaccgtgaggcaaggattcgggacattgaaacgccatacgttcaaaaagaactgcctcgtgcggctgaaaacgttgaagagcttcaatggctggacggcatccgtcaatcctgcatcgattatgggctgagattcccgcggcgaattttacacgcattccacacagcactaaaaacgtcagagtggtctcctgtgactgttctggcaggcgtgagtggaaccggaaagtctgaactgccaaggctgtattcacattttggcggcataaactttttgagtctggccgtgcaacccaactgggacagtcaggaatccatgctgggtttcttcaactctatcgataacaagttcgatgcccaaccggttctgcgtttactggcacaaagtcagaaggcgcaggctgaaggctatcctcttggtcttaaagatgccatgaatctgatattgatggatgaaatgaatcttgcccatgtcgaactctattttgcggaattcctgagcaagcttgagctgcgcagaggaatgaaaaaagaactccccttccttgatgttaagctgggggccggaattcagccctatcaattgccaatcggtcgtaatgtgctctgggctggcacaatgaatcaggatgagaccacgaaatccctctcagacaaggtcctcgaccggggaattgtcatcaactttccccgaccgactacgctggaaagacgccgtcagttgattccgttgggcgaccaggcgccattattgtcccgcaaactgtgggagagttggtggtgcagagaaagtaaattcagcgatgatcagattttgccctttaagggttttattgaagacatgaacgatgctctttctaaagtcggaagagcgcttgggcacagggtgtggcaatcgatcgaatactacatggcaaattatcctgatgtgctcgacgcccagagaaaaaatgatgatgcaggcttggtcaaagccatgaaagtcgcttttgaagatcagcttgttcaaaaggttatgcctaagctgcgcggcatcgaaacccgaggtaaatccagaacggactgtcttgaccgaattcgaactcaactggtgaatgacaactatacgataatcgaagatttcgatctggcgtgcgaatttggttacggtcagttcatctggagcagtgctaattacttaaaagacgatgagtcattgaatggtcaaactggtaacaacgccagtgccagtgatgccagtatgctgtcatctgatcacgccggacttcatcattgctctgctgcaggcgcaagcgctattcctgctgagatcagccggtatgcaagtaatagtacaaaggaactctggcaactgacaacaaacgaaataatgacagtcctgaaatgtgatgcaaaagaagcaaaggctatcaagtatttgtgtaatgcgaccagggaatcataa

SEQ ID NO: 27474 - DNA, 1065 bp, Klebsiella pneumoniae MGH 32
atgaacaatattaaaatacttagccgggctgattgcctaaagtattcatctcgctcattaggacttcctgacttgcaaaaacttgataatgcattaatcgctcaagcgttgcggagaaccgttttcattgaagctccttgttcgattcggacagtatgctcactcgtaatgaattccctaggtccattaactgacgagcctgagaacttaaagacactcatctacgatattattgacgaccttgtcaacttgggtgatcttcttgaaatgcgggacgaaatcgcgggggaaacgaacctcattttgcgccctgctccaccagcgtttgtgcttcgaagagatgggacattcattatagtgggagtagctggtgatgatgtcactccgccacaggtaaatgactttaatctcgtttattacccgagtggtttaaggatactcacaccaagcaatacgcaatcatgtcggcaaacacttatcgatctaggacttattgagttacctatgattacatggctacgtgcaccagtttcgattacagccgacaaacttgtaaaatcgtggatcagcagactccccaacgatatatacccggaaaaaatagagaattttgagataattgatattagcaaaacaacttcatactataaaggcagatggcagtcactaaacgaacaacatcctggaatttatattgcccgacgcccacaacgctacggggcaagactgtggtgccttgcagaaattcgggacggattagtccaacgcttcgttgatattcattcaggagatgcgcgctttcgagattgtgatgaagcctggcgattactcgctgcgatggatgcacttactggctctccgcaacaggtcagagttgtttatgaaaaggagataactgtgctgtcctttacatctcctcttccttcttgggcgattaggcgtcttagtctggtcggtgaacgtttaaagcctcatcgcgccttgctgcaattttcactgcctttacataatagtgaagaagaacttcattggctagaggaatccctctggctaactcgggattag

SEQ ID NO: 27475 - DNA, 5541 bp, Klebsiella pneumoniae MGH 32
atgaaaacagccacaatacaacaaacaattgacgaattacggcagagcctgacacattatatcgaggcgacatatcacatcggccacccttccatagtcaaacagcgtcgtgaactattgaatcagatcggtggcatctatcaggctccatatctggaatcgactccccgctataagagcgccagtccttataatgagattgatagtttgccaccagcggcacttgaagcattgagagttctttctgacacaaaatcaggaaaaccagtaatttacccttccccctatacccatcaattggaggccctacaagagattctcaacaataatcgaaaccttatgattatgacgggaacaggttctggcaaaactgaatcattcctcttaccgatattaggcaagttcgcaattgaagcctgcgagaacccagagcgctttaaaaaatataatgctgttcgcgcattagtgctttatcctatgaacgccctcgtgaacgaccaattaagtcggttgcgaacaatgttcggttcccctcaaaccgttgctctattcgaaaaatgggctaagcgtcccgtcctcttcgcgcgttataccagccgtaccccatatgcgggcctgcgcacacctaataaagatagtaaacgactagcatctattggtgaatttttcggagagatcgaggatgcgaaacgacgctacgaacattccccttccgacggggaagaataccgcgcggctaaactctttgataccttaaaggtacggggaaaatggccatccaaagaaagtgtttccgactggttgggtaaagctcctgtgccttgggcgaagcgagcaatctgccgtccacacgattctgaactaattacacgccatgaagttcatgcatctccacccgatcttctcattacaaactattcgatgcttgaatatatgatgatgcgtcccattgagcgtggcatatttgacgcaacaaaagaatggttggacgcttgcccggacgagaaatttcttatcgttcttgatgaagctcatctttacagaggagcacaaggtgctgaagtcggattattgatacgtagactaagagaacgtcttggtataccagccgagaggttccaagtcatatgctcgaccgcaagcttcagtgatgagggtaagaaaaatgctggtgtattcggcgcacagctttccggagtatcggccgaatcattcgtgtcaatagtaggagaactacagttacgttctcctgaggaccgtggatcaatggtcgatataagcacccttgctgctgttaatcttaaacagttctattcagcagaccatagtcaacaattgtcagcgattgagaactttctaaagtttcgaggggtatcagtcaaagatgtaagtgatgtggacgctaaactttatctggcgctgtacgattacgcgccatttaatcgacttgtaaatgagactatgactgctgcggtatcgctctccaaactaccagaaataatctttgacgatacaataccatcaaatcttttggaaaaagccacaacggtattactcgcgtttgggagccgcgcgaaaaaaacaccaaacgaagctagccttcttccatgcagaatacattcattcttccgtggacttcctggcttatggatatgcatggaccccaattgccccgatgccctcggagacaggcgaagccctgccggaagattgttctcgcaaccacacgagcgatgcagttgcggcgctccggttttggaatattatacttgccgtcattgtggcacttcatatgccagggcctatacaaatgatgttgcgcagccacgctatttatggtccaaagaaggtgaaagaattgagactgcttcagggcttatagaggctcttcatcctcttgatcttcttattgaagaaccgccatcggatgataaagccaaagccgcttactatgatcttgtatcgggccagcttaatccggatgtactaggagagaaatatcgaaccgtcttccttgcacctgcaaagcccgtaacagatagctcgaaagatacaacccgtggagcaggtccagggcaattcgctccttgtgcatgttgcaaccagatggcaggtcatggacaatctagcgttcaagatcatcagaccaagggcgatcaaccgtttcaggctttattgggatcacagctaagaatacagccccctggtccacagcaacaaacttcttttgcgccacttcgtgggcgtaaggttctaatcttctctgattctcgccaagtagccgctcgtctggctggtacacttcagaactattccttacgtgatgcagtgcgggcactccttccgttgggttataagattcttagccgcgatccggacttctccaaaactcttgtgctcaaccatgcgtacttatcagttttagtggctgcccataagttaggcgttcgactaaggccccaacttggtgatgcagaaacactttcagaggtagaaggaccaagtccaggcccatctcccgcaggtatacagctctttcaactccttagttcgttgtcccgatgcccgcagcgtcttatgcaggcaatctccgatacgtttaaacatacgaacatgggacttgatctggaggccttggcgatcgccacgattggcgagccaccacaaatctcgtccaagattgtaaaacttcccgatctaccaggagtcgccgaaaccgaggaggctaaattgacagtctgtcgagcttggctgcgatgctggacgcttgatccgggaatctggttttcagacatgcctgactcttggtggaatgaacgagtgagatcccatcaaggggtatttactgccatgaaccgagttcttgtatcgaagcaatcgaaatcaatattcaaaaagaattggcttccaactcttctgaccatttttaccgagcaaacaatgggagggggacatcgtttagttgcttcgaagctttctcttcatttaaatggtcagtggcagcgatgcaatagttgcaaatctgttcatcgcccagtcggaactctcagtagatgtattgactgtgaaagttctgatgtgagcaactttgatcccgctttagatgaggtttacaaggcacgtcgtggtttttatcgcgaccctatcgcttcagcacttgatgttgaagatccccaactaatgaccattattgcagcagagcacacagctcaacttggagcggcacagccggatgaagccttctctcactctgagcgacacgaaataagatttcaggatatcgatgtcgcctggagagataaggaccgccctggtgaacccgctattgatgtgctttcaagcaccacgactatggaagtaggtattgatatcggtgatctttcaggcgtggcacttcgtaatatgcctccaacccgcgccaattatcagcagcgtgctggccgagcaggccgacgtgctaatgcagttgcgactgttgtagcatttggcagctcggacagccatgacgaccattattttacggatccagaggaaatgatacggggtaatgtcattgatccacgcctcacgttagaaaatccggaaataacgcgacgccatcttcgcgcctacctgcttcagcgctatcatgaagaccgtattcctggattaatcccaggtgccgatcctaatttgttttccgttttgggcaaagttggtgatttcaaaactcggggacctttgctcaatcgttatgattttgctaaatggctagaagataatgcacaagacctcgctaacgcggctgatcgctggctacccactgagttgtcgccagatgatcgccataggttgattgctgaaatgatggttgacgcgacagatacgattgacgaagccatagactttattcaatcagagaaccaagatgtcaacgccgccctagaaaaaagtaaggacgactctggtgatcaaaccgagaatgagataatgaccgagtcagaggataacgtacatattgttgatcccgccacggataaattacttgaccgtctcctttaccggggagtagttccacggtatgcgtttccaaccgatgttgtggcatttcacgttttcaatcaagagagatcaaccccgttcacatcggttatagattatgctcccgctcaggggcttgcgctggctctatctcaatacgcaccaaacaagcaactctggataaacggcaaacagtatacatccaaagctatatattctccttatccagccgaacggcgggacgcttggggaaaacgaaaactctacttcgagtgcagcacttgctcccatgcaaggactgacgattacttaaaagagagggagaacacgacagagacttgtccagcctgcaacacacccaactctttcggcccggcaagggtctggttccgtcctgtcggctttgcgcacccaatcgatacaccgccggaaactgagccagactcaccaaacgagaccgcaagagcgacgcgtgccaagttagtcatgcaaacgcctaatcctgacaagagctggattcaggtatccgagcgggtgcgtgctttcaaagcgagagaatttctcttagtatcaaatactggtgtcgataaagatggctacgattattgtctcgcctgtggtcgaatcgagtcatcggcggctcctgaggaactgctctcacaaccacacgctacgccattccgcagtgaagaaggctccatctgtccaggaggagcggcaaaacgtcacgtaattcttgggactgatttcaaaactgacattgcattattttcattcccgctaacagagccgttccaactcttgcccggcagtatagaagcggattctgtacttagaactctatgcgaagctatggccaaggctgcgtgtcaaacactagatattgaaccgggagaagttctagccgaataccgcccagctttgacagaaaaaggcgcaagcggtaacgaagttgaaattttcctatatgacacattggcaggaggtgcagggttttcgaccgaacttgtgaatcgggcaagagaattgtttgagcacacgcgaaatcttctagcaagttgtccagaaaactgcgacacatcctgctatcgctgcctgcaaagtttccgcaatcgaatggaccactcgctcctagatcgcaaactcggcattcagtttattgaacatgcgtttgatggtggatatccgccttatcctgccgagcgtactcaacgatcgcttgatcttctcgcccgtgatctgattcggcagtatggaaccgaattttctttctctcgtgaagttcaacgatatgacaatgaagctggagcaatagtaattccaattgttgctacacgcctggctacgggtgcagaaacttggatatcactcagttcgccactagccccagcgattccgacagatcataaactccagaaacttagtcctcaagggtcagaaaaaatggagtgcgcagatgaccttattattcgtagacatttaccagaggcaagtttgcaacttcgaggaaaactgagataa

SEQ ID NO: 27476 - DNA, 1947 bp, Lachnoclostridium phytofermentans ISDg
atgcggaatacaaatacagatctgatagatgaattaacagatgatgatataaaaattttgattaaaagtgacgatctagggaatttattggagcctataaagcgtaatacgaaacattatgctaagtataaagctatgcttgggaatatggataaaaagtctattttagttgagaagtttttgcccaaggtagtatttgaactatataaaaaaaaggattttaattattacaagtatttaaatgatcttgcatgcaaaaagaaatatgtgtttaaaagcatgattgaagaagtgtttggtaataactttaaaattactgaagttgagaagtttacattaaacgattattctatagtatttaagcacattcttaaagataaaaattcgaagttggactttgatttactatatcttcaaatgaaattatttaatataacaattgcagataatttgaaaaatgcaattgaaatggaatggaacagactcagtatcttacaagaaacaaaaaaagaagtagcagttacattagcaatggagtttgagcaaaagcaagaagaagtactagaacaatttaagcgagaaaaagatgtattaaaaaatcgaataaatatattaacaacacaatgtaaagaacttcaggaagaacttcataaaaaagaaaacattattatatcattgaacaaacaaaatgatctagatcaaacaaaaatttcattattagaagataatattcaaataaaagagaatgaaaaaggcttactaaataaaaagatattagataaacaagaaaagttggaacaacttgagcaagtattgaagaaaaagacagaagatttttataatgacatcaacaaattatggaaacaagaaaatgaacaattagttagagatgggaagaatcttgagaatgaaataagtatttatagaacgcaaatcgagcaacttgatagtgagattaaaacacgcgaagaaaaaatcatagaatgggataaatatgtaaatacatatgtagaacatttagaacaaaaattattagaaaaaaagctagagtcaatcttatttcatcaatcaatgataaatgataaagataagttgagtgaaaagtatataccagatgtttatgatgaagtatttgttatcgaaggaagtatagacaaagagctcgaaccatgtaaagactattatgattatgttcaaattgttgaaacgaatttatcaaatgctggtgaaaagatgggcataggtttagtttctgatatttttaatgcagccatcaatactggtttgagcccgctgatatgtgggtttaatgccagaagaatagcattggcattaacagcagctagatatggagaaaaatcagaaattattgcaattcctgtagggtttaataagactaaagctttgcttgagcaaattgagcaggcacaaacccacagtgtaattattgaagatgcattcggtacattaaatgagaaaatgttgttaccaatacttcgttgtagtattgataaagttttaatttttactgctgaaaataatgtatgtttacagtatgtaccgagatatttctataattacatgcaattaatttccatagacagacaagaaaatataaatataaatataaatgttgatatatatgcaaaagcaaatcatttattcaaaagtatacagtacactggtatagaaaacggtcataagttagccagatatatatttggtgatatttctttggataatgcttatgtgatgagacgaggcaatttatttacagagttagaacaagcatatatggaaaattccgaagaagatgtacttaaaaaatattttattgctgaagctaagtggttattaagcgaagaagaaaaagaaagaatcaacaatataattgataacaatacagaacgattctcaaataaattagtagagttattaagaaggtag

SEQ ID NO: 27477 - DNA, 1056 bp, Lachnoclostridium phytofermentans ISDg
atgaaaaatcaattactacggcaaatagagagggatttaaaattaaagcggtttattaatgaagcagagtgtgattataatcagaggattatttactctgtaggggcagcgtgggtgcaaacattattgtttggcagttcttataaagatatacagagaaaagatgagtaccaaagtgtggatattatgtatgttcaaagttatttagctaaagtactggaggcatatttacagtgctttgatattaatttggactggttagatgaagattatgagtttgatattgttaagaaagcccgtattttatcaagtgaaatcattcaagcaaccttatataatgaaaacctggcagagatacaatcaagacgtcttgttccactagtaccacgatatataaaatatggtgaaggattatatttattcaaaggtgatagagatgcagaaaggaatctttgtgcggttggtgcatctttatggaaagtagatgaagtaattaaatatgaaatagaatatcgtccgatcaatgaaaatgcttttgaatattaccgcagtattgttactaaatttccatggagacagaaaaaaatcacaggagagtatctgatgtttcatttaggaaacaaaacagcattattaaatagttggaaacctgttgatattgaaaaacttccacccggaatacatctattaaagcttgcgagtgagtataatgggggatatttattagtaaaaaaagatgaagatgtttactcaattgttgatttagatccttggtatattgagaatggtgaaatataccgtataatgtatgcattaaatgcttggtataaatcacccactgtatttaaatatgatcataaaggagagtatattatattaaaatcacacaaacctttacctaagtcagaaaaaaaaatgttaatggcagcatcatggccgtatagaacctacaaagatcagtattacagaattgtgcctgaatttttatgggaaatcataacaaaaaggttaaatgagcttggtataatattaattaagcaaggggaaagtacatga

SEQ ID NO: 27478 - DNA, 5280 bp, Lachnoclostridium phytofermentans ISDg
atgagagagataggaataagaaaaacacatgatcggttaacaaacaaattagttgattatattaaggcacagtattttgctgagaatgatttgcttaccgatgcagcagatgagcttctatttaatgaagatacaatatttcaggagccatttattgaagttaccaagaactataaaatgtcacaagatggttttaattcttcaagattagatttggaacgaaagaatattctaaatcaattaactaatgctgaattaggtgtttttgtaacaccattcaatcaccagataaaagcaatagagcaatattattcttctcatgatgttatggtaactacgggaacaggttcaggtaaaacagaatgtttcttatggccaattttaacagatttaatatatgaagcaagaacgaatgaagcttcctgggaacaagaagggataagagcattagtgctatatccaatgaatgcattagtctctgaccagctaggaagaatgagaaatattatcggtagaaaaaaagatgatgcatatcataaaatactttgcaatggtaagtataagcggagagccagattcgggatgtatacaggaagaacaccgtatgcaggaaatgataatgcggataaaaataaagatcttggtaaggtaatagaaaagaattatctaaagtcagaagtatatgaagagttattaaaagttggccgaattccttcaaaagatttaacgaagtttgctgaacatttatcaaggggagttcaagttacgggaaaattggattcagaattgtatacacgtggagaaatgcaaaaaatctgtccggatattcttattacaaattattccatgttagaatatatgttaatgcgtccgattgaagaggaattatggagtaaaacaattaaatggctaaatgcatctgaggataacaaattgttacttgtcattgatgaagcacatatgtatcgaggagcctcgggtggtgaggtagctttactgatacgaagattaatgaataaattaaatatttcatctaataaaatgaagtgtattcttacaagtgctagcgttccatatgataaaaatgatgaattgcaaaagtttgcttgcggtcttacgggaagagtatatcaagaaaatcaattttctattgtaagagaagaaataaaagcaattaaaaatgcaaagcgtggaacatatgaacaagcgcagagttatgcgggattatcattagaaagtcttcagtcagaagttgcattacgaaaaggtgaatatgaaaaaataagtagaatgaatcaatggagtaaaatcccaaaagatgaaatagaaatatcacgctggttatatgacaatctatcttgtgattctttgatgaagcaaattattacgatttgtgaaaagggagcaaagccattatcaaaaatagcaaaagaggttttcgaagataatgtgccaaaacaacttgctgaacaagcacttgaaaggttactgcaattaggtattacagcaaaatccagtacaaataaggtgttactgggatctaaggttcatatgatgttcaaaggattacagggaatatatgtttgtaccaaccctaattgcaaaaaactgcattctggtatggggatttaccttggatatatttctagtaaatatacagagacttgtccagaatgtaatggaagaatgtatgaattaatgatggatcgtcgatgtggtaccttatatataagagcatttgatgatcagaatattgaaaattatgatggtcttgaattcctttggtctagaaataaccagattatgaaagagcctaaagaaattcatctatggattatgccagagggtagaattgatttttttaaactaggaaagaagacaggaaaagcaaaaaagaattcaacggttggatatcttgattcaaagactggccttctatttagagatgaatcacatgcaggggacgaaggatatttaaaagtattgatttcaagtacctttaatgaggatgtattagcatttacattcaacacttgcccgaattgtggtagagatcataataaaataactccatttttaacaagaggtaatgaaccctttgccaatatagtaaaagaacaatttgaggttcaaccagatataaagtcagagttaaaaaatggaggaaagaaagtattgcttttttctgatagtagacaaagagcagctactttagcacgtgatatgacaattgcttcagatggtgattcaggcagacaagcaatctttatggcacaaaaacttttagatgatagctccggagaaagtacaatcgacttgttatattatgcttttctaaaagtcgtgtatgataataagcttagcttcttttatggaaaagaaaaggagatgttcaagaggcagctaaagaaatatgaagaactttattcatctcgaactattcggaaattcgatagactcaagtctaatataggaaatccaccagatatgttttatcagttactattaaagaatattagtgatagttatagatcattgaataacttaggtttagcacaggtagtattagctgatcaaggggacgcgggagaggaaattgaataccaaattcttgagaaagttgaaaatttaacaggtatctcaggtacagatgtatacagcatctataatacttggattcaatatttaattgttaataaaattgccattttccctgaaataggcgatgatgtaagagatagtattttagcatatgagcgagggagatttggtattgatgaaattgcaaaattcccagaatttctaaatgatattatcaaagaaaaatatgatgaatcagtaattcaagctttaattgataggtttgatgatataacacaaatattacagtcgccaggaagaaaccataatcgtagatatctatttggaacaagattaatccttaaagcggcagaaaattcagaatggattaaatgcgatcgctgtgcaggaatatctacttatactttgtgggggcattgcatatattgcggtagtacagagtatgtacgcaaggtagatgatgaacattttaaaagatatctattatggagaaagcctgtaatagatgctcttaatagggagagaattcataatatcattacggaagagcatacggcacaattatcttataaagataacaagaaagatgtatggggtactacagaaaagtatgaattagcatttcgaaatattacactcaatgaggatgaagaaccaattgatgtgctaagttgcacaacaacaatggaagtgggaattgatattggttcacttacaagtgtaggtttaaggaatgttcctccaatgcgagaaaattatcagcagagagcaggacgtgcaggacgtgcaggtgcagctgtatcatctattgtaacatatacagaaaatggacctcacgattcatggtattttaaacatccagagcagattatatcaggtataccaagaactccatggattgatgataagaatacaaaattaattagacggcatattaatttaatatttttgcaggaatttttctatacaatacgaagcggtttagatgtgattagaacattggatttctttagttatgaggataaatataattatattgaattcctaagatggttaaaagaaagaataccaatgtcatatgagagacaaagagtattaattccaacgggagattttaattggaaagggtattataaagagattagtaagacactagaaaacatcgcagataaagttgatgaggcaccttttatatttgaacaaacttccagatctgatgagaatgaatcagattcagtacgattaattgatgtcctattttctgaaggtgtacttccaaattatagctttccacgtaatatcgtacatttctggatagaggacttatatggtaatgttaaagagagtccagaacgaagtgtggatatagccctaagtgaatatgctccaggaagatctcttgtagtaaacaaacaaacatacatttcaggtggtatatatgatcattataccaagtatcatagagaatataagtacaaagcagctgagccatggctagagttagatgaatataaaaaggtagtatcatgttgtactaatccgttatgtggatggtttggcgtaaatgaaacttatgatgagtgtccactgtgtaagaatacgttagagaagcatacaatgattaaaccttgggggtttacagcaagagaaggaaagtcaattcctgaaacacacgagagtcaggaattgtcatatgtgagcgtaccttcatattcatcaatgccatcaggtattgtaatgagtaaagtaggttcagctggttatgcagaaatagagaatagagaaaatcaaaaattagttattgtaaatcgcggcccagaggacaaaggatttgagatgtgttcaatatgtggagcaattgaacctagtattggacaaccttctgacaggaataataggaaaagaccatatagaaacctatatatcaaagatgataccatgagatgccatcataattattcaaatattttcttaggatatgagtttaatacagatatgatggttcttgtaattaaactcgatagtaacaaagttgatctaagtacaggatttaatatttggttgattccagcattgactacctttgcagaagcactagtattagcagcgagcagagagcttgatgtagaatttagtgatgttaaaagtggttatcgtattaggatggtaggtagtgatatttatgcagatatttatctatacgatggattgagctcaggtgctggatatgcagtcaaggtatcagaggtaattgaatctgtattaaatagaatgaaagagatatttgaaggatgcaattgttcagcttcgtgtcctaactgtcttgagcattattggaatcagcgaaataagggaaagttagatcggttcctaggaaaagattttttagagtttattactagtggtaaattgagaacagaagtaacatcacaagaaaaaaaatattatatagatcaaataaaccatatagcacaactacaaggctacgggattattttcttcaatcgaaacggaaaatatattatcaatagcagacagggagaaaaagaagtgattatttatccttcaatgtgtaatagtgaaatatttgaaggtacagataaacttttcttatcggatcgattatgcagatatgctatgccagaaatatggaataaagttagaaatgaggtgtggtaa

SEQ ID NO: 27479 - DNA, 1440 bp, Lachnospiraceae bacterium 3-2
atggataaagcttttgatgttgttttgcagagtgaggtagacgctactgttattgcaaaaaattcatatcgtttttctggggaacgattccgataccaatgtttgtgttgcggtgaagaagtttatcttgctgcagctgatagtagtgagcgttctcctcattttaggcactggagaggaaataatgatatagaatgtgaacgatatcttggtcagccaggagcagtggaacattttgcatttttgagaaagaataaacaggaacatatagaattttgctttaacagagacagaatgacattcgagatttgcgcctcttttacggaaaaagaacttcagatatatgaagaagaagaaaaatggatgacggtatcttcaaaatatcatactgtgccattcctttccattccttttaacaaggagatatttgttccggacagaaaaaattattttactatcacgaaattctcgacggagtattttgtttcatttgattcagggattaattgttatacttatcatgatattatgaggactgtagagaaaatcaatatattcagagtcaggatacaggatgaacactgcaggcatcaagcatccccgcttatttatacagatacagaatatatgggtatatctgagaatagagaagctatacaggaacttgcagatttagaatatgttgtctcagaaaaagagccgttttctttcaacacagaaaacagagtgttttatggattacagttttctataaaacaggcagaattctctattttgcatttctttcagaaacacgattatcagatggaaacatcggaagagtttagtattttatggcctccggtctatacgaaggattcccgttttatatgtgacggagatacgacatatgtccattcaagctttgcactgattccacatgggaatatgaatgtagacaatacttttgtcggggagattagtggagacatactgaaacttcatattaataatgaagtcatcatacatgaaaagaatattgatatatgtatccagagggaggaggaattaggaaaggaaatagttttggaagaaccagcgactacctattctgatagatatgttgttcctaatcagtacgattactttctgtttgaccaaaatgggtgtacacggctggttccagaatcaaccgtatatctttctgaatcggatcgaatcatcggatataaaaacggacatataaaagcatttgtgtacgcatgtccgaaagaaaaaatagataccagacaattcatagacgatattctgagatatcatccgcaatcagaactgtttgatccagatgatttcatggataacataacagacgaaacggtcttagcgtatttggaaaactgttataggagtggacggattaatacagtcgttaaacggtacatcaaggaggaacagatttga

SEQ ID NO: 27480 - DNA, 1911 bp, Lachnospiraceae bacterium 3-2
ttgagttatctgataaatcttacaaatgaagaaattaaatatgtatgcaaggttattccgtttaaggaggcatccgcatactttaaaagttatccgaaggaatttaacaaattaaaaccgggattccgcgtaaaatcgttgaacgaggatactatcgttcggacgctttatggcttccgaaacagggattttattgcttcttttcttaacaagaatattgaacgatggattaaagaaattgatgaagaaataataaaagcgcttgaggacgggcttgagcaggatacagcttatattgatgtgttggcgcgttcttttttttcaggaaacattgctttgttcttcaagattaaagcggaagaaaagtctgaagattatttgaaagtcatgagttctgctgttgtctatcagtctgctcatcagaaagcatatgaagaagaaatggagcccttaaagaaaagacaagctgaacttgaatgtattcaggaagaaatgaagaatcgaatctttgatgaaaagaaaaactcagaaaagcttagaagaaaagaagcagaactgaaagaaaaattggaagaaaaaacggaatggtttgagcgagagcagaaggagaacttccgtctttcagaaagagcagataaactggaagcagaattgaaaagaactcaggatgatgaggtatggaggactgcggagatgcaacaaaaaattgacacccttacatccagattggaggagcaggttgaaaaggcgacaggatatgagaacctaatctctgaatatacttctagactttcttgcgccgaggatgacattgagacgtggaaaaacaaggtaagaagtcgtgagaaacagcttttcacatacaaagcagaaagagcaacacttttaacagagcgagaatctgaccagaaacagatcagagagcttaaagaggcacttgataaagcactgagtgttgaaaaagcatataaggaacgccttttcttgcttagtacagaaaaagaatcctatcagcagaagaatagagaactggaagaaactttggaaggacaaaaaaatattgagactgctgtagaaattgtttcaaaaagatattcatatattgatcggaagatgccattatgtccggaagatatggatgatttcgaggaatatttcaattataaccttgaaaacatcggattcgacaagaatgtagatggatcatcagattttataaattatctcaaaaagactgtcttctgtggtaatccagtactgataaaaagaggaccgggaattaatttggccaattgtcttgcaaatacactttacggtgtaccggttgcagctcatttgtcatattcaaaaaacacggatgtacaaataattagcgattttcttacagatacgcctgatcgggttgtctgtattgatagttttattggaaattgtaacgaaatggaatttattccagtgcttgaacagcatcgcaataagattatcatcattacttatatgtatgataaaacactgagttttattccgaacgaacttctttcttcagttcattttatcagcgcagatgcattcagcccgattttaagaatcagagatattacagaagatccttccgaagtaaaagagatttcgtttacatataagagcaatgcaagagcagacagtcgatcacagaagatattccgtgaaattgcatgtgaatgtgggttgggaaaggatatagcttgtacgatggctgacatggtagaagatgaaaatcatttgaatgaaatgctgatgtttacgcttcttccatatgtatccaaagttctcggaaaaaatccatataattgttccaaacgtcttcaaaggtatgctggagaaacagggcgttgtcttaggaaagatattttaatgaggtggtttggatag

SEQ ID NO: 27481 - DNA, 1017 bp, Lachnospiraceae bacterium 3-2
gtgaatgaattgattagtatcatggcaaatgacatgaatatcccctcttatattaacgagccagatgaattctttggatacagagtcatttattcagcactcggcttatggtgtcttaaatcagcacttagtgaaaaagaaaataagatgggaatcagtaaaaatgcacagagcatcctgctgcatgacctgtcaaaaaaatatattgagctgtgtccatttgcaaaacattttgtatatacttcaagaaacgctgacattgcagtatttattcggaatatctatgaacaaacgggatatctgctgacacttgacaataattataatattctgaataatggcggggaaacggtgaaattctctgatacagattatctttatctaggattgccgacaacagaccatattataaacgggcttggaattcactgcaagggtggtaaacatgaagtaaaactaaatgattttctcatacgtgatagtttgacaccggaagaatacttaaaagtaaaatttgacgagtgtgattttgatatgtgtgatattggtgtggaggaactggagttttttaatccgttctattatggaaacgtgtctagctcgtggcatggacacatgaaatccgatatgacgatggcacggaaaggtatagtgggaccatattacagagttattagaaaaaaggatggtacgcttctttacactgatgataatagtgaggatgggcttgatgctttaacaggagcagaatttcggcggttatatgttgctcttaagtatcactatgacaatccgatgcagcttctcatatgtcccatagatgaaaaatattcttatattcgtatccttggacaattgccgaacagagaatatttttatctgcttatgaatgcatggccaagatatagcttttctgatcggaataattttatcatacgaaacgaattgacagtacagactgcagaagtccttggggcaatagggtttactgcaagaaaaggtgaattttatggatag

SEQ ID NO: 27482 - DNA, 5187 bp, Lachnospiraceae bacterium 3-2
atggatagaaatacgaatggagtacagcagtactatcagacaatacggaatcggttagtaaattatattaaatcggattatcttgctaacagtgaaacattgcttctgtatacagaagagattcttggagaaggttgtccagatgatattaatatcgcaagggaaccatacattgagacgtccgcttcctaccgcaaagtaaatgacggcattcggacggctgatattgaagacaatgttaaggaagttcttttgaaacttgttgatgcagaacttggtatttattccacaccctttactcatcaggtaaaagcgcttacaagtgccttgaaagggaaagacctgtttgtatctaccggcacaggctctggtaagacagagtgtttcctttggccgattattgcgcgtgctattgaagaatcccttaacaggccggaagattttaaaatgtcggctgtaagaactcttattatctatcctatgaatgcattggtagcggatcagcttgccagattccgaaagattatgggatctaaagaattcaaggatatctttatatcttcctcaggagtagggcgtatcccgcattttggcatgtacaccggaagaactccatattctggaaagtcaaagaggcagagcaatattgagcttgcagagagataccgtgaacagtatcttgtggatgagtgtgcaacggaagaagaacggaaagaacagctaagaagaataagcggattcaaaagtatcaataaatatcctgcaaggtatggcggtgtagaagggatgaaagattttattaataatcttgagaagaatattcatatgccaggtccttatgatgcagaatatatcaccaggtttgagattcagaaaaatactccggacatcttgattacgaactattccatgcttgagtatatgcttatgcgtcaaatggaatcaggtatatgggatgatacgagagaatggctgaataaatcggaggaaaacagacttctcattgtccttgatgaggcacatatgtacagaggttcttcagggggagaaattgcacttcttcttgatagacttttctcacgtcttgatattccccttgaaaaagcgcagtttattcttacgactgcaagtatgccaacggaagatgaaagagctatttcagatttttttaacggacttactggaaagaaatattccgaatgtgtttctctttttggtgacaaagaagacatcagcactggttttaaggtaatgacggatgctatggctcttgcctctattggaacgagccaggtaacagaggcagagattagtggaagagtccgcacttttgctcaaaatgtgttccagattgaactgcctttagatatttcagtattagatgcacaggaatggctgtttgaaaatcttccagactatcaagcattcgtgaagcttcatgaactatgcagagatggtgcgaaatcctacacaaaattaaaagagaagatatttggaaatagtgagtatgcatcggatgcccttgatgcattgcttgttatcgcttctctggcaaaaaaagatgatgaaattcttttccctgtaagactgcatatgtttgttcgaggaatccagggattatatgcctgctccaatccaaaatgtacttgtggagcacaacgctctaaagaggaaaaacttcctcttggtaagattatttccattccgcgtgaaaggtgcggatgtggtggtagaatatacgaacttgtaaatcatataaaatgtggagcactgtattttaaggtatatgttcagaaaatgcccggaacaggatattggtatgtgttccccaataaagggctgagtggtgggacgaacgacctcatggaaatgcttctttacatttgcccggaggaatatgagccgaaggagaaagataaagtgggatatcttgatcctgtaacaggaaaactatatcttgactatcagaatgactatggactgcttaaagttctctatccggaatatgatgaaaaacacaattgttttatgtttaataaatgcccgaaatgtaaaaaaaacatgcctctaaagaaacctacgaatttaacaacaaaaggtaacattcctttttataatttaaccaaagcacagttcgagcttcagccgccagcaaagcctgaacttattaatgaaggcaagaaggtacttctgttttcagactccagacggaatgcggccaagcttgcacttgacttatccaaatcatctgatacggatagtttttgccaaactgtcatgttggcggctaaaaaattgtcggaagacggaagagaacattccctgaaagaactttataatgtgtttcttgcagtctgcgtggagcagagactggaattcttttctggtgaaagtgcagaaattttcaaggatcatctagagaaaattcgtaaaaaacttaaaaaacgaagggatatttcaaaggagaattttgacccgttgccatatgactattacgaacagttgttaaacttttttacagagagtccacgttcctttaaggatatcggtttaggttttctcggtccattggatgaaattctggaagaatgtatttatgagcttgaggatgattataacattgaaattgatgatgaaatactccgttccatattagtattgcttttttgggatgtcatggatggaagtgcggctcttggtaatgtcattgaggatgagatcagaagaaatcttccgggacgaagtaaaaaccagttttttggcctcgaaggggattttacggtttctgttgataaaaacttcattaggatcgtaaaagatatgactggacttaatgaaagaaagatgggagagtttctgaactgtataaagagctatttctttggaccgggaacaaaccaacggtattaccttaaacttgatgccgtaaagattgtcattacggatgagaatttcaattggtatcgatgtgagagatgtggaaaaatatctccttataaacttggtgattactgtggttcttgttttgaatctaaaaatctccatatcatcaccaacaaggatctctctagattcgatttctggagaaaaccggtgcttactgctatcaacggcgaagagaaaattcatactattaatactgaggaacatactgcccaactctcccataaggaaacaacgagcgatattttaagcaagacggaggattatgagattcgtttccaggatattgatgttggtgagtttggtgagaattctattgatgtattaagttgtacgactaccatggaggtaggtatcgatattggttccctgacagcagtaggattaagaaacatccctcctatgcgtgaaaattatcagcagagagcaggccgtgctggtcgaaagaattccggaatttccactattgttacttattcttctggaggagttcatgatagccattatttcaggcatccggatgagatgatttccggagatcctagaaagccgtggattgacagagacaatcccaaaattaagcagcgccattataatatgaaaacattaaacagcttcatgtcgacagaattgatgcgaagcaagtttgacagtattgtagaggttggtatcgtaacattttgtgagaaatatgcagatgcctttattgaacatgcgcaatttcttgactttccaacagataacacggttgaaaaattctgtaagataagagacatggtgctttcagaaggcaaaagaaatgagtatttcaacggagataaagaaactcctgcgtttgatgtgttttattccgagggatatattccttcctattcttttcccaaaaatgtcgtaaggttttgcgtggaaaaggatttcgaacatgggaggagggttcctaaggatataagatatgctcctgaaagagacatcgcagttgccatcagtgaatatgcaccagggcgttttattactattgacaaaaagatatacagaagtggcggattatattcaaatccgagaccaaggggatatgaacataatcaggcggaatactattttatgagcaaggattatcggaaagatattattgtctgtacagaatgtaattggttcggggacgagcaggaagaagatacggaatactgcccttactgccatgcacgggtggagaaacgttcgatgattaagccgtggggatttgcgccggttaaggggaaaccggttaagtatgaagatgaggaagaagaaaagacctatgcagaagctccatattattcttatgttccgaaagatacagaaatgcagaattataagcatacttatattcgttttgcaaatcttcaggaccatcatgtattgaccgtaaatatgggaaagaaaagaaatggatttaatatctgtactaaatgtggtggagcagagatagctgaaccgcttcagacgggtgattttcgagtctgcaagccttattatgaccgctatcaatgtagtcatgatagaattgaaacaaatatttatcttggatacgaatttttgactgatatgtttatgctagatatcagatatgacaatcagaggttggtatcaaattatgacaatgaggaaaagagtattctacgttttgctgcaacgaccctgcatgaggcgattaaaaaggcagtgtctctttcattggatattgattataatgaaatcaatggcggatggaggacacgacttgaggaaaacggtgaagtacatattgagatgtttttttacgacaatctgaccagcggcgccggttattcttcgcttattgggaaggatggaatactggatgatgttctctcaaaaacaagagaaatcctgacagaatgcacctgttcaaggtcatgcagaaattgtcttgacaatttctataatcagagaaatcacgatatctttgacaggacgctagccatacagctccttgaatatgctctggatggaaaatatccggatgattattcacaagaagagcaaaaagcgtatctagtacctctaaagaaactgatcaaagagtcaaaaggtgtatctgtaaaagatgatattgcatttgaagtaatcccatcattaagaaagcggagaagaaatgaaaaggggaagttgtacctgaacccatacaatttatcagattggcttccaaatacatttagagagtatctaggaaaaatcaatgaataa

SEQ ID NO: 27483 - DNA, 1542 bp, Lentisphaera araneosa HTCC2155
atgaaatatgctttagacagaagagggcaggaaattagtgcggacgatggagttgacggtactaattatacttgccctgtgtgttcagaacgaaccgcctttcaaacgaacaagtttgggactcactactttaaacattggccaggtagtaacagcgaagactgtgaaaattatcgcggaggtcaagtttattatagtgaccgtagtaaggaagtgaataggtggttaggactggataaactgcttgaagacatacctgaagatttattaattgataatggatctatagatgaaacggatgagttccttagttggttggacgcggtttttcctgggaaagatgtagttgattttgcctgggagatgaagatcgaagaatttatttcacaatgtttaactacgaatcaacctgatcctgaattaaatgtattgaatcataccgacctaagctttactgagaaatcaaagttactgtggaggctagcgcattatcttgggatcgtacatcactatcatttaaagggagtggaagtcccagataaacatcgattagttgccgagaagtttaaaacgagtgcagtccttattaagaaagcgtatacttctaagaaatatgatcagctcatttttgaaattaaggaagaaccattgcgtttggaatgtgccgctgatatctcaggtgaaatacaaaaaatatgttttcctgagctaatgcagactgggtgcggcaatatagacccagttataaaaaatagaataattaatgagggtatccttctttgtaagttagaagatgaatctacttacataagtagaaggcatgtagaaattggagatgaagtcctactattaggtaatgattcaggaagacttgaaaattatatcaaaaatattcttagagaagaacttagttgtttaaacatagacggaattagtccagggtggaagatctatcaatttcaggttcctgaaagatataatgagttgatgcctagttggattcgttataaaacgctttgtcttgaaggaggattaaaaatagcgggttcgaagtatttaaaaggggccgtgccaaacattttattaagaacaaaaataactgatcttaataaattcacactaaaatgtgatggagatcaaattgatttcgtgagtcaagaattggaatcaggactaattcgaattcaaagtaaactagagtggaatgaagggcaatatttaggctgttttagtgtcgataaaaaagaaatcaagtttgaagtcgttaaccctccgatggtctcaatagcttatgacgaacaaagtaagggaggctggggatttacaaaaaatatgtggccagaacttagacgtcagtcaatagatactgacgtagttcatttgcgtggtcccattcaaatgggtgaatttacaaaaggttcatcaaatactagccgtgaacaatggtttaagttgattagaaataagaaagaaagcagtaagatatcgaacccacgcttacggttagttacgaacagaaaagtttttaaggagaagagttag

SEQ ID NO: 27484 - DNA, 2025 bp, Lentisphaera araneosa HTCC2155
atggagtactatttagggaagttagagataaaaagctataaaaataatcaaggatatatcacggttattaatagcttaaagctgattgatggtgtttggacaattaatcaatttggggatttaagcaagtttggttatcgcaaacgagtattcgtcctaaatcacaaagatctcactttagaggatcaatgttatgtacgttttacttgtgaagcaaacccaacttatgatggtgatccccagttggatgaatatatggtgaaacccgatgatcataattacaatcacacacttgagcgtcaacctttattaaggttaatctccgaatctgatttagatggtcactggctgagtaaagctaagttcacaaaagatttgaatactacttcacaaaaagtactcttaaagttaaaaattgaccataaagattgtgttgttgaaggattgacacttaaaaatgagtcaggtgaagttcgcttgtgtccacccagtaataaaagcgttgtcaactgttggaaaatgtcagatatagatcaaagtctgattctgaatatggggtatgccagttatttattagctgagccagatcatggtctgattcacaaagaaattgatgttcaaaccgaagcacagttaagtaattggtttaaaaagcaactaaaagaactaacggtatttaactctttaaatgctaaagaacagactgaattttcgaagattttgaaaactcttataaaagacaaagagtttcgtggcaataagcgtaatgtagaacagcaaagatggtcaagagtcgttgaggatttaaaagtttatcagttctctattaatgaaataaaatcacttgtgaagttgccgcaatggcaaaaagctttttctagttcgatagaagccaatgtgagttcttttaaggaagagattcatagtcaacttaaggggcttgaagatgaattagtaaataaacaagaggaatataaagagttcgaaaaatcatttgattctagtaagaaaaatcgtgaagccgatcttgataaagcaatacattcaaagaagttgatttttgaaaaagaagaaaaggctcgcttaaaacagatttcagttcttgagaaagatctgaaagaacttgaagacgatttgctgaaacgagagactcaattagtcacttatcaaaaaagatttgatagcgcaagtgagcgatttaaatccactcgccaagaattagtcgaggatttatctctttttcaaaatgttcttggtttcgaagctcataaggcaagagtaaatgaatttaatgacgatacagaaattgttcaattaccattattagaggtcgaagatactaagcatgaagtgatggttgatcgtctcaaagaagagttttcaatttggcttcctaataccccaaaaggatacagtaagttactctatttggcaattggaggaagcaaggcgataattgtaccagatgaaacgtactcgtgtgcatttcaggcaggacaaggagagcgttgtcgtttgagcttcatagtggtggatccatcatggacgcggtttaaagaagcgtgggaagaaatgtcgattgtttggagccatgccttaaataatcctacatatcaatttttactccatatacaagattttgatatggcactcgccgaagtttgggcacgtccactattaaatatattggcaggtttttctcagaaattacaggtcggtcccgactgtttttcttggccggataatttaaaattaattatatctccttcaattgataaggaaaatagttttgggctgagtccagaagtttgtgctcattttacggcaataaatcctaatgctgaaggtgaagagataggggattggccgaacgcaaagctgagtaaatcttttagtgaagctaggtttcggttaaatgaatttgcattggaaatgggagaagatgttgagcgtacagagaactacgtccaaaaattgaaatacatatatcccatgagttttgtaaatgacctgcgtgatgagtga

SEQ ID NO: 27485 - DNA, 5442 bp, Lentisphaera araneosa HTCC2155
atgaatgacgcagtgacgattgcaaataatctaaaagatatgtatttaagatttttagacagtgcgatgcctttacgctatgaagaattgatggcagaaagaagagctctgttaagtgagaaaggcatgatcagtcaagatcctttatttgaagctgtgccacgttatgaagaatataaaacactatatgaagcaagtaaggacttagatctggacaaggattttgcctctttcgtagagactggtctatttacaaaaatacatggtcaatcaatgaagatgtataaacatcagtttcagagtttgaaagcagtatgtaaatcaaacaaaaatttgattgtgacaacgggtacaggttctggtaagacggagtgttttttgctgcccatgatccataacataataaaagaatcacgaacatggggagaagacaagcccaaagcagtcagagctctgttgttatatccgttgaatgcattggcagaggatcaaatgatccgtttacgaaaaagtttagatggcgtaagtacggaggagaatgaggggcctagaaaatggctagatgaacatagaaatggtcatcgaataacatttggccgttatacaggaaaaacgccaatttcaggggtccgaagtagtagtgcagagcaaaaacttaagaatgaaaagtgggcaatggagaggatctacaaagaggtcaaagataatgaagatttacgttatttttataagagctttgatgaagactctgcggaagtctgggatcgctggtcaatgcaagaagagcccccagacttgttgatcactaattattcgatgcttaacattatgcttatgcgtagtctagaagaaaatatttttgaacaaactcgtaaatggttagcggatgatccatggttaaagggggaagcaaatgaaccgacaagaatttttcactttattgtagatgaactacatacatatagaggaacatcaggaacggaagtcgcttatttagtacgcttgatgctaaataggttgggcctcaatgcagattcacctcaattacgttttttagcgtcgagtgcatcgttgcctagctcagctgaaacgcgtaaatatatattagagtttttaggttcgtctgatgatttcaaagatgacgaaacatttaataaaaaatattcaattatagaaggttctcccttacggtacataccaagtcatgaaaaaatatttaaaaacaagcaaaaagtttttagtgatttttttgaaagttggaagagggctcctaaggggaaaaagcaggggccagtctatgaattggctcaacatttaagagtagatttaaaaggcgaagaggaagtaaaagcatctttggggattatttgtcaggaagctgagattataaagtcctatcacgaaaatattccccaacaggctgaaagtttagaagatatatctcagcgagtttttggagtagtggatcaaatcgcaacacaagggcttataacaatactaactgaatctagagttagcaatcttccaggtgccgcggcaccacaacctcttaggatgcatgcattttttcgtaatacactcggcttatgggcatgttctaataaaaactgcactgaggtaagtgaccccgatggtacaaggaacctacctgtaggtaaactttatacccaacccaaattggtctgtaattgtggagcacgagttttagatttactactatgtaaaagttgtggagatatttttttgggaggctaccgatcaaaactcaatgagaagaaagttgagtatttagttcacggccaaccaaatttagaacaaataccggcaactatgacggcaaaagaattgtatggcgaatatgcagttttatggttggggaaaccgggtgaaaataaacccattgataacgcttggacggagacttcaggtgaagttaataaattaaattgtacatggaaagaggcgaattacaatgcatttaaaggcagggtagagccaggaaagattggagctaattcttatttgttttcgattacatcaaacaaaacaaaaaaatatgattataactgtcaggctatgcctaataaatgtccgcaatgtgatagtgatggacgtcgaaaggatggtaagagtttccctccagtaggtctgcatcgtacggcagtacaaagagtgaatcaacttttgttggatgcgttatttagagagttcgatgatgaacaagcaaaaaaattagtcgtgtttacagatagccgccaagatgcagctaagcttgcagcggggattgaattagatcattatcgcgacttggttcgccaatcacttatgcagggttttgataaactaggaggggataaaggtatagcattaaaatatctggaagcaggaagtcctaaagattttaccgaagaagaaaaagaacaattcaaagattttcgagccagagatagcaagctgtttaatgcgatacgagattttttagatgagatggcttcggaagaagaattgaaacagattgagcaactaaaagataaaaaaagtggcccataccctatggggcgagtaacgaatttagtatgggaagatttactgagtttaggagttaacccagcaggtcctaatccaagtaggcaaactaaaaaagtaaagttagatgcagacggaggctatgtaacgacgagttggcgagaactgattgattgggaaggacgtaaacctgaaaataaagatgcatttgatttattaccacaggccaagactcttaaaaatgaattggaccaagctgcggcagatgagtgtgtgttcaccatgtttgcacataaaagaaagagtgtagaggcactggctttggggactttaacgttcaaaccgagcgatatagagtttgatacagatggactattgtcatggaaagagttttcaaatatagctaatattgtgatcagagttttaggcgagaagcgcaggattagtggtaataattattttaataatgcttcactccctaaggaactaaagagtttacttaagaaaaagtttccaggtgatgaaaacagtatactgaatttacttaaggattttttacttagtaaaggcgttttagagtctgaggaaaatcttgttatcaaaccttctggtctatggttttctccttgtaaaatgggagataaaatttggaggtgtaagcaatgttcaagtgtacaccttaataatgaaatacatttatgttggaattgtcgatcccctctagatcctaaagattttagattaaaatcgaattcagattctgagcaggattattatgcatatctagcatcatccaaagctgaaacttttagattacattgcgaagagttgacgggtcaaacatcccatgaaaatgcagttaaacgccagcgcttatttcaggatataatatcaggtgataaggaagtgtctttaattgattgcattgacgtattgagtgtgacaacgacaatggaagcaggtgttgatataggttccttaatggcagtaatgatgggtaatgttcctccgaaacgttttaactatcaacagagagttggccgtgcgggtagacggggtgcggggctttcaattgcgttgactgttgcacgaggcagaagtcatgatgaaactcacttttgtgatcctcagagaatgatttcttctaatcctacacctccttatttagaccttaaacgacaagcagttttaaacagaatggttagtaaagagttgcttaggcaggcttttagggtatgtggtgtgaaagctaaagctgatagtgtgcatggtgaatttggtgattgtgagacgtgggccatgagcgaaagacttataaagttatggtttacaaaaaatgatcaggtcattacagatacctgtgattttttaacttcatcggaagatatgaaagaggaagcaattcgatacgccaaggaggaactgttagtatcggtagataagatttccaaagacactaaataccatcagaaatccttaagtgagcggttagctaatgcgggtgtcttgcccatgtttggttttccgacacgctctagaaatctatatagtaacatccccaaatctagaaatagtgaaaatgtgattaaccgtgatttagatatagcgataagtcaatttgctccaggggcagagtctgtaaaggataaagccgttatcacaagcgtagggattgtcgattatgtgtacgaaaaaggtagagcgaaagaagccgatggtcgaggagccatacggcagcttggttcatgtaaaaactgcggtgctttaatttgtgatgatgttccagagaataaatgttcattatgcggttctgaatcagattatatgaaattaaccacttgggaaccaaaggggtttacaacagaacattaccaagaaaaggattttgaaggttcatttgaatggactgctagagcttcaatggccagattggctaatgaaccggtaatgtttgagccgatagaggggattaacctagagtgttctaacgaagaaaaaatgataacaagcatcaatgataatgatggtaagttattccaatttaatgaacatgaatccaaacctggtttatggctggaatcgacctgtctaccatttgaagggtggtggaaagatcaattaaatacagatagatgtgaaaaagtaggtttatcttcttccaaatatacagatgtgttattattgagactgagtaaagtgtctccgaatatagacctcagccctttcggtgataattcgctatacgctagggccgcctattactcatggggaggacttattcgcaaagcagcctgcatatcattagatatcgaacctggtgaactggatatgaatatacgacctgtaaaagatgctgagaatgaattttgtgaagtgtttttagctgatcacttggaaaatggagcgggttattgtcgctacctacgcgataatatgtatgaatcaattataaaattattagatactgatggagaactgaatctacacttaaacgctgaggctcactctacttgtgatagctcttgctatgattgtttaagagattatcacaattctgattttcacgctattttagattggcgcctaggtgttgatttgatgaatttatgcaaagatgctacatatatgccttcattaaagagcggccattggcagagtataaaagatattgctgtaaaaagtttatgctcaattaataaatccttagttgtgaaacatgtatctaatattgattgtatgtatgatggggaaaaggtagtggccgtactaattcacccattatgggcgagtaatcatgaaggtttagtcgaactagccatagacttaaatatcaatgtcgatgaattaccagtttgtaatatttttgatgttatgcgaagaccaggttggtgcttatctaaactgaacttgagttga

SEQ ID NO: 27486 - DNA, 2031 bp, Mesorhizobium sp. LNJC391B00
atgtcagagcgcgaggatcattttggtccgggccgattccgcgccttctctcccttcctggcgcccgacgagcgcaaagaactccacttgcttctcaatttcgccgaagggtcgcctccgagttttgccgacgcacttcgatcacttgctcggcgctatgtcgacgatggctctagcgcaaagctcagggcagtctgtcttctagtggcggacctgttcgagcagggatggcgtattgccgttgacgaagaccaaatccttttcgagccgcccggtattgcgcgaactgacagccagaccgtcgacgaggtcaaggcgcgggtccgcgcagcgctacagatcgctcgacagcggcaactccgcgaaccggcagttgcgaccttccttcgacacatggagcggcgcacggtgcggccacctggcgttcgaagctcggtccttgatctgatagacgagggcgcggtgctagctaaggagttgcggcgcgtttcgaagttgcccgaagctgatcgggttgcggcacttgccagcgtcgtcgatcctgtagtcgaaatttgccattccggggccaggtgcagtgacactggcctgccgctgatcgatatctggcgctatttccgtcacacctgggctcacgaatatcgcgcgatcccgggtcgccaactcctcatccttgtccgcaacgccgcacgccgaaatcgccccgtcatcggcatagccatgctggcgagcccggtgatgcgagtgagcgttcgggacaagtggattgggtggctgcgagacgaggctgagacacgcctaaatgatggtaggtgggagccgtccgcgctggccgcagcgctgcttgcccgtctcgaggaatcgatcgctgccattcgatgggacgatctcgcgaccgccgctgagatggtcgagccgacggagagcacggttcttcgactggagcagaaggcgtcgggcgcagccttcgcgcgtgagcttgagcttcgcgcccactacgagatagagcgtgaagtgggcgagaagatcagaccgatgcgtggcgcgttgaagcacgctggtcatgaacctgactggttgggggcatccgaagaccttctattcgttcgcaagcgcgccgaggtgttgtcgcaccttctcttcgctaaacagatgtttcgcgcggcgggactcacaagcaacccatccgccgcgctcgaacaattgctcgctgcacgcagtgggcagcgcgccatcgacatcgtgctcaccgaattccggaaagctggcctctctagccgcgttgccgatgtcagcgtttgcggcgccatccatccttacaatgagatcctcggcggaaagcttgtggcgttgctcctcgcgtcgcgcgaggtgcatgaggcctattccgaacgctatagctcgcaggtcagcgtgatcgcatcacagatggcaggacgtccaatcttgaagcccgcagacctccgcgtcctcacaacgacgagcctttatgggatcgggtcgagccaatacaatcggctgtcgctcaaggcggcgcatcaccccgggctcagtacagacgtgcgttggaatgcgatcggcaaaagtcttaccggcggtttcgggacgctccatcttgggagtgaaactgctcaggcgcttcgtataatggcggagacccgacacgtatcccggcgcgtcaacaatcggttcggcgaaggcacaagcccacgcctacggcaaatccgcgagggcctcgacgcgctgggcttggaaagcgacactatcctccatcacgcaacgcctcgcctgttctacgcatgtgaactcggtcccgattctcgcgacgcgctcttcggaatggaggccgcggacttccgacctgagacttcggctgcaattggcgaagcctggcgtcagcggtggctctccggtagatcgcaacgagaaaaaacactcgaagccatggctgatctgggtccagcgagtgtccaagccagtcttcggccaccgtcgaatgcagacttattggattccgtggcggccgggtaa

SEQ ID NO: 27487 - DNA, 1071 bp, Mesorhizobium sp. LNJC391B00
ttgatatccgtagttaccgacgccgacgttctcgcaaccgcgagaaagtcgttgggtttgcccacatctggcgagatcgatgatatctacatcgctgcatctctacggcgcttggcaggctttatgtgcccttgctcgccgaagacgctaatcggatcgatggtggacagccatcgcttcattaagcaaatcgacaatggattgctcgaccgcattgagagcgtcttggaatccctcgtcgccatcggcgatcttttggaactgagcgatgtcaccacgcttgatgagaccgtgaagagcacatgggtttttacagctccgccttcattcgtgccgcaccccgctggtagcgcgttcctccttggcgtctctgcagacgaggccacgccgttgcctgtcgaattgcggattcggatcaaatatcgaggcgtagcaagatccatcgatcccacgccattggaagcccttgagactacacttcgagggatgggactgcgtgagctttcaatggaaagctggctccgtcacccgaaagtgcagtcggagacgacagttcttagggaccttgatgcgaagttatcggcacaagggccgtgcggggaaattgtggaccttcgaatcctcgaccatacccgcaacgctcggcgctacagggatcggtggggtgcccctatatcccagagcggtcggttcatcgtgcgtcgcgctcaggcttatggcgccgatctttggggttatgccgagttgcgggagggaaagccggcgaaactgatcgatttccctccgcctggtcttcgctggcgcggctgcgacatggcgtggcgtgtgcagatggcgatcgattcgttggccggaaatgcacaaaggttcagcgtcgaggtttccaaagaggtggcgaggatagatttcttctcgccgatccccgactgggcgcggcgtcggctatccactatcggagagcaggccgagccaagggcctgcctgctgtcattcctactccccgaaaaagacttgaattccgaagagcagttccttcgtgaccacctatttcttgaccgtgcggacgcgtga

SEQ ID NO: 27488 - DNA, 5562 bp, Mesorhizobium sp. LNJC391B00
atgacaagaacaattcaggaaactattgatcatcttcacgcctcgcttaaagaatacatagaggcaacttatcacatcggcgacgccaccttgatcggccatcgccgcgctttgctgaaccgcgtgggcgtaacgcaccaggtcccgtttctcgaatcgacgccgaagtatcaacagggccaacggttcaaggagatgcaaggcctctccgcggcggccctcagcgtctatgaagccctatcgaaagcgcaggacggccaacctcgtctgctgttcgatccaccgtatcggcaccagggcgacgctatccggcatgcgcttatcgacggcaagaatcttgtcatcatgaccggaacgggctcgggcaagaccgaatccttcttgttgccgatcttgggcaagttcgcacgtgaagcttcagagcgaccacaagcatttggtcaacagcgggcgatgcgtgcgctgcttctctatccgatgaacgcgctcgtaaatgatcagctaggccgtctccgagcaatcttcggcgaccctcggcttgcagatcacttcaacggctgggccgcccgcacaccaacgtttgcgcgctacaccagcaggacgccttacgccggtgtgaggaccgcgaagaaggatggcaaaaagctggcctctttcgagagcttttatgtcgagatagagcgtcaggcctcgggtccaccgagcgaagagcaggtcaaggcgcaggaactgctgggtcaattgaagtcgcgaggaaaatggccggccaaacccgatctcgaaaaatggttcggcgccaaaggaagcccttggatcgatcggaagacgggggagtttctgcgtgctgtcaccttgcccgaggacgccgagttgatcactcggcacgaggttcaggatgctgcgccagacctactggtaacgaactattcaatgctcgaatacatgcttatgcggcctattgagcgctcgattttcgacgggacgcgcgcctggctcacggccaatcccgatgaaaagatgaccgtggtcctcgatgaagcccacctgtatcgcggcgcggcgggagccgaagtcggattgcttctgcgtcggctcagagatcgcctaggcatcccgactgagcggttccagatcatctgcgccacggctagcttcagcgaccccgaatatgcaaaggaattcggatcacagttgtccggtgtgcaggcagccaacttcgagcccatcacgggcgacctcgatctgtgcgctcacgcggcagccggcaacagcgccgatgcatctgtcctagcgtcaatcgatctagcgaatttctattcgcccgacgaggacgaacgaatcgcggccatcgctccgctcctgcagcaccgaggcgtagagggcggggccggagcagaaaaggacctcttcgatgcattggagacgtttgctccgcttgggctaatggtgaacactaccatgaaggccgcgaggccggtcgcgagccttggcatcgaacttttccccgactcgctggaaatcgccgacgcagcggtgacggctttgctggcgttgggaagtgtggcccgagcatcccctgatgcgtcgggcctccttccttgccgcgtacacaatttttatcgaggtttaccgggtctttgggtgtgcatggaccaagactgcgccgaaatcaccgaggccgagcggtccgggatctgcggtcgaatgtatagccagccgagggaagtctgtgggtgcggcgcacgcgtgttgcaactctatacctgtagaaattgcggtgcggcgcatgcaagagcgcactccgatgacgtcgacagtcccaacgcgctctggtccgagccaggacgccggctgcggatgccgggcggcgaaacggcgccgcttctagatcttgatctcctactggaggagccgcgcatatccgaacttgccgaggttgccgactatgacctgcagacgggccgactgaatccgcaagtgctggggccgaggacgcgctccgtacatattcgaagggaccgcatcactccggctgtggatgacgatggcgaggcggacacgcgagcggaagttcggggacaatttaccccatgcgccgtctgcggcgagagcgcaacatttggccgcacatccatccaagatcaccaaacgaagggagatcagcctttccaggccttggtgtcccggcagattcaggttcagccgcccgggccacaggcgcaatcatcgttcgcacccttgcgaggccggaaggtcctagtcttctcggattcccgtcaagtcgcggcacgccttgcgcccaaccttcaaatgtattcagtccgcgattccctgcgttcgctgattgtttggggctttgacaagcttcaccagcagtcgatgatccggacaatgctcaatctggaggacctctacctagcggtcctcctggcctctaagggtctgggcgtcaggttacgcccggagttgaaggcgggagaaactttcgcggcagaaacaactgttgaacatgcagtcgcccaaggtgctcttgcagacgacacggctctgcaactgctttggatggaagttcgcagcgatactccgccggaatctctcctcgatgacatcgtgaagacggtgaaggatagataccttggcctggaagcgcttgcactcgcgtcattgtgcgaaagcgcgaacaaggtcaaggacattcacgcgctcccttccatcccgggcgtcgcggaaaccaatgaggacaaaatcgcccttgcgcgggcgtggctgcgctgctggcgttcggccggcttctggctgaactcgatgccgacctcttggtataagcgcaaaggccgcggaacgagcgttcgagcgcaaaaaggctcgttccaggcaatgagaaaggtgctgcccgacagtttggcttacaaggcattcgacaagacttggcagcccgccttgatgactatcttcactgccgaaatggaaagcgggtttaagcgcctctcgggcaagaatctgtcgctgcaactcaccggcgattggatgcgctgcggtgcgtgccggtctgtgcatcggcccgtgcccacattaccccattgtctcgattgcggaagccacttggtagcaaaacttgatccggtcgacgatgcggttttcgtcgcgcgcaagggctactatcgcgcgccggtcgtcgcggcactcatggatccgacccgggcgccaatggcgctgatcgctgcggagcacacggcacaattgaatgcgcctcagagtgaggacgtcttctcgaaagccgaagagaacgaactcctcttccaggacgtggagttgacgtggggggcaggcgccaagcgcgctacggcgatcgatgttctatcgagcaccacgacgatggaggtcggtatcgacattggcgccctgtcaggcgtcgcattgcgcaacatgccaccgggccgtgcaaactaccagcagcgagcggggcgcgccgggcgtcgcggtaacgccgttgccacggttgtggccttcggcagcgccgacagccacgacgaacactatttcagcgagcctgaggcgatgatcgccggaccggttgtcgatccgaaactgacactcgacaacgctgacatcgtccaacgccatgtccgggcctatcttcttcagggctatcaccaggagaagattcccgcatttgaccccagcgccaatcccgacctgttttcggttctgggctcagtcgaggatttccagactgcgactgcggtgctcaaccgcgacgactttgcaacctggctccacgcgaacgcgacagttcttcgcaaacgggtttcgtcttggattcctcaccaactaagcgatgcggaccggaaaatgcttctcgatgaaatggtcgtcgactgcctgaacgcagtcgatagcgcacttggtgccacaagtttagccggccagaaattcgctcaggaaacggaggacgcggatggcgagagcgccagcggcgaggaagttcctcctgaggaaggagaagagagcccaccccagaaagcgctcacgggcaagctgttggaccggctgctctacaaaggcgtcctaccgcgatatgcctttccgacggacgtcgctacgttcaacgtcttcgatatcgaccgctctacctcgtatcgcccgatcatgaagttcgcaccttcacaggggctccctatagcattgtcccaatatgcgcctggaaagcaggtctggatttcgggcaaatgctatacgtctggcgcgatctactcgcccatggcggacgaccggtttgacgcttggcagaatcgccgcctctaccgtgaatgctccgaatgcagcttcgccgaaactgtgccgatcgacagcagcctccagcaaggcgcggtgcacgactgccatgcttgtggcgccgaggggtcgttcggacccacacattactggcttcgcccgcccggcttcgctcatcctatctatgaagaggaactcacttctccggacgacatgccagagacggcctatgccacgcgggccaagctgacgatgccgacgccatctgatgaggagaaatggatagcggtcaatgatcgcgttcgggtgatgcctgatcggacccatctactggtgtcaaacaccggaccaaagaaagacggatacaattactgcacgaagtgcggtcggatcgaggcctcagccgaaggatcggcagcgatgatgggccaacaccccaagccatatccagatgagaaggagccgaattgcgcgggcagtggaactacgcgccacctggtgctcggcacagactttatcaccgacatagcgcttttctcgctgcgggtcgcggcgccgctaaagcttaagcccggcttctaccccacggacgttgcacttcgaacagtgagcgaagcggttgcgaaggcagcgtgccatatgctggagatcgaggccggcgagttgatggccgaataccggccagcactgacacccgcaggacgaaacgggctcgaggccgagatctttctttacgacacgctgcccggtggggcgggcttctcgggtcaactcgctgataaaggtgatgagttgctccagcgcgccctatcgctgatgaaaacctgcccggaagcctgcgacggctcgtgctatcgctgcctgcgcagctttaaaaacaagttcgaacacgggctccttgatcgccacgttggagctgagttgctcgaatatctgatcacgggcgagatgcagccgttcaaccggcgtcggatcaaggcatccaccgagttgctaaagcaggatcttgagcggcaatcggacggcacaatattcgaattgaacaagaacgtctcggtcccggagctgggtgacgtgtcgatccccatcctcgcaacactgcctggtgggcgacgcttcgcaatcgccttgtctggcgctctcaccaccgaccaccccgccgatccggccatcgccaaactgtgggagacgtgggacggtatcgaggtcattccgattaacgaattgctcgtccggggcaatttgccagcagccacgcggtcggtgcagtcgcaaatcggcacttag

SEQ ID NO: 27489 - DNA, 1614 bp, Methanocalculus sp. 52_23
gtggaatatgcaataagaaagacatatttcggacctgaagaactagtctatgccatagaccttgcaaatgatccccatgtacatcaacacttaaacagcaagtttatttgtccagagtgtaaagagccagttcgattcataaatggagaggagagaacctactttagacacctgccaaacaatccaaaaacccaaaattgcccaaactattattcagataataactatgcagcccaatatttgagccagcaagagagatacaaatcaaggcgacagtcaaaacggctctatattttgaagagaggggagagctttgggctctttcttggttttcctccattagaagaggaaactgttgtagccgccagaaatgaaaacctcgtagtgcaaatcaacaatccaaataatgcagaactcaaagaaaacagattattcctgaaccaagtaactccaggagagatcacgtatgtctggttgaagtggatatatgattattattctttcaaatacagcgagtgttcagtaaatgatgatatagaagaaatctgggagaaagatcaatcaggacttccagaaaagggggcactgtttagatacagcaataattatgctcgttgtatatccgataatggggaagttaccaccgacaaatactattattttgcgacagcctctaaattgtcagagataactaaagattttctcgaatatgagtttgtaggaaaattggaagggagatccttcggatacgaatcaaagtggaagatctatcgagtgcagtttaccaaagccaccgaaaacgccctagaatttgcagacaatctaggggtcaacctaattgagtggcatcccccattaatccctctctggcctccccatgtgcaattgggagacaggcaaatatatagtaaatcaacgaaagtccttactctggcacaaaaaacggacacatctagttatcatcaggagatagaagggcaataccatagatcgatccctaagactcggattaaaacggggtggttgctgtaccactctgctgagggttccatgtgcatcaaatcctccgatggaggttatgaggctcacctcacatgtggattttctgacaagatatctcattatctacctccggaaataacactggaatacgataaaaagccacttgaaaatggtgactgcttccctctcaaggacaaggctaacttatccctcaaatcagacagcaagtgtaacatttatcattactccgaaaaacaactgaaaagtgtttactggagtgaacaggctattcttacacttttaaatttatcagaaggagacaggatttgtgtacgccacgggatggatgtagtatatcgggtaagcgttcaaaaatgtatccagaccgtagtaagaaactcaatacagagcgacgaaaaaatgtatcaggaactcgctctgacgggaggtatatttatatcaacccccgtgaaagtgaaatatattctgaatcgtcttggaaagtgccctaaagtcagtggatatctcagaaatgcactaaaatctggaaaaatcccacaaaaagcatactgtcacctcatttctgaattagatcaggagattagagagtaa

SEQ ID NO: 27490 - DNA, 2496 bp, Methanocalculus sp. 52_23
atgacaacccccaaaaaacatcacaacttacgttgctgcctcggaattccggtgaagtttagtgaccttgatgtcaaaatattaaggatcgcagatatttccacggcagactggacaaaaaatagggtaaatactataggtgtgatctacaccaatccagatgggggacccatgctcctaccagttaaacaggagaataatcccatccaactcgagcatgatactataggtatctggacatggaaagaaggtgccaattccgaagaatatgacataatcccttatttaagtcttccaaaacctcctcattgcaagtataattattatgaactaatcttcttgcagaattcagaatcctcaccagaatctcaagacagtttgagatttgcgatagggtccgacgatgagcttgtgcgcatattagaaactggcattgctgttccaagcaccttttcggaaaacctccttgtggtttatgactacgatgaagagttctacttctgtgtcgagataacgaaagctacatcctgtctacgaaatgaccagttgctttttgtaaccgataagaagtcattggtacgatataaaatcgaaaggaaagatgtcattgactcgtttgatccacagtataaaaatttactcccagaaaataatgcgcatctgactcgaagacttatctataaaaagatgagaattgcgacacaagacaaattagatactctggaccttcacagtgattcagtcctttttgcgagatatttttaccgaattgctactcgcctaaactattcaaacgatgagaaaaaattattgaacagtgttgtaattgaggctctatcaaatccaaaggcacaacaagtagttacgttatcttcagagaataagcagtgggtggagtcgcgaacggagataatacgctcatatctcaataccgatgccgaagttgaagagtttgtaagaggggtcattgaacacgtcccgaatatcaatgaagaatatattgacaaaatacaacatgtggccattcaagggttatttgagaaaaaagaaaatttagaatctgaaattctcgatttaaagagtaaaagagatgatattactggtgacattcttgcaataactggaaaacaaacagctgcaatggaggcattgagatctcttaataagacagtcgaatccgaaagcaagcggataaaagcggaccaagaaagcagaatcaagcaggaactcaagacatttgaaagtgatcgaaaaaagattgctattgaagaaatcgccgcgttcaaaaaggagcaactgcaggctattgctaaagagggagaactgtttagagccgaacagaagaatgctattcagaatgatctccagtcgctctgtgaggaagttaacagactccagaatgacatagccacattagaagcatctagggaccaactggacaacgatatctcagatagacaacgcatccaggaagagttatcacagctcgaacaggacaagcaaacattagaagaaacgaatgagcagttaaaaacctattgtgagcagaaactcaaggatatacagcataatttggggaataccctcggagatctggcattgtttaaagggctgatgctggatggagggtctgaaaaaccaagttttgcagcagtaccaaattcgaatctgttaatacgaccagcagaagattacgggttagatccgatcgaaattgcagatattgagaatttagtttacgacctaaaggaaaacctgcagaacattggggttgaccaagaatatgctgaaagccttgctgaactcgttgcaggggcatatctgacgagaaccccactgctccttacgggatgcactgcaagcctcatggccaatgccatctcagttacactctgctcacagactccagaaataatctctgttccaactggttacaacgactatttttcactattgaacaccgtaagaaatacctctggcgatgttgttcttcttcaaaatgtcatcggatccattgatgaaggctgttatatgcatctcgcaaaggatatagccgatgaaaaaccaggaaaatacatcctgtattcactcgattttgcagaaaccatgagaatactccccccaagtgtactggggtacatggttctcattaattccgaagatgtgatcacctctgttgaaactgaagacctgaatgccggtgattgtaccatagttgcacccgttgaaagaaaagccaatactaagggtctgtaccagaatatcgttcagctttcacgtgggatgggtacgacaaacggatacaacctaaccagatctacaatactatccacgattgccgcaaaggacgaaaaaaatgtggacgacataattcttctagaacttgcaacctactgcaaactacttggaactacaaacgaactgaaccagagattgggatatctcggcagagacgatctaaaaaagatcgtagaaaaacttctgggaggagaataa

SEQ ID NO: 27491 - DNA, 1041 bp, Methanocalculus sp. 52_23
atgggactagaaccccatgaagttatagcacaagggctggggatatctcgttttttctgtgaagatgaaaatgcctatattgcccggatactttactctgctatttctgaatggacaaaaacagcagtgttggataagactcttgaggtggaaagtgaatctcttgatacaagttacacacagtacacaaaacatcacgtaaccagaaagtgcaatatcattctttcaacctatttagatctctatcccaacgtgaggacatggttttatccagaggataaacagggtatccaaccaaccaaagtaattcaggagagattggaacactctggatctcttgtttccggacctgataacactattcagttgccacctgacaaatacatgaagattgctaacgacttatatctactacgtgggacatcatttggaacagagggaaaaatacatggtatgggatggtacgtcaacaagatttctgaatcagatgtatattcgctcgaagaactctttttgataccgcaaatcgatgcaaaagataccgttctcgaatacagcagaattgctgagagagcatacacaccgaacactactatatctgatgctcgaagatattttgaccctttctcaaggagaattttctctgaatcctgggaagaatcgcttcaccatccttgggaattaactgtgtatcgaaataaccgtgatgattatggatttgttaagcaagaagacgggatgatatatacgcttgcatttccagatcatatcataaaaatacaagaggtccgcagattcatgtacggtcttcgatatctgagccataacccagaacgggccacaatatcaatctacaacgacgcaatcaaaatcaaactgcattccactcttccagggagggaggagatgttgtttcacatgatagcatggccagcccgaaatattctagacagaacagagttcattacatcgccaatttttcttccaattgttacaaaaattctaaagaatctgaacattcaggtgatgcaaaatggctga

SEQ ID NO: 27492 - DNA, 5325 bp, Methanocalculus sp. 52_23
atggctgaatacagtgttcaacatatacaccgcgaacttgttggaaaactgaaggactacattcaagcgcaatactttggtgagaatgatcttcttttgagtgcatctaaagatcttttagataaagaaaattccatttacagagatccctatatcgaatcaaatcagacatatcaagtattaaaagatggattgcctgatgcaaatatccctaaaaatatcaaagattttctttgccgaatgtgtgagagggatttaggcgttttcaaagagccctatagccatcagattaaagcacttgaggatttttaccaaggaaaagacatcctagtgactacaggcacgggttctggaaagactgagtgtttcatgtggccccttgttgcaaaccttgcaactgaagcaaaaacacgtcccaattcttggaataaaaggggtgttagagcgttgttactctaccccatgaatgcattggtcgcagatcagataggtcgcttgcgaaaaataatcggcgattatggtggagaatttcacacactttttacggagtataccgagggggcaaacaaccgtgttccccaatttgggatgtacacgggtagaacaccatatccaggtgagcctgtaaaagaaaaggatgcgaaactggcaaaaacactgaagcgcgatctgatcaaccgtagcccggagttgatcacggaacttaaatcactggggaagtatccctcaaaatataacctagaagcctatactgcaagcctaaataagggattccatcaaccgaatctgtgcgacgcagaattaattacgcgtaaggagatgcaggattactgtccggacattcttgttacaaattactcaatgcttcagtacatgctgattcgacagatcgaacagccattctggtcaaacacccaggattggttaaacgaatctccagagaacaaactcctgatagtcattgatgaagcacacatgtaccgtggatcggcagggggagaggttgctcttctcattcgtcgattaatgtacaagttaggaataacgcgtgataaagtacggtttatcctcaccagtgctagtattccagttgacaacgaggaaacgagaagcaaactaaacgaatttttaagggagatcacttcatgcgagaaagatacattctcgataattgctggaacaaacaaaaaaattcattcccagaatcctatcgatttctcagcaaaacagatctatgactttcctctagataatttccaatgtgatgatacaactaaagcccaagcagtccgcaggtttttccaagaacttgacggaaccagacctcattatggtacaatcgaagaactggaagcgtggctattcgaaacattgcctaaatatgggcccgtacagcggataataaatcagaccgcagggaacgctactgatatcaccaaacttgcagaaatcgcttttccaaacgatgacatcgaaactgcattttctgcaacacaggttcttctatcgctcctcccacttgccaaaaaagataggcaggttcttttccctgctagacttcacatgtttttccgtggtctgcaggggttatatgcatgtacaaatcccaactgtccgaaaaaacacaccggcgacgggatcactctgggtgagatttactcagatagcgaacaggacatttgtccccactgcgatgggaaaatatacgagttaatcaatgatagaagatgcggggccctgttccttaaaggctatttgcttaatgcagaaaatttcgaggataagaaatacttctggcacgttccaggagagatatttgcaaaagagttaagggaagtacacctctatatcatcccaaagaatcatcctgtaaatagaagagatatctgttgcggatggcttgatgcaaagaccggattcatacatttcgacaacattcatgctgaggaagatggattcttacaagtctgttattcgcttaaacaggtaaaagggaaaccagaacaattaacattttactattgtcccaagtgtgaaaaacagttaaataactactcattttctgacttttctacgaaaggaaatgagccgttttataacattgtttcctcacaattgtcagtccaaccgcctgcaatctttgatgaggaaaaacttaagcaacaacctaatgctgggaggaaagtccttatattctctgacagcaggcaaagagccgcagtactcgccaaagatatgactaggacagcagacgaccaggccgcaagagcggttttagttctggcagctgctcgtttacaagaatgggctgagaaggcagaggagagtgtgacgctcgatatgctttatcctgcatttttagagatagcataccacaatcatttacgcctgttctatgggggggacaagggccgttttaatgatgatctggaaaccatcaaaggcattattgaaaaggcagaaagacgaaataaaccgctgaaatacgatagacttacacgtgatttcaagaataagccaggacttttttcggaacaactcctgaaaaatctctgctcaccattcaggtctttgacggatcttggcctaggttggatggaaccatgtgaagaagacgatatcaaagactgtcttgaattattcaacgaccacggcgttaagatgtctgaagaagacttcattgcccttttcaccgcctgggctcaccatcattgtacggactcattcgccattggaaaccagatttcggatcaaatacggttcaatattgcccttcgtaaatttggcagatttggcatacaagagaaagacctacagaaactaccgtccaaattcaaaaagatcctatcagagaagtataatcaggaacagattaattggattgcatgtgtactttccgaaacatttcttagtcgcggaagtggcgaggaagagggcagatacttcctcatattagataaaattgcgttaaagttcaaggacgaacacaagtggcatcgctgtagaacttgttctgatattttcccatataccctgtttgggaaatgtgcatattgtggttcatttgatgtctacgagatgagcgataaggatcttgaacgatacaaattctggagagagcctgttcttggtgcaatagcagaaggctctggcaaattgattcgtactatcaacaccgaagaacatacagcacagctctcttacaaagatcagcggaacgacatctggtccacgacggaaaactacgagatgcggttccagaatctgcttttagacgacgaactcccaatcgacgtgttgagttgtacaacaacaatggaagttggcattgatatcggctctttgactgccatcagtcttcgaaatgttcccccaatgcgggagaactatcagcagagagctggacgtgctggaaggcgcggaacatcaatttcaacgattgcaacctatgcccagaatggtccccatgacggatggtacttccaccaccccgagaaaattatttcgggagatgccagtaatccttggatagatgtaaataatgtcacactccttcagcgtcatgtaaatttgctcatctcaagtgaatttctgagtgaaaaagggacggatttgtacgaatgtccagtattatcgttctttgagaattattatcgcgagtttatagagttcctgaaaaaattccggtttagcccagaattggaggcaacagttctttccactaaaaaaacggatgagagttcgcatcaacaatttgtacaggggctcacaattgaattagagagaatacgggatgatgtgctcaacaaccgcgggctatatgaggtgaaaaccgagagcgaacggcaagtcagtcttcttgaccatttcagtttcgagggaattttaccaacctactctttcccgcaaaatgttgtaggtttcttcatcgaaaacaaatatggaactaagataatccagaaaccagatcgttcactcgacattgcaattagtgagtatgctccaggaaaagtaattgttgtaaacaaagagacctacaaagtcggtgggatttatagtttccattcaaaattcagaagagagaatcggcgcgaaaatcaggcacggccatactttgagaatccaaattatctatcagatttgtatctatgcccaaatccggattgtggctggacagatacagacaatcccagggatggagtgtgtccattctgcggcgagccaatttcagagaacagtaaacggaagatgcttcgaccatggggttttgctcccgtagatggaaagccaattcctgaggctcacgctgaagttgaacagtcatatgcagaggagccatgttacttcgcaacacctgaccgtaatgacatggagaatatcgggtgccaacatattatggctgcgctccgttctgataagatcaggatcattaacaagggcttgaaaggacgtggatttaatgtatgtcagaattgtggtgctgcagaggttgcagaacaaagtaatggtgatgatcacgagtctagaccattaaaggacgttaatcgaccatacaatttcccaggtatggtttcaaagtgctttcacagtccgataaatgtgtatctcggtcacacgtttgcaacggacatggtcgtctttgagtttgaactggataaatccctaattaacaccgagtactccgggatgtggatttcaagcgccgcaacaacacttactgaagcgtttttacttgctgcaagccgtactctggatgttgattttaatgacatcaaaggtggtcacagagttcacgaaacagaagatacaacatttgttgatatttacatttatgacagtctatcaagtggagcaggatatactaccggtctttgggacataattgatccgttacttcagaacgttcaggatgtcctaaattgcgacaaaagttgtgctacagcatgtcactcgtgtctcaaacattactggaaccagagattacataggaaattagatcgttttgcagcacttgatctcttgaaatggggtagatcaggtgacctgtctaaaccattgagtgtcgataaacaggacgagattatcaccccactcaaacgcttactaattgatgctcatccagagattcagtttcaccctactcaagtgagtatctccattattttaccgaagaagtctgccgagctcgtgatttatcctgcgatgtgggccattccagcgaagactgatagcaccctctatttgtcagataaactggtaaaaaatgcactccctaaagcctttgacgatgctgataagttcataaaacgtcttctgatggagtaa

SEQ ID NO: 27493 - DNA, 1623 bp, Methanoplanus limicola DSM 2279
gtggaatttgcatatgacaataaagaacctggtaatcaagtaaaagtatatgctaaagaattaaaaaagatcagaactgaatcaagcagtgagaaaagtaaacagtacacatgtccttattgtggggaatatgttaaatattatcatggaaaaatacaggaagcacatttcagacacataagaggttctttaatcgcgaaaacatgcgacaaatatgtatccggaaatggaattggcacctctaaggacagatatctgttagatcaaaaactgttaggatttccattatatattcgtaaacttggagaaaatttcaggttatttattgggctttcacctgtaccagaaagcacaataaatgatgatatagaatcatcacaggaaataataattaaggatcctaattatgtacaattcgatcaaatatatctcgaggatctgatagttgatgaaataacatacaaacctctggattatctttacgaaacctatcatattgaataccgccacaatcccaatccgcttacaagtaaatacggatgttttaaagaaatttatggaatcgaaccgaaaggcgccctctttttttgcagcgatatgttctcaagacgtattgcatttaacggaaaaattacaacagatacatattactacttagttataccctcagcagaaatattatccaataaaaaatttctgagtattgaatcctgtaacatattagcagttaaatctgatttgcctgaagaatggtttgtatataagatcaaatttactgaaataactaatgaatcttctgaatttgcaagagacttaaatctgactctggttgaaaaaccacaaaaattaacgccactgtggcctccacatgtccaatatggtaaccaacatatttacaaaaaagactgccatgcccattatctgttagagtcccaaaaatcagttgagaaagataaatcttcaaaagaaatattacaacataaaattttaataaaaattattacattaaacgcacatttggacattctaaatgtagaagttaataaaaatgaaacaaaaatccccttagaagaggataatactcaatttaatcccgttacttcctgcaagccttcacttaatattcctccttattctcccccaacaatagcgatacagtacggtaaaaaagaactccagaatcacgaagaattacaaaccacaaaaaactccacaatatcctgcaaatccaattataaatgcagtttttgccatatccggaataattacctaaagacattgattaccaataaattaacgatacctcaaatatcagatattaagccaggcgatacattcctcgtcctccatggcctggatattataagcaggatacactttcctcaaaaaaacgaaaaacaatccaatgaaataaaaaaaagtgataatcagatgtatcaaactcttattcagctaaaaggacagcagataacgactccgataatcctaaaatatgcattacaagaccccgatgaatatcccaaagttaaatcatatattctaaactctcttcgcataggtgaaattccaaagccagcttatgactatataattaacaacattaaaggaggaatctttaaatga

SEQ ID NO: 27494 - DNA, 2166 bp, Methanoplanus limicola DSM 2279
atgaataacgaaaattactcattatgtctaactataatcgaacagaataattattctcaattgcttagacttgcagatcccattggaaaagatggacaaacactatggaaattagacgggaaaagccataaacttgatcttccgaatatcaaaacaatcagtatggatcggtatcaggcaaaaaataacgatttagccatatggaaatgggaattaaatccagaagatcaaaaaaagcaactgtcaaaccgtacgaatgaaaagttttacgaattaatatttttagatgatgaaaatattgacagcaaggatgaaataaaaacacgtaaacttgaagatcttatcgatatcctgatatcaggatttaaaattcctgaattcataactgataatttactattagtctttgataaatctaaaagagatggatatatttgttttgatcttaaaaaatcagactacagtatagaaaataatacaatgaaaattaaggagggtacaactcttgaaattcataaaattcgagaagaactctgtattgatactgataattacatcaaaaatgctacaataaaaaattactatgctcaaaggaggataatttacagagagagaaaacttaaaaaacctgatgggcagttaaaaataaaaagttttatctctctcttcaaaagttactttgaggagattactgaaaagatgaattatgatgatgaacaaagaaatattattaaaaaaacaatatccaatgccttagataacagagaagatattgaagcattttttaaattaaccggttcagacaatgaagaatttatttttacccataatacaacaagtaaatttgaagaaactgctcagattattaaaaaatatgcatccgataaagggatgaaaaactttcttgaaagtgtaattgaaaatactccggaatttaaagaatattatcttgatatattaaaagaagactatctgactgacgaaaaagaaaaagctgagcaggagttgaaaattcttgaagaaaagaagactgatcttcaaaatatctttaataaaaaagaaaaagatcttaataacgagcttaaatctttagaattaaaaaaagctgaaattaccaatgaatataggaaaaaagaagaaaaaatcactgaatacaacaacaaaataagcaatttagaaaatagaaatgaacaactcaacaaatattgtgaagaaaaagttgagtccattaaagagaatacaggtgccctattaggtgaaattgctgtactaaaaggcatcactcagaattctgcaactccaattcaggactataatctaactaagaactgttctaaatcatttgaaggagacaatatatattccataaccaataaagaagatcttataggtggactggaaaaaaatcttgacagcatcttaattccggatgaatataactcaggtgaattagccagatttattattggctcttacctttctaaaacacctgttctcctaataggaaacacatcccagcttctggctgaaactatatccataacattctgtggcagaacttctgaaattatctttgttcctacaggttttagaaattatgatgagttacttaactccgtcaggtcaagtgaaagtaatgtagtatttattaaaaatgcagttggattctgtgatgaatatatctacctcaatctgattaaggataatccggataaatttcttcttttttcagcagaattccaggatactataaggatacttccggcaggaatcctgggatacatgagcctcattgactgtgaaaaaataatactgccttttaatttgaatgaaatttatgatgatctaacccctgcaaaaattgaagaaatgagcaatgcagagtataataaaaatcaatatatgaaactctacaaagaaatatgtgagctttcagaagaatcagggttaaaaaacggctataaccttttaagggctaaaattctctcaacacttttaggtcctgaaaaagaggaaaacaaatctcttatcaatatccttcttcctgaactggttacatacaatcagattcaggaaaacacagataattacctcgactatttacaaaccttagataaaacagagtattacaaaatagcagaaaaactgtccggtggggaaagataa

SEQ ID NO: 27495 - DNA, 1032 bp, Methanoplanus limicola DSM 2279
atgaaaacgggcatccattcaaaaatggctgaagaaatgaagataatccccttcccagaagaaaacgaagacagatttatagcccgtgtcatatattccgccctttcagaatggataaaagcgtcaacatttgacaggaaaattgatgaccaggaaggcgttacagaagatggctgcacaaagcaccacattacaaggaaatgcggagatattctcaaaggttttctcgaaatatatccacagatagaagactatttttatccggaagatgaaaaagatccaaaaccaattcaggaaattcagaagagactattttcagcaggggtattagtctcagggataaataatactgttcagttatcccagaaaaaatatggatttgttactgataatctttatttcgagcgtggtaacttccctgaaactggcaatcaaatatcaggtcttggaagttatatcaatagggttcctgaaaactcttctacccaacaattagaagaactattcttcatacctgatgaaaacgctgaatctaccttttacaacttcaataaaagaatgaaaggaaaatatactcctctgtcagaaattccggaaaactggagattttttgactttaattctaagaaaagtttttataaatcatggataccctattttgatgagacaaataaaattacagcatataaaaacagtaacaacattttagattatggaattatcaaaaacaataacggaactctctcatcgataacatttccaaatcatattgttgatacaaaagaggtcagaagatttctatacggcattagatcagcagaaggcaatccctgtaaggccaaattaacattaatgggcaagtcagtgaatattgaattttatacatctcttcctcaaagagaacaaacattgttgaacatgattgcctggcctgttcgtagcatgtatgacagaacacaatatacagcacctattgtatttctgccaataataaaaaaaatgtttaaaaatttgaatgtggatatagggtga

SEQ ID NO: 27496 - DNA, 5292 bp, Methanoplanus limicola DSM 2279
atgacagacgcttacggaattcagaatactcataaagaacttgttaataagctaaaaaattacatccagtcacagtattttggactaaataatctgcttcttgaagcaggagatgaacttttagaaagagacaataccatatatcaggatccatatattgaatcaaatccttcatatcagattatcaggaatggtttattatctgcaaaaataccggaaaacatacgggatatccttcacaggatgagtgaacaaaatcttggagtttttgatagtccgtatgcccatcagatagaggcattagagtcattctttcagggaaaagatgttatggttacaaccggaaccggttcaggtaagactgaatgtttcatgtggccaattctcgcaagccttgcagatgaagcaaaaaagaatcctcaatcctgggaaaaaagagggatcagagcattattactttacccaatgaacgcccttgtatccgatcagattggtcgcctgcgcaaaatgatcggagatcaggatggcaaattccattccatattttcagaatatacaaataatccagacatccgttacccacagtttgggatgtacaccggcagaaccccttatcccggcgacctggtcaaaagtaaagacaaggaccttgcaaaaacaatggaaaaagatcttcttaatccggaaactgattttatcaatgaattaaagaagatcggtaggtatcctgcaaagagagatctggaaggattcattgacaatttaaaacagggaattcattctacagaaccagaagacgctgaacttatcaccagatgggaaatgcagaataactgcccggatatactggttacaaactatacaatgcttcagtttatgctgatccgtgatatagaaaagccaatctgggagaggacacgggaatggctgaatgcatctccggaaaataaactcctgattgttattgatgaagcccatatgtatcatggatcccccggaggtgaagttgcactactcctccggcgtctgatgtacaaattaggaattaaaagagataaaatcaggtttgtcctcaccagtgcaagcattccggtaaaatcaagtgaagataaaggagctattcagaacttcattaatgatttaacagtcaatagccctgaaaatgaaaattactcagtcattacaggcaagcataaagaaatctcattagaaggcactgctaaattcaaagcaaacaaaatttcagatatatctgttgataacttcctgaaagatgaagaaacaagaatttcagagattaaaaaatatttcaaggctttaaataaaaatattccggactttacatataacgaactggaaaattatctgttcgaaaaacttccggaatttgccccggttcagcgactcataaagtcaacatccggaaaagcaaccaatgtcaaagaacttgcaaaaattgtctttcctgatgatcctgaagatacagccaactatgcaattcaggtattactggctattatgcctcttgcaaagagtaaggaaggtcaggtattatttccggcacgtctgcatatgttctttaggggtcttgatgggctttttgcatgtacaaatccggattgcccaaataagcattcaggagatggaataactcttggacaattatatactgacagtagcagagaggtctgttcctgcggtggaaaaatatatgaattagtcaatgaccgtcgatgtggagccatattcatcaaaggatacatgagcaacaatgtatcagctgacggaaatgatatctggagatatcccggagaaaagtattatcatgatatgaaagaggttcacttttatattgttccggaaaaatacaggcttaaatcaaacaaattatcaaagggttggttaaattcaaaaacaggagtttttacatccagcaatccaaacaatgaaaatggatttttaaaagtcctttattcacatactgaaataaaaaataagccagggcaattgaccttcacaacctgtccaaaatgcaataaattacttggtagtcgttccttatctgatttttcaacaaaaggaaatgaaccgttctataatattgttgcatcgcaacttcatattcagccaccaacaatatttgacagagaaaaacttgaacggcaaccaaatgaagggagaaaggttttactcttctcagacagcagacaaaaagctgctgttcttgcaaaggatatgacaagatcagcagatgatgaggctgccagatcagcaattgttcttgcaggatataaccttcagaagtggtctgaaaagtataatgaaaagataacattagagatgttatatccggcatttcttgaaattgcaggcatcaaccatttaagactgttctatggtggagatagggacaaattcaatagagatattgaaaatatcaaaaaggacattaaccaggcaaaacgaagaaataaaacactaaaatatcataacttagctgaaaaactacggaatccaccaggattatattctgaacagttgttgaaaaacctatgttcatcatatagatctcttgtagatcttggactctgctggttaattccaagtaatctggaagatattgaagactccattgacgaattagcagaagagagcatcaacatttctgaagaagactttactgctcttttttctgcatgggcttattacctttgcacagataaatatgcacttggagagagtatttccaataaagtaagagataatgtttttctctattcttacggtcgttttggagttgaaaataaagacataaataaaatgccccctttcctcaaaaaaattcttaattcacagggatataatgaggaaaaaatcttattaatccaaaagaaccttcatcataattttcttagaacaggaagcgaagagcaggaatcaaattttctgcttctcaacaaaatctcactgaagtttgatgataatcatgagtggttccgctgcaaaaaatgctctggtatttttccatatactctgtggggtcactgcgcaagatgtggtgaaaagtcaatagaaaagatagctgattttgaaagatacagattctggagagagcctatattaaaggcgcttgatgaaggtaccggaagggaaataaaaacaataaattcagaggaacatacggctcagttgtcacataaagatcaacgccaaaaaacatggtccaaaactgaaaattatgaaatgagattccagaatattttatttgaagaggagtttccaattgatgttctgagctgtacaacgacaatggaagtagggatcgatattggttcacttactgcaataagtcttagaaatgttccacctatgagagaaaattatcagcaaagagctggtcgtgcaggcagaaggggttcttcagtttcaacaatagtaacatatgcacagaacggaccccatgatggctggtattttaacaatcctgaggaaataatctccgggaaaacacgcctaccctggattgatgtaaataacaaaaaactaaataaaagacacctgaatttagtgattttaaatgatttcctgagccttcaggaaaccaaccttgcagaatgtgacaccgcagaattttacaacaattattataatgcctttctggattaccttaataattatagattcaggcaggactttatagatacaatgctctctgagaattacaataacaatgcccccattgatgaattcagaagagatcttatagataacttaaaagagatcagaaaatctgtacttaaaaaccctgaaagatatacatcaaatgaaagtgaaaaattcacacttctcgatcaccttaattcagaaggaatactcccaacatattcttttccacagaacgttgttggattttatatcgaagataaaaatggagaaattgatcaaaaaccggagcgttcacttgatattgcaataagtgaatatgcacccggtaaaatacttgtcgtagataagaaaacatacaaggtcggaggtatttacagccaccattctaaatttaaagagggtttttatgaaaaacaggcgaaaccctattttgaagatcctaactacctttttgaattatatcaatgtgaaaattctgaatgtggatggacatcaatagagataccaccaaataatcaatgtcctttctgcaaatcaaaaataatttcagaccataaaatgttaagaccatggggttttgctccggtaaatggtacaagtattccggaatcatgggcagaggttgaatattcatatgccgaagaaccatgttattttgcagaaccggttcataacgacctgaaaaatactggatttccacatatacaggcagcaaaccgttcagataaaataactattattaataaaggaattaagggacttggatttaatgtttgcagagaatgtggcgcagctgaagttgcacaaacttccgaaccctcccttaaaggaataggaagaccatatgttccccgttcaaaaaacagatatccatgctaccattataatagttccaatattgaaaatgtatttctcggtcatactttcaacactgatatggtcatctttgaatttgatcttgataaaaataagataaacactgattacaacggactatggatcaaaaatgctgcagttactttaaccgaggccatgcttatggcagcaagcagaagtcttgacatagaatattctgagcttaaggcaggatacagaattcacagtaataatgaaaatgtgtttgtggacatttatatttatgacagtttatcaagcggtgccggatattcttcagagttattaaatataactgaactaatttttgaaaatacaaaagaaactctaaattgtccatctaattgtgaatctgcctgccataactgtttaaaacactactggaataaataccgtcaggacaaattagaccgatatgcagctctcgatttacttaactggggaatgtacaataaactccctgaagatattacaaaagaagaacagattaaaattctaaaacctttagaagagagattaaaaagttttgactcagccattcatcttattaatgataaaaatgagatatttatttcaaatgccagtattaaaaagaaaatcattgtatatcctgctatgtacaatctcccaaacagaagagatacaatttacctgtccgataaaatggttaaaagagcgttacccgtagcatacaaaattatcaaaaaatatttttccaataataatccctga

SEQ ID NO: 27497 - DNA, 1590 bp, Methanosarcina mazei
atggactgcgcatataacaatagtaaacctggcgttcaaataaaagttcaagcatctgacatatctggttaccatatgggccaatattcatgcatactttgcggggagcctgtcaaattttatagaggagaaatccaaaaatcccattttcgtcacgaacgcgggtcaataattgcccaaacatgtgagttctatactacgaacatgtctgaattctctgaagaggaacttaggaaaaaaattactggtcttcccttctaccttaaacagattgatacttcctttaaattatatattggattttggccagtggatgatttaacgcttacagaagaaaaacgaataggacaaaaaataactatcaaaaatgatagaaaactccaaattgaagctatagaccttgaaaagattcacgcaaataaaacctatcgtctaccaatctcattggtttataattcatataaactcaagtataaaatatcagggactcccatttctgaaatatggggagaaaagacatcaagaatattctcaaatgggttattttttagaatcggtagtatttactcccgtagtatcaatttgaatggtattataactacggatacaagttattacctcctttctcaaagttccgtcactaacaagtcttacttcaaagtagaggagagttattctctcttaaataaaggaaaagaaaaatggaaaatctataaaatccggttcactaaaattactagagaatcctcaaaatatgcaagagatcttcatgtacagcttctcgaaaaacccccagaaattatccctctctggcctccgagtattcagaaagaccggaaatatatccatcaagaaacaggtatcagtacctattgtctgagctcatcaaataaatatggaaaatgggaagttgctatcctcaacaaacacaagaaacaatcttatagatttgagatttttctccaagatcctatattctcaatcgatgtggacaatcacataaagtatctgtctttctttgacactgacaatgattttgaggtagccatggtagcacgagataaaaaaaagaacatccaatgtagacagccttccttggagctgaaatggatgaaaaaagaaatcataccaggctcggaactaaaagcaatcaaaaacgcagatctatctataaaatctgacatgaaatgtgatattacccgcatgagaaatcatattccatacgagatcttcagaaatgaactctcagttcttagttttccagatttatccaatggcgataccattattatcagacatggattagacatactagcaactctttacttcagaagaaccaaaaaaataacacatgacatatacagtaataacctaaaagataacctaaaagatgaggcactgtatcaaaaattactccaacaaagaggtacctttacggcagccccaatacaattcaagtatattgctgctagacttgaaaactacccaaaaaccagggaatatcttaaaaaagctctcaaaacagggcgaatctcaaagcaggcagtagaccactttcttaaaaatacggacaaggagaactctatatga

SEQ ID NO: 27498 - DNA, 2160 bp, Methanosarcina mazei
atgaatactgaggaattctattactcattatgcgtgacaatctgttataaaaatggatatacagaactccttcgtcttgctgacatcatcataagcaaagaaaacagtgggaaaactggacgaaggttacttccctttgataatacctctgatctcccatatgtgaaaaaaatctcaatggacaaaaatcaggcaaatccaaacgaattatgcatatgggaatggtatccacagcaacaaaatccagataaacaacaatcctatcgttcacgttcacataagacattttatgaatttattttcctcaataatcttgaccttagtaatgggttaacaatcaaccctcttccagtctgggacttatttgacaccttgcttgatggattcatagttcctctccagtgctcaaagtcattccttttagtaatcaatcaaacggaaacagaatatatctgccttgatattgaagaatcatcctatagttgtgatggaaataaaattaagattcgtgaaaacactctcttaaaagagtataaaataccgaaattggatgttattgatacaaatgaatatgtccctaatcttggtgacttcaaatactccatcgagccggcatttcagcgtcgtattatatataaacgccgagatatctggatagacccaattgcaaccctacctctcaagcgcttcaacacgcaccttgctggatacttagaacaagttggaactcgtttaccctgtcgtactgaagacaaaactgttatcgaagccttcatcaaaagtgtaactgaagatgtaaaacctaattccgacttaatgacattctttgagaattactattcccaacccaaagaagattcactggttttaattcttgagaaatataacaagttggaattaatatttacttcttacctcaaacgaaaatcaactgatgagatattccttaagtttattgtagagcatctcccttcccttcgagaaaaatacatccaaatcctaactgaaggctacctcgatgaagaaaaacaaaaaatattggatcagttagctcctcttcaaatgcagatagaaaaactaaataacgatatcaatgaaaaaaatgccctgaaagaggaattagatgcaaaaataacttcattaacaaactctttgatggaactaatcgttcaaatcaaggaaagtgagcgatataggcaggagttagatgagttactgaacggtaacaggactggactattgcaggaactcataaacctgaaaaaggtacttcaattaagtgagactacttatgagacctctccacaaaacacaaatgcatcagttctgacactccgatatgggtatagtctggaatatgaggaagcaacagaaattaccgatctttcttgtatgtattctctccttcaagataatctcccagaacaaggtgtaaatacgcctgatttgtcagatctatcgaaatttatctctgccttatacctatgtcattttcctcttctctgtgttggaacctccgcgtgtgatgtggctcgtattatctcaatatccctcaataaccagttacctgacacaatctgtgtcccaacaggatataatgactactcttctcttctcagtaccatcaaaagtctgaagagtgacattgttattttggagaatgtagttggttattgtgatgaatactgctatactcatctagctgaagacattcctgaaaaatacattatcttccttgttgaatatgaggaaactctcaaacttttgcctaaaggcatctatgcccatatgggattaataaattgtgacgaattgtttattgcccagttaatgaatgaagaaagcccataccctggaaaaataacttgttctatctccttatcacctaatattgctaccagaagggaactctttagtaagatctcaaagttaacgcgtcattctccagtatcaactggatatattaattcaagagtaaaagtcctgcagacgattacacatgaagataatattgctgaagtacttaagacgatctatacagaacttaaatctatcatcgggatttacggtctttccgaagagtatagagatgaacttctatccagtccagatccaattgtaaaaaacttcaaaatggtactgggggtggaaacagaatga

SEQ ID NO: 27499 - DNA, 1044 bp, Methanosarcina mazei
atgagcaacacccccctctatataagaatggcaactgatatggaaattgcccttccatttgatgaacatataaataccactaaatcaagaatcatctattctgcaattggtgagtggataaaagcatcagcctacgatactgatatcaaagaagatgactgcgaagttacagatgagattagagcgaccaagaaccatatcacacgtaaatgtgggaaaattttagcagcttatttagatctctatccagatataaaggactggtattatccaacacttgtcaatgagacatttaatcctgtcacagaaatacgaaaccgtcaacttgcagcaggagtacttgtatccggggtggagaattctcttcagtttccacaagaaaaatgtacaaaaatagcagacaatctctacctttaccgtggagatacctttcacaaaagatcacaggtaattggtcttggaaactatatctacacacctgatcaggtacccataatctctattgaggacatgtacctaatcccttctatttctgcaaaggaatatgtggaacgatatgttcaaaaagtatggaataaatttatcaaaagtgagaatacgccggataccaggaaatactttgactatctctcaacccgtgcattctctgaatcttgggtttcatcatacccaaaaaatggaaaactcactgtctataaagataacgaactggattatggactcgctagaattgacatgggtgagttatacacacttgcttttccccaagcagttatcgaaacccaggatgtaagacgcttcatttatggaattcgaaaaattgagcaaaaccctgcacaagcaacaatcaaagatatgggttctatggttcagcttacccttccctcatatcttcctgattttgaacaaaatttcctctacatgctggcttggcccaaaaggaacattctggacagaatagagtatatttctgaaaaaatactcctgccagtaattaaaaagcttcttgaaaatcttaatattaaggtgaagaccaatgactga

SEQ ID NO: 27500 - DNA, 5328 bp, Methanosarcina mazei
atgactgatatttacggagttcagcacatacatgacaccttacttgaaaaacttaaggcttatattcgtgcccagtactttggtgaaaacaaccttcttttggacagaagtgaagagttactaaatcaacatcatattctatcacaagatccctttatcgaatcaaatacaccctatctcacttgtgaaaatgggctggaatcagcaaatctcccccagaatatccgcaaaattctcacagcactttctagagagaatattggagtctttgaaaatccctatacacaccaagtagaagcactcgaggcattctatcgtggtgacgatgtcttggtaactactggaaccggttcaggtaaaacggaatgtttcatgtggccattagttgccaaccttgtatatgaggcgcaaacctctccaaaaacatggaaaatgcacggggtacgcactctgctgctctacccaatgaatgctctcgtcgcggatcagattggaagattgcggaagatgattggagattctgaaaatagattctaccatcagttccagaaatttgctgcagaatcagcaatatctcgtcgtcctcaattcggaatgtacactggcaggactccctatccaggtcaggctgaaaaaaagaaggatcgagagcttgcagtggcactaagaaaagatatccttgaaaaaggagaggacttcatcagagaactccagtgtcttggaagatatccttcaaaaaaagatctcaatacttatgtatcttatcttgaaaagggggagcatctgacagatttggaagatgctgaattgattaccaggaaggagatgcagaatatttcccctgacattctggttaccaactacactatgcttcagtatatgttgattcgggacatcgaacaacccatctggaattctacaagggactggcttcatgcatcgcaagaaaacaaactgctcatcgttattgatgaggcacatatgtatcatggatctgctgggggagaggtttcacttctcatcagaagactgatgtatcgccttggaatcactcgagataaggtcaggttcatcttaacaagtgcaagcattcctactgattctgagaaaaagattgaatcactaaaaagattcctccgtgagatcactgcacttgacaatggcccagatttctccataattaccggaaaacaaaaagaaatctccacatatatctctcttgaaatatccccggaagcaatatcaaaactctcaattgatgcatttcaaggtgatactctccaaaaggtagaggcgatagctactttctgtcaaattcttggattgagtaatttgcaggaaaatactctggaggcttattctcactatctctatgagaaactaccgctctatgctccggtacagcgccttattgaccggacatcaggagatgctacagatattcacacacttgcaaaagttgtttttccaggtgtttcagatgatctttccctgagagcagtccaagtattacttgctgtactcccaattgccaaaaatattgaaggtcaggttctcttccctgcacgactccacatgctttttagaggacttgaggggttatacgcatgtgcaaatccagattgccctcataaaaatactggagacggaattactcttgggaagttatttactaatagcaagcaagaaacctgcgactgtggtggacaaatttatgaacttataaatgatcgaagatgtggagctttatttctgaaagcctatatggtgtatgaaacacagtcggaattaaatattgatctttggcaaactccgggagactcctttggtaagaatatgcgtgaagtccatctctacatcattccgacaacaggtatctatcaggaaaagaagaatggcccggaagaaggctggattaatccatacacgggtgttctacatcgagacccgtcttattccggaaaatcagagtatcttcatgtggcttactcaactcacgaagtccccaaaaaaccagggcagtttacgttcaaatcctgcccaaaatgtggaaaaacacttgataaaactgtattgtctgattttgcgacgaaaggaaatgagccattctataatatcgtctcatctcagttagaatctcagccacctatgatttttgacgagagaaaactcgaaagacaaccaaatgcaggaagaaaagtcctgctattttctgacagccgtcaaagagctgcaacattagcaaaagatatgaccagatcagctgacgatgaagcagcaagagctcttttagtcatcgctgcatcctatcttcaggattggagcaaaaaaacagggataaacccaaccttaaacatgctctatccagtttttctcgaaattacttataataatcacataatcctcttctatgggtcgaacaaagaggagttcaagcaagggtggaaaactgtcgctgacagtattaaaagggcaaagaggcgttcagggcctcttccttacaacaaactagaagcaaacttctccaataagccaggcttattctctgagcaacttctaaaaaatatatgttcaccttatcgatctctaaccgatttgggtctgtgctggcttgttccaagtgataaggaagatattgagagctgcttggatgatcttgatgaggaagacatcataatgacatatgatgaatttgaatgtctcttttcaacatgggcctcgcactactgtacctccgattacgcaataggagaaagcatcgatgatgaagttagacgaaatatcactcgttattcttttggacgtttcggtatagaacagaccaaacttggtaaaatgcctattcatattcagaagattctgaaaaacagcgggtattctgatgatcagattgaaaaaattcaacatattttactgaaaacctattttcagaaaggtcttggagaaaagggaactttttacctttcgcttaataaaattgctctcaaatttgatgataaacatgaatggtatcgttgctcaaaatgctccaaaatcttcccgttcgctccatggggtcactgtagtcattgtggggataaacacatagagatcattaggtcaaatgatcttgatcgttataaattctggagagaaccagttttaaaggttattgcagagggatccggaaaggaaattaaaacaataaacacagaagagcatactgctcagctctcttacaaagatcagcgtgacaatacctggtctactacagagaactatgagatgcgttttcagaatctcctgtctgaagaagaagagccaattgacgtattgagttgtactactacaatggaagtgggtattgatattggatcattaaccgccatcagtttaaggaatgtccctccacgaagagaaaactaccagcagagagcaggacgtgcaggaagaagaggcacttctctttctacaattgttacctatgctcaagacggcccgcatgatggatggtacttcaaccatccgcagactattatctctggggaggggcgtcttccatggattgatgctcacaatgaaaaactcatttgtagacaccttaatctcctcctcttaaatgaatatctcaataatttgaacacgaacttatatgactgtgatgttttggatttctttgaaaaactatatgatggtttttcggattatgccgcaagtttcgtattttcacatgacgccgaaagagttattgttcctccacagaaagagaatttggctacaactcagacatttgttgagaaacttattccgaaactaaaagaaatccaaaacgaagtactgcagaatagtgagcggtatatatccgatcataaaaatccacttcttgacctgctgagtaatgagggagtattgccaacttattccttcccgcaagatgttgttggattctacattgaggatcaaagaggtagtctttcacaaaagccagagcgtgcattaagcattgcggttagtgagtatgcaccaggtaaagttcttgttgttgataagaaaacctacaaagttggtggtatttataatccttcctctcttgcaacaagccgtgaaaatcctgcaatgagatatttcaatgacacaaagtattattcagagttgtatctgtgttcagacccatattgtgggtggacatctacacaacgtccgaaagatgatgtatgcccgttctgccatttccaactggcatcactcaagaaaatgctgaagccttggggttttgctccactaaatcatacaaatatccctgaagcatgggcagaggttgagtactcatatgctgaggagccttgctactttgcagagccaactcagcacgatatgaaggacattagttgtgcacatttgaaggttgcaaagcgccctgataagattactattatcaacaaaggtatccgtgggcaaggattctatgtttgcaaaaaatgtggtgctgctgaggtaattcagccaaaatcagagaatgaaaataaagataataagccatcaatcccattgaaaaatgtatttaggccatattctgcaaagggtcttccaatctgtcaacatttttcagaggaggtctatctaggacatacttttgcaacagatatgattgtgtttgagtttgagcttgatcctactcttattaacataacatatgaaggactctggataaaaagtgctgcggtcacattaactgaagcatttttgcttgctgctagcagaacattggatatcgagtttactgacttaaatggaggtcatcgtatccacagggcagatgataaagtatatgttgatatatatctgtatgatagtctctcaagtggcgccggatattcatctggtcttctggacatgactcatgatgttctttccgaaactcagaggttgcttcaggaatgtacgtgtgattcagcatgtcacgattgtctgaagcattattggaaccagagagttcaaaacactttgaatcgtcataatgccctttggctccttaactggggtattcatgggaatctgcccactgagttaaaattggacgaacaggtacatcttattggcccacttcaaaatcgacttaaattagaaggagatgatattcgtatcgtttgtgacacaaccggaatactaatagaatcactatttaaaacacaaaaactagtggtttatccggcaattcgtaatcaaaaaagaatagaactagatgttatgtacgtatctgatcttgaattgagaaaggctctacctaccgtttttgcagagattaaatcatatatgaataaggttcctctatatcagcgcttaaaataa

SEQ ID NO: 27501 - DNA, 1989 bp, Microbacterium maritypicum MF109
atgaccgcagcagatgattcgacgttcctcaacatctcgctcccaaccggcacgccgaaagcagagcgtgttgccttcctccgtctctgtacagcactggcgaccgcgagtctcgatcctgctgacgccattgaccgcaacttgtggttcgccgaggctggtttgggagacctgtacaacaagccgaccttggcggcagccgccaacaccctcatcgaccttgtagagcaaggctggactctctcaaccgcgtacaagcatggcccactcctcgctccgccgccctcgaacgcggatccggtggttgagaaggcccgagttcgtcgccaggagcaccttcgccgcgatcctcagctcagaaaagccagcgtccgtcgcttcgttgagggcatggagaagccccgcgagttcaagggcaaactggtcactgtcttcaacttgatgcgtgacggtcgtgaactcgcggactcattaacgacggcaccggaccccggttcggtgatccgcccctacatccagatcgtcgatggaagtaggtgtgagcgcaccggctatcttctgcacgatatctggcggtacttccggcacacgtggtcgaacgcctactccacggtgcccgggcgctctatgccaatcttgatacgcgatgcggccacgccacaccatgcggtcatcgggttggcagcgatctccagcccggtcgttcaaatcgctgagcgcgacgaatggatcggctggggcaccgacacgttccttgaagaggttcgtaaggctccttctgatgagatcgccgcgtggctcgctggcagaatcgacgcgcagcttggggagatctaccttgaggatcttctagccgacaacgttcttcagccgaccgatctgcatcacccgaccaacgaggcgatcgccatgctccgggctgatgccgagcgtcaccgccagaaacaccatcggactccactcagtgaagtgcggcagatagaacaggatccctgggtccagcgggccacctcccacctgttccgcagtaagcgtgcagcaatgctggctgacacgcttgaggcctcccgtaccctccggccattcttctcgccgaagccggcagcagatggcctctgccaagcgctgagtgacaccaaagcgaaagtgcaactccgccgcttgattcgccgagcacgtggcgaacgagtcggcactgtgattgccgacctaaccgtctgcggcgctgtcgctccatacaacgctctggccgcaggcaagttggtcggcgccctggccgtatcccccaaggtcatcgctgcctatcgcgccaaatactcccggccgagcgacatcgcttcttcgatggccggtcggccgatcgaacgcgagtcgcgactctccttcatcagcaccacctcgctatatggcagcggctccagccagtacaaccggctccgttggccggccgccgtaatggggggaccgaacgataaatggatcagcttcaccgaactcggccgatcccgctccttcggaacgtcgcacttcactgacgagacggtcgatgcgttggttcggttgtcccgagtcaagggcgcggtcgtccgggtcaacagcgtgttcggcgaaggtgtcagcccgcgtctacgaaaggtacgtctcggcttggctgcccttgggtggccgagtagcgagttgctgaagcatggccgggaacggatcgtctatggcatcaagctggttgagaacctccgtgattactcgctcgggattgatcctgctcctgagtaccttttggatccggagcaagcggatgagacatccgttggcgtttggtggttcgaacggtgggggcagcgacgggcagtccagcctgctgtgcttgagagcatgcgtcgccaccggctagttcgcccgatcagccacggagctcgcgtccccttgccgaccgatgagaccgacaccactcccacggaatcgatgttcttctccgccgacagttcctaa

SEQ ID NO: 27502 - DNA, 1089 bp, Microbacterium maritypicum MF109
atgggtatcgccacacgcaccgtagacgaggtcgccatgatctcggtccgagccttaggcctggacgaggagtgcttcggcctggactacccggaggcggttgccgcttcggtgcgacgtgccgcatccttcctatgcccgacgacgccgcgagccttgacggatgccgtgctcgaggcgttgactccggtgctgccagagccgccaacccgcgatgaccttatggccttgatcgatcaattagtctcaggaggcgacctgctggagatggccgatgccacttcagatcgcaagattcgcctgctgtaccttgggccaccaagctttgtgccgaagtcagctaaccgctttctcctgacaggcattcgcccgcacggagcagcgctggttccggccgatgttgccgtcaaggcggaggctcacattcgggcggttttgctcgacggcgatgacgcggaaggcagacttcgggcggccgggctgcacaagatcagtgttcaacactggatcggccagcccgcaatcgtggcggcccaagacttcatcgaccagttccggcagcgcctcgccaactcaccggcagctgggttcgtcgacgggctgaccatcatcaaccccggatctcggccgacctactacaagggacgctggcgcgcgccggcatcaggagacaacggcgactacgtcgggcggcgcccgcaggcgtacggcgccgaccgttggtgcgttgttcggctggtcgacggggcaccggagaagttgctcgacctaccactagacaacgctgtgtctcctgcgcgtgatgacgcctggcgcttgcaggcggccatcgacgcggcccgccacacgccgcttggctatcgggtccagccgattccaggcacgacgccgattaccgagtacatcgtcgacttcttctcgccgctgcccagttgggtagagcggtaccttgaactggccggaatctccgtggataggtcccgcggcgccttgttctcgtaccggattccggcatctgcactcgcagaactccagtcagtggtgaccgggactctgtggatgacgactacccagggggacaaccagtga

SEQ ID NO: 27503 - DNA, 5574 bp, Microbacterium maritypicum MF109
gtgactgcagaagcaccaaccatcgccgagacgatcaccaagattcagtccgctcttcgcgattacatcgaagcgacctatcacatcggccatccgacgctcatcgagcagcgccgcgagattctcgaccaggaaggcgtcatctctcaagcgccgtttatcgagagcacacctcgctaccagaccggccgccgcttctcagacttggagctcgatccgtccgcccagaaactcttcgcgtcgatagccagcaacgtaggcggatcgcgactgctctacgacccgccctatacacatcaggccaaagcactcgaatggactatgcgagatggtctgagcctggcggtgaccactggcactggttcgggcaagaccgagtccttccttttgccaatgctggcgaagctggctcgggaggcggccaacagcccgcaatcctttgcacgtccagcagtcagggcattggtcctctatccgatgaatgcgctggtcaacgaccaactgggtcgtctcaggctgctgctgggcgacaatcgggtcaccaaccagttccagtcgtgggcaggacgcccggctcgcttcgcccgctacaccagccgcacgctctacccgggggtccgcaagacggagcgcgaccagacacgcctcaagtcagtcgaggacttctacatcgacctgctggaccgtcaggacgatccaaatgctcgtcaccatgaagctgcgtccaagctggttggtcaattgagacagcgcggcaagtggcctgccaagcccgatctccgcacttggtacgggaccaagggaagccgatggaagaacagctctggtgaattcgtccgggcgatcgtgcagcccgacgattcggagctgctcacgcggcatgaggttctcgcggccccgccggacgtcctgatcaccaactattcgatgctcgaatacatgctgatgcgtccgctggaacgaccggtgtttgacgccacccgcgcgtggttggcggacaacccgaacgagaagttcctgctgatcgtcgacgaggcacacctctaccgcggtgccgctggcgctgaggttgctctactcctgcgtcggcttcgagcccggctgggcgttccagccgacagactccaggtcattgccacaagcgcgagcttcaacgatcaggcctacgccagtgccttcgccgcgcagctttctggcaaagatcccgcggagttccggaccgtcaccggagaactgaacctgcgatcgactgcggcaccggggacgatgagcgacgcgagcctcctggcaggactaccgctcgacgacttctacgacggcaatactgaccccgaaagggttgcggccgtgcaggagttgctagacgcccgctgcatctcggccagcccggacgacggggtcggtgttctgctgcaccgggcgttgtcggactacgagccgatgggtctgctggtcaacgaaactatgcaggaagcccagcccgtcggtgagctcggcggcaagatcttcccggatgccgatcgcgagaccgcagatcgagccgtcacggcgctggtagcactcggcagtgtagccagacttagcgccgatgatgctggtctgctgccctgtcgcgttcacgccttttatcgagggttgcccggcctgtgggcgtgcgctgatgccgactgcactgctgtcgaccgcgacaccgcgggaccggtcgggaaactctacggacagccgcgggagacgtgtgagtgcggggcgcgggtgttcgagctctacacctgcaggcactgtgggtcggcctacctgcgtgcctacacagacgacccggccagcccgaagtcgctttggcatgaaccaggcaatagcttccagaccgccacaggtctggtaccgcagctgcaaccgctcgatcttttggtcgaagaacccgaccccgatcaagctgccgagatcgccgatctggatctcatcactgggcggctcaacccggtcaagctcgggtcacgcactcgaagcgtctatctgccgggcaagcggaacggcgaggtggtcgataccgacgatgacgacgaggacgacggagatagcaagaccactggcagcggagaattcaagccatgcggagtttgtcgcaagctggctggattcgggcgttcctcggtccaggatcaccagacaaagggcgaccagcccttccaggccctgatcgcccggcagattgaggtccaacctccttccagcccctacagcgacttcgcaccacttcgcggacgcaaggtgctggcgttttcggactctcgccaggtggcggctcgacttgctccgaatttgcaaagctacgctttgcgggacgttatccgaccactggtcatccgcggttggggcgaaatcgccaggttgcccggcatggacaagcagatcggcctgcaccagttggtgctggcgactctggtcggtgccaagaagctcaaagtccggcttaggccggagcttcgccagggtgagtcgatggccgtcctacgggacgtcggtcgattgatcgatgccggagcgctgtcaggcgacattgcggcacagatggaactggtgtcgctggcggtatacccgcccgagtcgttaatgaaggcgatctactccacgctgatcgaccgctactacggcatagcagcgctgggtttggcgtcgcttcgcgagcgggagaccgacagggctgggctcttggcggatcttacgaatctgccaggcgttgccgacaccgatgagaaaaagctcgctctagtccgagtctggctggctcagtgggccacgccgagctacggcatctggtttccgaacatgacgatggactggcgggggaagaaagaaggcgtccgacctcacgcaggcaagttccggccgttcgagcgttggcttgactcgtcgatcctcgtcaggcagttcaacaaggagtggctgccggttcttcagcagcggttctgcgaggtggccggcggtaacaaacactacttgttggccggcaaagtcgcgctggagctcgaaggcgagtggggctactgcgaacgctgccgtttcacccagcggccgttcccaggatcgtccaagtgcgtcagctgtggtgatgaccaggtgcaagtcattgacccggacagcgatccggtgtttagcgcccgtaaaggctattaccgagccagcacggtgcgcgcgctgcgggataaccccgaaacgccaatgagcatcatcgcggccgagcacaccgcacagctgaacgcggcccagtccgaggccgtgttctccaaggcggaggagcacgagctgctgttccaggacattgacattgaattgccgaatgccggcgcccaggagcgggcagccatcgacgtactgtcctgcactacgacgatggaggtcggcatcgacatcggtgcgttgtccggggttgcccttcgcaacatgccaccgtcccgagcgaactaccaacagcgagctggtcgggccggacgccgcggcaatgccgtcgcaaccgtcgtggcattcggaagctccgatacacatgacgaccactacttccgcgagccggccgagatgatccggggcaaggtcgtcgacccggtcctaacgatggacaacgacgaaatcgccaaacggcatgtcatcgcatacctattgcagcgataccaccaggacaagctgcccaccttcgaccccgatactcagaagtcgcagctcttcgaagtgcttggcacagtgccggagtttgtgggcaccgcgtcgctgctcaaccgaaccgacctagaaaagtggctcaaccagaacgaggcgtcgctccgggcggatatcgacgattggttgccctcagagcttccgtccgcaagccgtcagcaggttctggatggcatcgtctcgaacacgttggttgcgatcgacagtgctcttgatctgacagatgcagggacgctgccccctccagaggccggcgactcgatgcccgaagctgaggaagcggaagccgaaggcccggcagaggacggagccgaggagcccagtccgatgcgaagccagaccaatctgctagaccgactgctttacaagggcgtgctgccgagatacgccttcccgaccgatgtagcaacctttcacgttttcgacgttgaccgctccgaacccttccgagttgcctaccgctacgcgcctagccagggacttcccgtcgccctcagccagtacgcccccggcaaggacgtgtggattgacaacaaagagtggcactccggggcgatctactcgccggtcaaagcggagcggtacaaggcatggcaagagcacaagctctacttcgaatgccgagtctgccactacgccaagtattacgaccaggaggaagcgcaccctggtgagatccgcgagtgcgaagcctgcggcaccgaaggttcgtttggagaggcgatggcctggatgcgtccgccaggattcgcgcacccggccgacgagaccgagggaactagccctgatgacgccccggcccgtagctatgccactcgcgccaagctggtcgctccaggaccagatgacgagtcggcttgggatgaggtgaccgaccgaatccgacagacctatcaccgcgagacattgatcgtcaccaacaccggtcccggcaacgagggctacacctactgcttcaagtgcggcaagatcgagccgaccgctctccccacaggaacggtagtggggcagcacaagaagccattcccagacccgaacgagcaggactgttctgggaactcggcgtggcggggtctggcactggggacggacttcattactgatgttctactggtccggctaaaggtggcttcgccagttcgtttggctccgcagttcttgtcgacacaggtggcgcttcgcactatcgccgaggctatgaccatcgccgcgactcaactgctcgacatcgaggcgaccgagctccaggcggagttccgtccggctctcacgccaggcggagctgctgggctggaggctgagatctacctctacgacactttggctggtggcgcgggattcacccgtcgcgtcgaggaactaggcattcaggttctggaggagaccctcaagcgcttggagaactgccctgccgcttgcgaccagtcctgttatcgatgcatccgcagcttccgcaaccgcttcgagcatggactcctagaccgcaaggttggggcaggtctgctgcggtacctcctgtatggcaccgccccgacgctcgacgaatcgcgactggagttgtcaatcggacggctctacggcgacctcaagggacgcggcatttcaggggtcgagttcgagcgggacgtcgaggtcagtatccccggcattggcacagtgaccgcgccgattctggcgacgaagggcgaccggaggttcatcttcggagtgcacagcccgctgacgccgcatttagcttccgatgacttgctaaacgatgctaaggagaaccaggcggttattccggtccgactggtcgatgacatcgagatctcacggagcttgccaaatgccagccttgccgttgagaagattctgctttga

SEQ ID NO: 27504 - DNA, 1986 bp, Microbacterium sp. No. 7
gtgactgacgaagacgagacgaaatacgtcaacatctccctcccggccggaacatcacggaccgaacgcgagggattcctccgcctctgcaaggtgctctccaccgcgcccctcgatccccggcggcgcgtggtccgagagcgcgtgttcgcggaggcagagatcactgatctctacaatcgccccacgctcggcgcggccgcgcacaccctcatcgacctcgccgaacaagggtggacactcaagctgtaccggcacggcccactgctcatgccccctccatcgcaccccgatcccgagacggagaaggcccgcatccggcggcaggagcaccttcgacgtgacccccagctccgccaaccgagcgtgcgccgattcatcgaacgcatggagaagcctcgcgagcatgccggcgggctggtgtcgatcttcaacttgatgcgtgatggtcgagagcttgccgacgcgctagagaccgcggataacccgagcgccgtgatccagccgtacgtgcaggtcgtcgacagcgggaaatgcgagcacaccggactcgccctccacgacatctggcggtacttccgccacacctggtcgaacgcgtatttcaccgtgccgggacggtccatgccgatcctggtccgcgacgccgccaccgcgcaccatgcggtcatcggactcgccgccatctccagccccgtcgttcagatcgccgaacgcgaccagtggatgggatgggacaccgacaccttcctcgaatcgatccgcgagacgccgacacagaaggtggcgcaatggctgtccgcgcgcatcgacacacaactccacgagatttatgtcgaggacctgctcaatgacgacgtcctccagcccacggcactgcagcagcccaccctcgacgcggtcgcgctcctacgcgccgacgccgagcgacaccggcagaagcaccaccgcacaccattgcgggaggttcggcaaatcgaacgagacgactgggctgaacgggcccgaactccgctgttccgcagcaaacgggcaacggcactcgcggacacgcttgagactgctctcgtcctgaatccctatctgcagcccacgccgaccgccgagggtctcgctgcggcgttgaaggacagtaaggcgaggacgcaggtacgtcggcttgtgcgtcgcgcgcgcggcgaaagggtcgggacggtcatcgcggacctgacggtgtgcggggcggtggcgccgtacaacgctctggctgccggcaaactcgtcggtgcgctagccgtctccccgaaagtgatatccgcctaccgcaccaagtacgcgcggcccagtgagatcgcgtccgcgatggccggacgaggcatcgaacgcgagtcgcgcctcgcctttatcagcaccacctcgctctacggaagcggatccagtcagtacaaccggctgcggtggccggctgaggttatgggtggaccgagcgaccagcagatcagcttccatcaactcggacgctcccggtccttcggcacgtcgcagttcacggacgacaccgtcgacgcgctcgtcagactgtcccgactgcaaggcgcgaccgtccgggtgaacagcctgtttggtgagggcgtcagcccgcggttgcggaaggttcggctcggtcttgctgcgctcggatggtcaagcaacgaactactcaagcacggccgcgaaagaatcgtgtacggggtgcggttagtagagaatctccgcgactactcgctcggcatcgacccggaccctagttatctcgtggatcccgagcaggttgaaggggaagccgcggtcgctcagtggtggttcgaacgctgggggcatcgccgtgcccggcaagccgctgtcgccgagtcgatgcgcacccaccggttggtgcgccccctccggcacggggcacgcgtgtcacttcccgacgtcgaggatgcgccgtccgagcagactccgccggcgaccgcccagcaggcttga

SEQ ID NO: 27505 - DNA, 1092 bp, Microbacterium sp. No. 7
atgcagatcagccagctcacggccgagacggccgccgtcgcggcgatacgaactctcggcctggaccccgacatcatcgacctcacctcgttcgaggcgctggccgccgcgctgcgtcgggccgcgtcgttcctgtgcccgacgagtccgggacgactcgccgatgccgtgtacggcgccgtgcagcccctcgccggtgccggtgcggtcacccggtcgggcatcggggagatcctggatgaactggtcgcttccggggacctgctggaacttcgccgtgacaacggccagtcggcgcggctgctgtacttggcgccgccgtcgttcatcgaacgacacccgggccgctacctgctcaccggcatacgaccgttcggtgtgccgttgatcctggacgatctcgcccagacgatcaactatgaaggcccgacacggtcgatcagcctcgatgcggaggacgggccgacgcaactccgcgaccggggactgcgttgcgttgctagagaacgttggctagcccgaccggccatcgaaactccgaccgcatttctcgatcactttcgggtgcgcctcgacaccgccgccctcgccggccacctcaaggacatccagatcctcgacccggcatcctcagtccggtactacgcgggccgttggcggccgccggcggcctccgacaccggagacttcatcgcccgccggccgcaggcttacggcgccgacttatggtgtctggctcggtgtgagcgcggcgtgccgtcgcgtctgctggagtggccggtcgataacccggtcctgcccggtcgcgacgaggcatggcgctatcaggcggccgtcgacgctgcccgtggcgtgccgcaacgattccggcgccgcgcgggcgacgtagccggcggtgacgtcgtcttcgacttcttctcgccgctgccgggtttcgcggaacgttacctgcagtttgtcgggctgccgctcgggaagacgaggggtgcgctgttctcgttccgtgtgcccgccgctgcggccgacggcgtcggaacctttctgattgacatgttgtggatgacacaagaggaggcaccacatggcgtctga

SEQ ID NO: 27506 - DNA, 5577 bp, Microbacterium sp. No. 7
atggcgtctgacgctcccacgattgccgagacgatcgacgatatccagtcggctctacgtgagtacatcgaggccacctaccacgtcggtcaccccacgatcatcgagcagcgccgccaattgctgctgactgagggggttctgttcaaagctcccttcatcgagagcaccccgcggtatcagacgaaccgcacgttcgcggagctcgacgtcgacggcgccgtccacgacctgttcactccgctcactcagaaggtcggcgcactcgaccgattgctgcacgatccgccctacacccatcaggcagaagccatcgagtgggcggcccgcgacggcaacagcctcgccatcacgaccggcaccggctctgggaagactgagtcgttcctgctgccgatgctcgccaagctggccaccgaagccaagcaccgaccgggctcgttcgctgcccccgccgtgcgcgcgctgatcctctacccgatgaacgcgctggtcaacgaccagttggggcgtctgcggctgctgctgggcgacccgcggctgacgacgcagttccatgcctgggcggggcgccccgcccgttttgcccgctacaccagccgcaccctgtacccgggtgtgcggacggtgaagaaggaccagaagcggctcggatcgatcgaggacttctacctgctgctgatcgacaaagctgccgatccgaaagcgcccgggcacgcacaggcgaagaagctcaaggagaagctggaggcgcggggcaagtggcccgcgaaacccgacctgaaggcatggttcgggcccaagggctcgaagtggaaggacgcgaagagcgggcggttcgtgcgggccgtgatggggccggatgacccggaactcctcacccgccacgaggtcctcgccgcacccccggacgtgctcatcaccaactactcgatgctcgagtacatgctgatgaggccgctcgagcggccggtgttcgaccacacccggcagtggctggcggacaacccggaggagaagttcctactgatcgtcgacgaggcgcacctgtaccggggagccgcgggcgccgaggtcgcactgctgctgcgccggttgcgatcccggctggggatcacaccggatcgtgtccaggtgatcacaacgagcgcgagcttcagcacccccgagtatgctcgcgcgttcgccgcgcaactgaccggtaaggacgaagccgactttcggacggtcaccagcaaaccggcgttgcgatccaatgccgcacagggcaccgcggctgcggcgacgctgctcgccggccttccgctcacggacttctacaacgccgagacggaaccggcacgcatggtcgcggtcgccgacctgcttaccgaccgcggtgtggacgaccgggaccgtcccgtcgcggcgttgctgcacgacgccctgaccggctacgagccgatgaacctgctcatcaacgagacgatgcagaaggcgcaaccgttgcatgagcttggcaccgcggtgttccccggagttgccaccgaggtggcggacaaggcggttaccgccctcgtcgcgctgggcagcgccgcacgccctgcccccgaggaagcgggcctgctgccttgccgggtgcatgcgttcttccgagggcttcccggactgtgggcatgtatcgatcctgagtgcggagccgtagaccgtgacgatctgccgccgggcgtcggaccgatcggcaagctgtacccgcaaccgcaggccacctgcgactgcggggcgcgggtgttcgagttctacacttgccgtcactgcggttcggcctacgcgcgcggctacaccgatgatctgcagcatccgacgttcttgtggcatgagagcggcggcgcattccagaccaccgccggcgcggtccccgaactgtttcccctcgatctgttgctggaagaaccgcaggccggggaggttcaggtcgccgagatcgacctggtgaccggccggctcgatccggacaagccgccggtccgcggccgcgtcgtttttctcccgaagctgcgcagcggtgagaaggtgaccagcgacgacgatggcgatgacggcgacgaccacgccgaagcggacggcgaattcaaaccgtgcggtgtctgcggacagttggcgggtttcttcggccgctcctctgtgcaggaccaccagaccaagggcgaccagccgttccaggcactggtaacccgacagatcgaggtgcagccgcccagcgccccgtactccacgttcgcgccgctgcgcggccgcaaggtgttggcgttctccgactcgcgacaggtcgccgcacgtctggcgcccaacctgcaggcgtattcgatgcgagacgtgatccggccgctgatcctgaaggggtgggaagaactgtccgcccagccgggcattggcaagcatctgagcctggagcgtctgtacttggcggtgatggtgggagccaagcaactcgaggtgcggctgcgtccggaactgcgggaagcagagtccctgcacgttctaaaagcggtcggcaaggcgctcgacaacggggcgttgacgggcaacgaggaggcgcgcggggaactgctgatgctcacctccccgcccccgcaggccctgttgcgcgcgatctacctggccctgacggacaagcactacggactggtgtctctgggactcgcgtcgatccgggagaaggccagcctgcgggacgatctcctcgcggacctgccagccatcgatggtgtcgccacgaccgacgagcagcgcctcgccctggtccggctgtggctcgcgcagtgggcgacgcccacacgcggcatctggttcccgacgatgacctcggagtggtggcggcagaagggcggcgtgaagccccacaccggcagattccaggccgtcgaccgctggctgggaacgctggcggcgaagaagaagttcaaggaggagtggcttccggtgctgcttcccgcgttctgcgagttggagggcgcgaagtatcggctgctcgccggcacggtcgcactggagtcgggcgggttgtggggatactgcgagcggtgccggttcacccagcggcccttcccgggagcaacccgttgcgtcaactgcaaccagaaccaggtgcgcaccctcgaccccacgaccgacgaggtcttccaggcgcgcaagggctactaccggcagagcgccgaacgtgccctgcagtctccccacagacccatcctcagcatcatcgccgcggagcacaccgcccaattgaatgcggcccaatccgacgcggtcttctcacgtgccgaggagtacgaactgctgttccaggacatcgatgtcggactgccccgaccgggggaacaggaacgcgccgcgatcgacgtgctctcatgcaccaccacgatggaggtcggcatcgacatcggcagcctgtcgggtgtcgccctgcgcaacatgccgccatcgcgtgccaactaccaacaacgggcgggacgggcgggtcgtcgcggcaacgcggttgccacggtcgtcgcattcggcagcgccgacacgcacgacgaccactacttccgcaacccgcacctgatgatccgcggcgacgtggacgacccggtgctgacgttggacaacgacgagatcgcccggcgtcatgtcatcgcctacctgctgcagcggtacaaccaggacaggttgcccgagatcgacccggaggatcagccgcaactgttcgaagtgctcggcaccgtccgcgggttcgtgggcaccacgtcaccgttgaaccgcaccgacttcgaagggtggctgaccgagcatgagaccgtgctgagagacgacatcgcgtcgtggctgccggcggagctgaccgcgacggaccgatcgcgtctcctcgacggcctgatcacagcgaccctcgacgcgatcgatgacgcgctcgacctgcaagccgatgggaagctgcccgaaccggaagatggcgacgccgccccacaagaggtcgtggtcgaggacggcgatgccggcgaggacggcgccgaggtgcccaccgagcagcgcagccagtcgaatctgctcgatcgcctcctctacaagggggtgctgccgaggtacgcgttcccgaccgatgtggtggcgttccacgtcttcgaccgtgccaagtcggaacggttccacaccgagttccggtatgcgccgagccagggcctgccggtcgcgttgacccagtacgcacccggcaaggtcgtgtggatcgacaacaaggaatggacctccggcgccatttacgcgccgatgcacaaagaacgagctcaagcgtggcgcgacaagatgctctacttcgaatgccaggtgtgccactacgccaagcacgtcccggcagaccaagcccagcgcggcgaggagcgtgactgcgacgcgtgcggcgcgcccggcaagttcggcaaggcgatgaactggatgcgaccgcccgggttcgctcaccgcgctaatgacgatcccggcaccagcccggacgacgcaccggcgaacagttacgccacgcgcgccaaacttgtcgctgagggcccggagcgcgaagaagcctgggatcacgtcacaccccgcctcgagcagacctaccggcgggacacactgctggtcaccaacaccggtccgcgtggcgagggatacacatactgcacgaaatgcggcctgatcgaaccgacgcatggtgccacgggcatcgtcgccgggccccacaccaagccgttccccgacgagcgcgagcaagagtgtcaaggatcaggctcgacgaagggtctcgtgctgggtaccgacttcatctccgatgtgctgctcgtgcggttgcgcgtcgagaagccactcaccctgcgcccggagctactgtccacacaggtggcgcttcggaccgtcgcggaagcgctcacgattgccgcgacaggtgaactcgacgtggacgcgagcgagttgcaggccgagtaccgccccgcgctgacaccgggcggtaaccacgggcaggaggcggagatctacctgtacgacacgctcgccggcggtgccgggttcacacggcgggtgcacgggtacggggaatcgatcttccggaaggcgctggaccgcctggaacactgcccggccgactgtgacgcgtcctgctaccggtgcctgcgcagcttccgcaaccggttcgagcacagcctgctcgaccgtcagatcggtgccgccctgttgcggtatgtcctggacggcaccagcccggtgctgaacgaggtccggatgagccagtcgatcgacaagctcctcgccgacctgcagagccgtgacatcgcgggcatcgagttcctgaagaacgaaccggcgctcatcccggggatcgggtcggtcacggccccgattctcgctcgcggcaacggcggtgaccgcatcttctacatccagagtccgctgacccgggacaccccgcccacgcaggaactctgggacgcaaaagaactcggtggtgtaccgatccacccgatcgacgacatcgtcgtcacccgaaacctgcccgtcgcgagccagcaggtgctgcggtggctgagctga

SEQ ID NO: 27507 - DNA, 1986 bp, Microbacterium sp. TS-1
gtgactgacgaagacgagacggagtacgtcaacatctccctcccggccggaacatcacggactgaacgcgagggattcctccgtctctgcaaggttctctccaccgcgcccctcgatccccggcggcgcgtggtccgagagcgcgtgttcgcggaggcagagatcgctgatctctacaatcgccccacgctcggcgcggccgcgcacaccctcatcgacctcgccgaacaagggtggacactcaagctgtacaggcacggcccactgctcatgccccctccatcgcaccccgatcccgagacggagaaggcccgcatccggcggcaggagcaccttcgacgtgacccccagctccgccaaccgagcgtgcgccgattcatcgaacgcatggagaagcctcgcgagcatgcgggcgggctggtgtcgatcgtcaacttgatgcgtgatggtcgagagcttgccgacgcactagagagcgcggataacccgagcgccgtgatccagccatacgtgcagatcgtcgacagcgggaaatgcgagcacaccggactcgccctccacgacatctggcggtacttccggcacacctggtcgaacgcgtatttcaccgtgccgggacggtccatgccgatcctggtccgcgacgccgccaccccgcaccatgcggtcgtcggactcgccgccatctccagccccgtcgttcagatcgccgaacgcgaccagtggatgggatgggacaccgacaccttcctcgaatcgatccgcgagacgccgacacggaaggtggcgcaatggctgtccgcgcgcatcgacgcacaactccacgagatctatgtcgaggacctgctcaatgacgacgtcctccagcccgcggcactgcagcagcccaccctcgaggcggtcgcgctcctacgcgccgacgccgagcgacaccggcagaagcaccaccgcacaccattgcgggaggttcggcaaatcgaacgagacgactgggctcaacgggcccgaactcccctgttccgcagcaagcgggcaacggcactcgcggacacgctcgagactgctctcgtcctgaatccctatctgcagcccacgccgaccgccgagggtctcgctgcggcgttgaaggacagtaaggcgaggacgcaggtacgtcggcttgtgcgtcgcgcgcgcggcgaaagggtggggacggtcatcgcggacttgacggtgtgcggggcggtggcaccgtacaacgccctggctgccggcaagctcgtcggcgcgctagctgtctccccgaaagtgatatccgcctaccgcgccaagtacgcgcggcccagtgagatcgcgtccgcgatggccggacgaggcatcgaacgcgagtcgcgtctctccttcatcagcactacctcgctatacggaagcggatccagtcaatacaaccggctgcggtggccggcggaggtcatgggtggatcgggcgaccagcagatcagcttccatcaactcggacgctctcggtctttcggtacgtcgcagttcacggacgacaccgtcgacgcgctcgtccgtctgtcccgattgaagggcgcgaccgtccgtgtcaacagcctgttcggtgagggcgtcagcccgcgactccggaaggttcggctcggccttgccgcgctcgggtggtcaagcaacgaactgctcaagcacggccgagaaagaatcgtgtacggggtgaagctcgtggagaatctccgcgactactcgctcggcatcgacccggaccctcgttatctcgtcgatcccgagcaggtcgacggggaagccgcggtcgctcagtggtggtttgaacgttgggggcatcgccgtgcccgtcaagccactgtcgccgagtcggtgcgcacccaccggttggtgcgccccctccggcacggggcacgcgtgtcacttcccgacgtcgaggatgtgccgtccgagcagactccgccggcgaccgcccagcaggcttga

SEQ ID NO: 27508 - DNA, 1092 bp, Microbacterium sp. TS-1
atgcagatcagccagctcacggccgagacggccgccgtcgcggcgatacgaactctcggcctggactccgacatcattgacctcacctcgttcgaggcgctggccgccgcgctgcgccgggctgcgtcgttcctgtgcccgacgagtccgggacgactcgccgatgccgtgtacggcgccgtgcagcccctcgccggtgccggtgcggtcacccggtcgggcatcggggagatcctggatgaactggtcgcttccggggacttgctggaacttcgccgtgacaacggccagtcggcgcggctgctgtacttggcgccgccgtcgttcatcgaacgacacccgggccgctacctgctcaccggcattcgaccgttcggtgtgccgttgatactggacgatctcgcccagacgatcgactatgaaggcccgacacggtcgatcagcctcgatgcggaggacgggccgacgcaactccgcgaccgggggctgcgttgcgttgctagagaacgttggctcgcccgaccggccatcgaaactccgaccgcatttctcgatcactttcgggcgcgcctcgataccgccgccctggccggccacctcgaggacatccagatcctcgacccggcatcctcggtccggtactatgcgggccgttggcggccgccggcggcctccgacaccggagacttcatcgcccgccggccgcaggcttatggcgccgacttgtggtgtctggctcggtgtgagcgcggcgtgccgtcgcgtctgctggagtggccggtcgataacccggtcctgcccggtcgcgacgaggcatggcgctaccaggcggccgtcgacgctgcccgtggcgtgccgcaacgattccggcgccgcgcgggcgacgtagccggcggtgacgtcgtcttcgacttcttctcgccgctgccgggtttcgcggaacgttacctgcagttcgtcgggctgccgctcgggaagacgacgggtgcgctgttctcgttccgtgtgcccgccgctgcggccgacggcgtcgaaacctttctgattgacatgttgtggatgacacaagaggaggcaccacatggcgtctga

SEQ ID NO: 27509 - DNA, 5577 bp, Microbacterium sp. TS-1
atggcgtctgacgctcccacgatcgccgagacgatcgacgatatccagtcggctctacgtgagtacatcgaggccacctaccacgtcggtcaccccacgatcatcgagcagcgccgccaattgctgctgactgagggggttctgttcaaagctcccttcatcgagagcaccccgcggtatcagacgaaccgcacgttcgcggagctcgacgtcgacggcgccgtccacgacctgttcaccccgctcactcagaaggtcggcgcactcgaccgattgctgcacgatccgccctacacccatcaggcagaagccatcgagtgggcggcccgcgacggcaacagcctcgccatcacgaccggcaccggctccgggaagaccgagtcgttcctgctgccgatgctcgccaagctggccaccgaagccaagcaccggccggagtcgttcgctgcccccgccgtgcgcgcgctgatcctctacccgatgaacgcgctggtcaacgaccagttggggcgtctgcggttgctgctgggcgacccgcggctgacgacgcagttccatgcctgggcggggcgccccgcccgttttgcccgctacaccagccgcaccctgtacccgggtgtgcggacggcgaagaaggaccagaagcggctcggatcgatcgaggacttctacctgctgctgatcgacaaagctgccgatccgaaagcgcccgggcacgcacaggcgaagaagctcaaggagaagttggaggcgcggggcaagtggcccgcgaaacccgacctgaaggcatggttcggacccaagggctcgaagtggaaggacgcgaagagcgggcggttcgtgcgggccgtgatgggacgggatgacccggaactcctcacgcgccacgaggtcctcgccgcacccccggacgtgctcatcaccaactactcgatgctcgagtacatgctgatgaggccgctcgagcggccggtgttcgaccacacccggcagtggctggcggaaaacccggaggagaagttcctactgatcgtcgacgaggcgcacctgtaccggggagccgcgggcgccgaggtcgcactgttgctgcgccggttgcgatcccggctggggatcacaccggatcgtgtccaggtgatcacaacgagcgcgagtttcagcacccccgagtatgctcgcgcgtttgccgcgcaactgaccggaaaggacgaagccgacttccggacggtcaccagcaaaccggcgttgcgatccaatgccgcacagggcaccccggctgcggcgacgctgctcgcaggccttccgctcacagacttctacaacgcggagacggaaccggcacgcacggtcgcggtcgccgacctgcttatcgaccgcggtgtggacgatcgggaccgtcccgtcgcggcgttgctgtacgacgccctgaccggctacgagccgatgaacctgctcatcaacgagacgatgcagaaggcgcaaccgttgcatgagcttggcaccgcggtgttccccggagttgccaccgaggtggcggacaaggcggttaccgccctcgtcgcgctgggcagcgccgcacgctgtacccccgaggaagcgggcctgctgccttgccgggtgcatgcgttcttccgagggcttcccggactgtgggcatgtatcgaccccgagtgcggagccgtcgaccgtgacgatctgccggcgggcgtcggaccgatcggcaagctatacccgcaaccgcaggccacctgcgactgcggggcgcgggtgttcgagttctacacttgccgtcactgcggttcggcctacgcgcgcggctacaccgatgatctgcagcatccgacgttcttgtggcatgagagcggcggcgcgttccagaccaccgctggcgcggtccccgagctgtttcccctcgatctgttactggaagaaccgcaggctggggaggttcaggtcgccgagattgacctggtgaccggccggctcgatccggacaagccgccggtccgcggccgcgtcgtttttctcccgaagctgcgcagcggtgagaaggtgaccagcgacgacgatggcgatgacggcgacgaccacgccgaagcggacggcgaattcaaaccgtgcggtgtctgcggacagttggcgggtttcttcggccgctcctctgtgcaggaccaccagaccaagggtgaccagccgttccaggcactggtaacccgacagatcgaggtgcagccgcccagcgccccgtactccacgttcgcgccgctgcgcggccgcaaggtgttggcgttctccgactcgcgacaggtcgccgcacgtctggcgcccaacctgcaggcgtattcgatgcgagacgtgatccggccgctgatcctgaaggggtgggaagaactgtccgcccagccgggcattggcaagcatctgagcctggagcgtctgtacttggcggtaatggtgggagccaagcaacttgaggtgcggctgcgtccggaactgcgggaagcagagtccctgcacgttctgaaagcggtcggcaaggcactcgacaacggggcgttgacgggaaacgaggaggcgcgcggggaactgctgatgctcacctccccgcccccacaggccctgttgcgcgcgatctacctggccctgaccgacaaacactacggtctggtgtctctgggactcgcgtcgatccgggagaaggccagcctgcgggacgatctcctcgcggacctgccagccatcgatggtgtcgccacgaccgacgagcagcgcctcgccctggtccggctgtggctcgcgcagtgggcgacgcccacgcgcggcatctggttcccgacgatgacctcggagtggtggcggcagaagggcggcgtgaagccccacaccggcagattccaggccgtcgaccgctggctgggaacgccggcggcgaagaagaggttcaaggaggagtggcttccggtgctgcttcccgcgttctgcgagttggagggcgcgaagtatcggctgctcgccggcacggtcgcgctggagtcgggcgggttgtggggatactgcgagcggtgccggttcacccagcggcctttcccgggatcaacccgttgcgtcaactgcaaccagaaccaggtgcgaaccctcgaccccacgaccgacgaggtcttccaggcgcgcaagggctactacaggcagagcgccgaacgtgccctgcggtctccccacagacccatcctcagcatcatcgccgcggagcacaccgcccagttgaacgcggcccaatccgacgcggtcttctcacgtgccgaggagtacgaactgctgttccaggacatcgatgtcggactgccccggccgggggaacaggaacgcgccgcgatcgacgtgctctcgtgcaccaccacgatggaggtcggcatcgacatcggcagcctgtcgggtgtcgccctgcgcaacatgccgccatcgcgtgccaactaccaacaacgggcgggccgggcgggtcgtcgtggcaacgcggttgccacggtcgtcgcattcggcagcgccgacacgcacgacgaccactacttccgcaacccgcacctgatgatccgcggtgacgtggacgacccggtgctgacgttggacaacgacgagatcgcccggcgtcatgtcatcgcctacctgctgcagcggtacaaccaggacaggttgcccgagatcgacccggaggatcagccgcaactgttcgaagtgctcggcaccgtccgcgggttcgtgggcaccacgtcaccgttgaaccgcaccgacttcgaagggtggctgaccgagcatgagaccgtgctgagaaacgacatcgcgtcgtggctgccggcggagctgaccgcaacggaccgatcgcgtctcctcgacggcctggtcacagcgaccctcgacgcgatcgatgacgcgctcgacctgcaagccgatgggaagctgcctgaaccggaagatggcgacgccgcgccacaagaggtcgtggtcgaggacggcgatgccggcgaggacggcgccgaggtgcccaccgagcagcgcagccagtcgaatctgctcgatcgcctcctctacaagggggtgctgccgaggtacgcgttcccgaccgatgtggtggcgttccacgtcttcgaccgtgccaagtcggaacggttccacaccgagttccggtatgcgccgagccagggcctgccggtcgcgttgacccagtacgcacccggcaaggtggtgtggatcgacaacaaggaatggacctccggcgccatttacgcgccgatgcacaaagaacgagctcaagcgtggcgcgacaagatgctctacttcgaatgccaggtgtgccactacgccaagcacgtcccggcagaccaggcccagcgcggcgaggagcgtgactgcgacgcttgcggcgcgcccggcaagttcggcaaggcgatgaactggatgcgaccgcccggcttcgcccaccgcgctaatgacgatcccggcaccagcccggacgacgcaccggcgaacagttacgccacgcgcgccaaactggtcgctgagggcccggagcgcgaagaagcctgggatcacgtcacaccccgcctcgagcagacctaccggcgggacacactgctggtcaccaacaccggtccgcgcggcgagggatacacatactgcacgaaatgtggcctgatcgaaccgacgcatggtgccacgggcaccgtcgccggcccccacaccaagccgttccccgacgagcgcgagcaagagtgtcaaggatcaggctcgacgaagggtctcgtgctgggcaccgacttcatctccgatgtgctgctcgtgcggttgagcgtcgagaagccactcaccctgcgcccggagctgctgtccacacaggtggcgctgcggaccgtcgcggaagcgctcacgatcgccgcgacaggtgaactcgacgtggacgcgagcgagttgcaggccgagtaccgccccgcactgacaccgggcggtaaccacgggcaggaggcggagatctacctgtacgatacgctcgccggcggtgccgggttcacacggcgggtacacgggtacggggaatcgatctttcggaaggcgctggaccgcttggagcactgcccggccgactgcgacgcgtcctgctaccggtgcctgcgcagcttccgcaaccggttcgaacacagcctgctcgaccgtcagatcggtgccgccctgttgcggtatgtcctggacggcaccagcccggtgctgaacgaggcgcggatgaaccagtcgatcgacaagctcctcgccgacctgcagagccgtgacatcgtgggcatcgagttcctgaagaacgaaccggtgctcatcccgggaattgggtctgtcactgccccgatcctcgctcgcggcaatggcgctgatcgcatcttctacatccagagtccgctgacccgggacaccccgcccacgcaggaactctgggatgcgaaagaactgggtggtgtaccgatccacccgatcgacgacatcgtcgtcacccgaaacctgcccgtcgcgagccagcaggtgctgcggtggctcaactga

SEQ ID NO: 27510 - DNA, 1299 bp, Nitrosococcus watsonii C-113
atgtcggggctaacgtgccgtctgaatgcaaaaagtccagattctgagcagggggaaaaccgaaaaatgaaaaaaagcagcagagctgtcgttagcactactccacgggaagctaatctaaagagaaaactgcgagcgcatttgcaatccctcggattcaccaaatcagaagatggtgccttgcaagttccgggaaatgacaaaggcataatccgcacgttacaccgtgcacaaagagaagaacgactccgggcaaaccacgaatttatttccctcaagggcgaaaaactgatgcggttctttgcattaggcaaagaagttaatccggaaagaatatcgcctatccttgaacgcgtatcggccggaacgctgcatggcgacctgttccggctcgcatcactcacgtggtccgtccccgtctccaacggcttcggcagacgcctacgttaccttgtctgggacgaaaacaacagaaaactgatgggtcttatcgccatcggcgacccggtcttcaatctttccgtgcgggacaagctcatcggctggaatacgcacgacaggagcgcccgcctcgtcaatctaatggatgcctacgtactcggcgcacttcccccctataatgccctgctcggcgggaagctgatagcatgcctactgcgcagccgcgacctttatgacgacttcgcaaatgcttatggcagcacgaccggaataatctcccaggaagagaaaaaagcgcgcttgctggcaatcactacttcatcgtccatggggcggtcttcggtctacaatcgcctgaaactcgccggaattcagtacctcaagtctataggctacaccggcggatgggggcacttccatattcccgaccggctcttcgcggaactgcgtgactatctgcgcaacattgaccacacctacgcagaccagcaccggttcggacaggggccgaactggcggttgcggacaacgcgggtggcgctttcggcacttggctttaaagaagacatgctgcggcacgggattcagcgcgaggtattcttttgtcaactcgcggccaacgccgccaaaatcctgcagacggggaaaggccagcctgacctgaggtcactcctatccgcaaaggaaatcgccgaactggcattggacaggtggatgattccacgttcgaaacgcagacccgggtaccgggactgggtgtcaagtgacctcgtgggcttgtttggcaatcaggcccgaatgctacgcacccagatcaagaaagcggagatggccaagagaggtatcgcgggagcatag

SEQ ID NO: 27511 - DNA, 1083 bp, Nitrosococcus watsonii C-113
atgattaccgagcttactccgcaagacgtggttacttactgccggaatgttgttggcgcgaacgttgagaggggcgggattgacgatatattattggttggattattacggcgaagcgcgggaataatctgcccttgttcacgtgttgctcttcgagcgtctgtaacagaaagcctatcctatttacattctgatgacgatgatctatctggtcgcctcgataatctaatcgaggttctgattgtaaccggcgatttattggaattgtctgatgttgtggtggatgatccagatgtcaaggaaacatgggtttttgctgcaccgccttcatttgtggttcgtcaaaatggaatcgcattcttagcaggtattgtcccagaccaggatagcttcctatcttctgatctagatagccgaatcgtgtattcgagtagtgcgcgtttcattgagcctaaacccggtgaaaacctagaagaagaattgaaagctgagggaattcaccaaatagaagaagcgacctggcttaggtctccgagaagccaacccccaaagcatttgattgatcggtataaacaacaattggctttagagtcgatttgtgggccagtcaatggacttaaaattctcgattcatctatcaaatctacatattacaaaggccgctgggttgaactcctaaatcaaacaggtgcatttatagccagaagacctcaagaatttggtgctcctttatggtgctttgttgaagttgctggggggcaactgcaacgagtgatagacctccctcctcaaaactatcgttggcgggggtgcgatgctgcatggcacttacagatggcaatagacagttaccaaaggatgccacaacgatataggttgagccgcattgaagaatcggttcgttttgactttttttcaccactaccactgtgggcgcaacgaaggctaatggtggttggtcgagaggttcctcgggaaggcagtctcctctcatacgagattcctgcgtcagaagctgatgaagaggaggggtttttacaacaaaacctgtggctggagcccgttgaaaaagaaaatcgttag

SEQ ID NO: 27512 - DNA, 5550 bp, Nitrosococcus watsonii C-113
gtgcaaacaattaaagaaactatagagaatttacacggatctctgcgcgactacatcgaagcgacctaccatatcagcgcaccatctttaatttcgcagcggaaagtccttctcgatactgatggtgtaatacatcgtactccttatcttgaatcaacgccgaagtaccaaacgggcaacgcattcgcatctattgatggtttgccgtcagctgctcagaaacttttcttgcgattaagtgctcccgaaggcgatcttccacgactgatctatgacccgccttataagcatcaagccgagtccttgcaatatagtcttattgataggaaaaacctagttatcatgactggaacaggctcgggaaagaccgaatccttcctgctgccgattcttggcaagttcgcgatggaggcgaagacccgtccggcagtcttcacggaacagcctgccatgcgcgcgctcgtcatgtatcccatgaacgcgctcgtgaacgaccaactcggccgcctgcgggcgttgctcggcgatccgcggcttgtccagatgttcaaagaatggtgcggccgcccaccgcgatttgcacgctacacaagcagaacgccctatgccggggttcgcacgagcaagaaggattctgctcggttgcagtcctttgacagcttctatgtcgatgttctccgccgtgtggaaagcgacgacccggaagagaaagaacaggctgtaaaactcttggatgcgctcaaagagcgcggaaaatggcccgccaaacctgaccttaaggcgtggttcggagaaaaaggcagcgcttggcaggaccggaagaccggcgagtttgtcagggcagtgaccctgccggatgactccgaattgttgacacgtcatgaagtccaactcgcgccgccggacttgcttgtcaccaactattccatgctcgaatacatgctcatgcgcccgattgagcggcccatcttcgacaggacgcgggagtggctggcgaagaaccccgacgagagctttcttgtcgtgcttgatgaagcgcacttgtatcgcggcgcagccggtgcggaaatcggcctcctgcttaggagactgcgcgacaggctcggagttcccgaagaacggtttagggtaatctgcgccacagcaagtttcaaagatgctgcgtacgccccggaatttggcgcgcaactctccggtatcacacccgatacattcgtacccatcgaaggcactctcgacctgaaagaggaggtaggggtcgggacgaatcgcgatgccgaggtgctgtccggcatcgatctgcgcacattttacgaggtaaacactgacaaagctcgtatggcgacgataaagtccttgcttgattataggggcgtcactggtgccgagaccaccgagagcgcgcttttcgatgcccttggctcgctcggcccaatgggcgcgctcatcaatgcgacaatgaaggaagcccggccgatcgccgaactcggcagcttcctgttcgcagacgacgtgccggcacacatggtggataaagccgtcaccgtactgatgacactaggcagtgttgcaaggccagaaccgaaattgccggggcttttgccctgtcgtgttcataacttcttccgcggtcttccgggactctgggtttgcatggacccggaatgcagcgaactcgccgaggaccagcgcagcagcatctgcggaaaaatgtattcgcagccgatggacgaatgtagctgtggcgctcgggtactggaactgtttacctgccgaaattgcggcacggcctatgcccgtgcctatacagatgacgtcgatacgccgcgcgctctttggccagagcccggcgagcagttgcggatggcaagcggcgagaccaatccgctcttagcgctcgacctcttgcttgagcaaccggcacacgatgatgcggcagaacctgcggactacgatctggaaacaggccaactaaacccggccacgaccggccctcgtacgcgaacggtctatatcaggcaggagcgtcttgccaacgctgccgacgataaaaacgataacgatcccagcttcgagtcacgcggccaattcaagccgtgcgcggtgtgcggtaagatggcgcgttccggtcgaagctacgtccaggaccatcaaacaaaaggcgaccagccgttccaggcgctcctcgcacgccaaatccagattcagccccccggaccgcaagaagcgacgcgctttgcaccgttacgcggccgcaaggtactcgcgttttccgattcccggcaggtagcagcgcgactggcaccgaatattcaaatgtattcagagagagattcccttcggccacttatcattagtgggttcgcatggcttcaagagcaggatgtactgaaaaatcatctcagccttgacgacttgtattttggtgctttgattgcatcaaagaggttaaatgtgcgcttgcgcccggaaatgcacgaccacgaaagttttgatgcagaagtaatagtcgaaagggcaataaaatcgggcgatttaaataatccaatgtctctattagatctgttgctggatttacgttcccatcacccgccgcattctttgctcagtagtatgctaacaacattgactgacaggttctggggaatggagccactagcgctcgcgacgctcagagaaaagaatcgccgtagcagtaagattcttggtcttccgccgataccggacattgctgaaaccgacaagacaaagcttgcacttgctcgcttttggctccgttgctgggccggtttccgcattgcccaaatgcctgatgactgggtcgatcgaccgacctctgaaggtttccgggctcagtcacgaaaaccaaaatccaagattaaggcagtgaattctgtgatctcggataaattggcacgaaagatcttttgggaaaaatggtcgccggaattactggcttgctttacccgttccaaagcaggtggaaatgcgtacctgaatggcagtgaactatctcttgaattcgatggagactggatgcattgtccgagttgcaagtccgttcaccgtcccattcccggaattgaacgttgccttgactgtggcagtgatgctgtatcggcgctcgcccccgataccgacccggtttttcttgcccgcaaaggtttttaccgcaaacccgtcacagaagctcttgaagagccgccgcgcgagcccatggcacttatcgctgccgagcacaccgcacaactcaacgcgccacagaatgaggatgtgttctccaaggcagaattaaatgaactcctgttccaggatatcaagctggccggaaacgggattggaagccgcccaaccgctattgacatcttgtcgagcacgacgacgatggaagtcggtatcgacctcggggcgctgtccggtgtggccctgaggaacatgccgcccgggcgcgcaaactaccagcagcgagcaggccgcgcgggacgccgcggcaatactgtggcgacggtggtggcgtttggcagcgccgacagccatgacgagcattattttactgagccggacgaaatgatccggggagatgtggttgacccgaaactagccctcgataatcccgagattgttcgccggcacatccgggcgttcctgctgcaaaactatcaccaggaccggttgccagtagtagacccagaccagccgcatgatctgttctctgttctagggagtgttgcaggttttaggcgtacggactcggttttgaaccgggacgactttgccgaatggcttgccagaaacgagaatgttttgcgtacgcgcatagcaaaatggattccggcggagttgttggaagaggaccgcgtggagctaatcaacggtttcgtcactgattgtcttaaggcggtggacgaggcaattgcccccgatcccggagaagaagtcgaggacgacgaagaagatagcaggggtgatgaggaggtagcggaagaaggagaagagcggcctcaacagggatcgaacctgggcaagttactcgaccggctcctgtattgtgggaaactccctcgttatgccttcccgaccgatgtcgccacattccacgtgttcgaccgcgatcgctcttcccggttccggcacatcatgaagttcgcgccttcgcagggtctaccgattgcgctgtcgcagtacgcaccggacaaacaggtctggatatccggaaaatgctatacctctggtgcaatttattcggtgatgaaggatgatcgcttccacgcctgggagtcaaagcggctctacatggaatgtagcgattgtggcttctccaggactttcgacataggcgaggccacgcgcgacgaaaccaggaattgcgatgcctgtggcggcgaggacacgttcggtccagcgcgctactggatgcggccgccgggatttgcacacccgattagcgtggaagaagtgacgtcgccagacgaaattcccgaaaccagctatgccacgcgcgccaagctcacgatgggtacacccggcgacgatgaggactggaccgaagccaatgagcgtgttcggagcctgaagacccgtcggcacctactggtttcgaacaccggaccacagcacgagggttatacctattgcgtcaagtgcggccgaatagaggccagtaacacgccgaacccgatccttgccgcgcctcaccgcaagccatttccggacgatgatgataagcaaatgtgcgacgggaccagccccactcgtcatttagttcttggaacggacttcattacggatatcgccctgttttcgatgcgtgtggcggccccgcttaaactgaagccgggtcactattcgacggacgtggcgctacgcaccgtcagtgaagctctggccaaggcggcctgccagttgctggagatcgaaccgggcgaactgatggcggagtatcggccggcgctcaccccggcgggaaagaatgggctagaggctgagatattcctctatgacacgctgccgggaggcgctggttttgcaagccagttcgcaactcgcgggctcgaattatttcagcgcgcgttctacctactgaagacctgtcccgaggactgtgatgcatcctgctacaggtgcttgcgaagcttcaagaataagttcgagcataggctgctcgaccggcacgtcggcgttgaacttctggaatacctgctcgccgggcagcatcccggcttcaacacacagcgtctgaagaattcgatcgaacttctgctcaatgacctcctgcgtcgcaatgaaggcgtcgttactttccatgaaaatgcagagatcaagtatggagtgggaaagaccgcgaaagcgccaatccttgctgaatatgaagggaagaaatttgtcattgcgctatcaagaccgttgaccgccgggcatccttcggatccacttattgcggatttgcgcgacagcagcaccgagtaccaggtcatcgtcgagaatgagcttgtcgtccgcggcaaccttccgacggcgacacgcacggtctatcagcagatcaccgagtga

SEQ ID NO: 27513 - DNA, 1209 bp, Nitrospina sp. SCGC_AAA799_C22
atggctaaatatattcccctgttaactttggaaagccgaattaagcgaaaattaagagaccatattcgggaaatggggtttaacaggacatcccagggaatgctcgaaccctcttcaaatagcaaaaaggtgttcagagctttgcaccttaagcaacgtattgaacgccttaaattggaaaaaccgtttatagataaaaatatccacctaaaagactattttgcttcaggttcagaaattaatccggaggaaatttccccacgattacaacttgtgaaaagcggtagcctggaggaaagaatttttaggttagccagtcttacctggagtatcccagtatctcgtggctatggaagaaggatgcgctttattatttgggatgaccataataataaaattatgggaattattgctcttggtgatcctgtatttaacctcaaagctagagatgatttgattggttggaagtcaaatcagcggaaagataatttagtaaatgtaatggatgcctatgttctgggtgccttgccaccttacaatatgcttttatgcggaaaactagctgcatgcttaatccgaacgcgtgagatgcaagaaatgttttcaaagaaatatggcgacactaaggggattatttctggaaaaagaaagagggcaaaattattgattgtaacaacctcatctgcattaggcaggtcttcagtttacaatcgtttgaaacttcaaaatataaaatattttcaatctattggttacacaaaaggttgggggcattttcatattacgaatggcctatatgaagacatgaagctttttctcaagcagaagaagcatagatatgaaaagggatatcaatttggagatggacctagctggaaacttagggtagttagaactacgcttgatttaatgggaatgaattctgatttgcttcgacatggaattttccgcgaagtatttatgtgtaaattagcttcaaatgcggaaagaatattgcgaggtgaggtaaagaggagctattgcaaaaacctactatcaactaaggaggtagcagaacttgctctcaatagatgggtgattcctagaagtgaacgaatggatgattttaaaaaatggaataaaaatcaaatcgctgacttgttgaatccgaataaatcgtctgaaataactctatcaaaaagaaagaaaaagagaggactaaaacaataa

SEQ ID NO: 27514 - DNA, 927 bp, Nitrospina sp. SCGC_AAA799_C22
ttggctggagtgctaatagatgcatttaaatttgtaatcgatataaatgatgattttatttcaaaagtagacgagatgattgaagcacttatttctcacggagacctattagaaatcagtgatgctactaccattgacccaaaccaaaaaggtacctggatttttgctacgcctcctgcgtatgtcccccgtaacaatgggcttatttatttacttggaatctcacctgaacaaatttctcctttaccagatgagttggaggaacggattgaatatattgaacaccttaggttaatcaggcaatgtgatggtgaaaatctttcagatgttctaaaggaactgggaatgactgaattatctgaaaaagcttggttaaaaagccctggccatgaaactccagaaagtttttttgaaagcatgtgcaaaaaacttgaaagcacaaacacctgtggggaattgcctgatttaataattcttgatccagataaacctgtggattactacccaggtcgttggactacagtggataaaaaatcgggttattttgtagccaaaagagctcgagcttatggaaatgatatctggggatttaccaagcttgacaacggaaatccaaaaatttttttagattttccattaccaaacagtagatacaggggttgcgattttgcatggcgacttcaaaccgcaattgataggtgttcaaaacatccacaagtttttaggatacaggatgactctgacagtgaggatagtcggattgattttttttcacccgttcccctatgggttaggaggaggttagatgcttttggaaaaccctgtccaccttcaaaatgtttattctcgtacaggattcctagggacagtattggtgatgaaatacactatttagaaaacgagatatggctttctcgattaccttaa

SEQ ID NO: 27515 - DNA, 5535 bp, Nitrospina sp. SCGC_AAA799_C22
atggaaaagacccttcttgaaactacagctcagctacaccatgccttaagagattatattgaagcaacatatcacataagtaacccaaggttaatccaacagcggagaaagcttctcaatcaaccagaggttattaaacaaatcccttatttagaatcgactcttcggtacaaaacggatatctctttttctcaaataaaagatttagaaccatcagttctggagctatttttggagctttcaactgactcaagagggcctgttttgattcatgatccaccttatcgtcatcaggccgaggcaataaaaaaatctttaattgagaataaaaacttggtggtaatgaccggcacgggttctggaaagacggaaagctttttgttgcctattctagggagtttggctaccgaagcaagtaaatttccatcaacatttgcggaatgtaatgcagttagggcttttgtgttgtatccgatgaatgctttggtaaatgatcaactgggaagattgcgtttgctttttggtgataatcgattgcgccaaaaatttatggattgggctggaagagctcctcgcttcgcaaggtataccagtcgaactccatatgcaggtgtccgcgacgctaaaaaagatcaacagaaacttaaatctttaggagagtaccacgtcaagattgaagatgaggcattcgacccatcatcaccagagcatgaaaaagcaaacgagttgttcttagaacttaaaagaaggggaaaatggccagccaagccaaatctaagagcttggtatggaactcctaattctcgttggaagaattcacggacgggggaatttaaaagggccgtgacacttgctgatgattcagaattgattaccagacatgaggtccatgaatctccaccagatatattggttaccaactattccatgctggaatatatgctaatgcgtcctattgaaaggcctatttttgaccagacgaaagtttggttggatgcccatcctgaaaataaaatctttttagttttggatgaagcgcatttgtatcgaggtgctgctggagctgaagttggattattgattagaagattaagagaaaggctccaaataacaagtgaccaaatgcaggtaatttgttcaacagcaagctttagtgatagtaactatgcttcgcaatttggcggacaactaacaggttgtgactttaaaacctttgttcctattacgggtgaaattcaatatcgtcaagaagctagatcggggacagatgaagaggccaaggctctatccaagattagtctttttgaattttatcaggccgaagatgaagagaataggatactggtaattaacgaattcttaaaatacagaaatactaagccaaatggagaactggaacaggtcctctatcatgcgcttcacgaatttccacctatgaaccttttaattaataaaaccatggagggagcttgcaggtttgatactttgggaaaagtaatatttccagacactgatttggatattgctaattctgctttaactaatttaatggcctttgggagtattgcccgacaaaagccaacagagcctggcttattgccatgcagagttcataacttttttagaggactagctgggatatgggcatgccttgatcaggattgttctgaattaagttcgaacgaaaaaaatggtccaacgggtaagatttacagtcagccaagggatttgtgcgcctgtggagctagagtattagagctatacacgtgtagaaactgtggggctgcatatgctcgtgcctatactgatgacattgacgatccacgattcctttggtcagaaccagggcataaattacgtttgttgtccggagatgttacagagctacttccaattgacttgcttttagagaatccagtagtggcaggtattgttgaaccaattgattacgacttggaaactggtcgattgaacatgtctggtaatcgtgttcgtcctttatatgtaagaaaaagggagatgaccggaggtgatgatggcgaaaatgagtccaacaatggaagagagtttaagccttgcggtatttgtggaacgacagcggcttttggacgaacatctgtccaagatcatcaaacaaaaggtgatcaaccattccaagctttaatttcaaagcaaattcaggttcagcctcccgaattagttaaggcgacaaaatttgctccattgagaggccgtaaggttttagcattctctgattcccgtcaggttgctgcaaggttagcacccaatctccaaatgtattctattcaagattccattagacctttaatggtatggggttttagacgatttttggagtatgagtctttgaaagaggatatttccttagaagacttgtatctttcaatattaattgcagccaatgtattaggggttcgtcttcgccctgaacttcgtccagaagaaagttttactgctgaaagaattgtagaagagaaaattggaaaaggagttttagataatgaagtagaacttctcagattaataaatagattcaaatccgaatcacctcctgaatttcttatgggatgttttcataagaccatttttgataggcaccttggcctagaacctttggctttagggtcaattgtggaaagaggcgaacacacggaattttttgaaaatttaaatgatattactggaattgccgaaactccgaaaagtaaggtggggttagcaagggcatggcttcgttgttggaaggaaaacatttggttgagcaggatgccacatgcttggtggcagaatcgtgtaaaaggtcactcaggggattttaaaccatttaataggattttgggtaattctcaagcaaaatcccagtttagaagggattggcttccacaattactttcaaggcttaccgaacaacccgctagaaatgttaatagattaaaggggagtgaactatcaatttcctttgataataattgggtcagttgtcaaatttgccggtctgttcataggcctattcaggggcttgatttttgtattgattgtcagagtcctaaccccaaaataattgatccggagactgatgaggtttttgtagcgagaaaaggctattaccgagcgggaactatggctgttttgtcggatgatattgaatctcctatggcactgattgctgcagagcatacggctcaattaaatgcaccacagaatgaggatgttttctcgaaagcggaagagaacgagttgttgtttcaggatgttgatttaacatggaaacatatggactcttcatcatcagccattgatattttgtcgagcacaaccacaatggaagtaggtattgatataggaaccttatcaggggttgcattaagaaatatgcctccaggaagagctaattatcagcagcgatcaggtcgggctggaaggcgaggaaaggcagttgcaacagtggttgggttttgtagttcagacagccatgacgagcactattttaatagtccagatcaaatgatcagggggcaggttcttgacccaaagcttactttagataaccctgatattgcaggaagacatctgactgcctttttattgcaaagttaccatcaggaacgtttgccagatattagccctgatgaacagccacaacttttcgcagtgctaggaaaagtgagtgacttcttgaagaggcagtctattttaaatagatacgattttgaaaattggcttcaaagtaatgaggaaatattaagggaaagagcatcggggtggattccaaaagaattgtcagaagaaaataaaaatcttctaattaataatctggtttctaatactttaagtcatatcgataaatcaattgggtttaatgcccaaaatccacaatcctcaggtgaagaggggcaggatgaacaagctagcgagtcagatattcccgaaacacaagagacccaggcagaatcaggtgaagaaattcccgatcaggatcaattgcatgaaaatcttcttaatcgccttctttataatggagttttacctagatatgctttccctacagatgtagcttcttttcatgtgtttgaccgaaaccgttctaccgcttacaggcccatttttcagtttgccccttcccaaggattaccgattgctctgacacaatatgctcctgggaaagaggtttggatttctgggaaatgctataggtctggttctatttattccccaatggcatctgaccgatacgatgcttggagcaataagaggttttattatgagtgcagcgaatgtggttttgcaaaaacgtaccttataagcgaaggtgaaaaggaagaatatttagattgcagtgcatgtggtggaaacgcaacttttggtcctgggaggtattggttaaggccaccaggatttgcgcatcccataaaccaggacgaaatcgtatctcctgacgatactcctgaaacaagctatgccacccgtgcaaagcttacaatcccaacgcctagcgaaagtccaaattggatcagaataaatgatcaaattcgcgtgttaaatatccgggaacatctattggtttccaattctgggccaagaaaagaagggtatgcctattgcaccctttgtggactaattgaacctaccgcatcccctaatttaaccgtctttgcacctcatccaaagccatttcccgacagggaacccgattgcagtgggagcagagcctcaaggggaattatccttggtacggattttattacagacgtcttattaatatcactaaaggttattcctcctttaaacttgcgcccaggctattactcaacgaacgttgcgttgcgaaccttatctgaagctttagcaaaatctgccagtgagtttttggaacttgaatcgggagaattaatggctgagtttagacctgcccttactcccactggatggcgagggctggaagcagaaatttttctctatgatactttgccaggaggagctgggttttctaggcaaataagcgaatataaggatacagtttttcaaagtgcactaaaaattctccaaaattgcccaggagattgtgaccgatcttgttatagatgccttcgaagttttaaaaataaatttgaacaccaattacttgacaggcacattgcggcaaatttattgaattatcttttaatgggggaaatgccaaattttgattcggagcgaattaatcaatcaaccaagatcttgtatcaggacttgttaaggatggccggggataatttaaatatccaggaacaagcaacgatagcaatttctgggcttggcaattttgaagttcccattttagtggaaaagccaagtcaagaacagtttgtagtttatttgcatggtccgttaacagtggattatccgccaaatgaagaaattagaactcttcaggagtattcttccctaactgtattgcctgttgatgaacttcttgtaagggaaaaccttccacaggccacatctcaattattgcaagaacttggggttagctaa

SEQ ID NO: 27516 - DNA, 2034 bp, Nitrospirillum amazonense Y2
atggttagaggagtgccgatgaacaagattgacgataagcttcggaacccgcgcccatttgagccgttcctgaaccccagtgaacgcgaggaactgcacggtctcctcgatttcagtggcccgacgccgccccggttcgccgacagtttgcggaacctcgctcgcagctacgtcgacgatggggacagcactaagctgagggccgtctgcttgctggtcgcggacctcttcgaccagggctggcgggtctcgctccacaaaggcgcgctgctttgcgagccaccgagcatcgaccgccacaacgatcagacggccgaggacgtgaagctacgtattcgggcggcgctgcaggcgtcgcgtcgccgacagcttgaagagccctctgttgcacgtttcatccaacggatggagcgcccgacgctacgcccgcaagggcggacatcggtgctcgatctaatagacagtggcgaccatctagccgacgcattggagcgaatcagtctcctacccgaccaagaccgagaggcggcattcggccgcgtgatcgatcccgtcatcgagatctgccactcaggatctcggtgcgcctataccggactgccactgaacgacatctggcgctacttccgacacacctgggcgcacgaatatcgcccgatacctggccgccagctacttgtgctcgtccgcaacgctgcccgaccaaaccgcccggtgatcggtattgcgatgctggcgagcccggtaatgcgtctaagtgcccgtgacaactggatcggctggctgcgcggcgcgatggaagccaatctcaattccggcatttgggacgcgccggccctcgcgcaggcgatggccgagaggctggaggcttcgatcgccgacgtccgctgggatgaccttgtcacggccgatgagatcgcgtcgccagtcgagaacaccgtcctgcggctcgaacagaaggcgtccggcgcggcgttcgcccgagaacttgaactgcgcgcccactatgaggccagcatggaacaggacggccgcgtcccgccgttccgcggtgctgtgaaagcagccagtgctgggacgaactggcgagcggcatcagaggatcctctcttcgtgcgcaagcgcgccgaactcctttcccaacttctctcggccaagcagatattccgtgccgccggcctcctcgacagacccaaggaggcactgtcgcaactcctctcggcgaagagcgggcagcgcgcgattgatgtcgtgcttactgagttccgcaaagccggcctgtcgagccgcatcgttgacgtgagcatctgcggcgccattgccccctacaacgaactgcttggcggtaagctcgtcgcactactgctcgcatcgagagaggtacgcgaccactatgccgagcgatatggcaaacaagtgagcgtcattgcctcccagatggcaggccgcgccgtctcgaagcctgcggaccttcgggtgctgaccaccactagcctctacggcgtggggtcgagccaatataacaggctggccctccgcgcagttgagcatcctggtcttgaccatgacctgcgatgggactcgatcggcaagagcaggacgggtgggtttggcaccctgcatctcggcgccgacaccgcccatgccctgagacaaatggcgcagagcgcgcatgcctcgcgccggatcaacaaccgcttcggcgagggcaccagcccgcgcctgcgccaaatcagggagggcctcgatgccatcggcatcgacagtgatgcaatccttcaccacaacacgccccgcctgttctatgcatgcgaacttggctcaggctcgcgagactcgctcatgggcatggcgggcgatgaattccacgcgtcgccagcttcgaccatcgctgcagcgtggcgccgccggtggctggacggccgggttaggcgtcccgaaacgatcagcgcactacgcacgcttggccccgccactatccaacgcagcctgcacgcaaccgaggccgacctcgtatcggaattgatcgactag

SEQ ID NO: 27517 - DNA, 1065 bp, Nitrospirillum amazonense Y2
atcgtgaccgcggatgttgtagcgggcttagcccgggcgtcactcggactgcccccaacgccggccgatttgaatgagccttacatcgctgccgcgctccgtcggctggccggattcctctgcccagaatcgccacgtacgctgctacgcgcgatggtcgacagtcatcgcggtctggtgaacaacgaggacgccttcgccgagcaggtggaggaggtgatcgagacgctggtcgcgatcggcgacctgctcgaacttggcgacgtcgcattggagggggagaaggttaggagcacgtggctagtggcggcaccgccagccttcgtcgcgcgggaaagcggaagcgtcttcgtgctcgggctgtcgactgatgagcagacgccacttccgacagagatgcgctcccgcgtcacggttgatcgggtcatacggttgatcgaaccccaacatgccgaggacctgggcgcggcactccgcgaacttggactgcgtgaactgtcgagcgcagggtggctccggactccacggcacgtggacgctgccggattactggcgagttacggcgcgaagctggctgcatgctcccgttcgggggaggtgcccgatcttcttgtgctcgacggtggccgcaatatccggagctatcgacggcgctggacgcttcccggctccctcactgggtgctttgtggtccggcgtccacagacatttggcgccgacctgtggggctatgccgaactgcgtgacggcaatgcacagaagctgctggatctcccgctatctggagaacggtggcggggctgcgatgcggcttggcgcatccagatggccatcgatgcgttcaccggacgcccccaggagtatcggctcggcgccgccgacggtggctcgcggtttgatttcttctcgccgatcccgtcctgggcgcggcggcgcctcgctgtgatcggccgggagatcgagcctgcagggtgtctcctgagcttccttgttcccacctgcgaggtggcggcagaggaggcatttctgaatgaattactttacttggcgcgtgtggtcgaatga

SEQ ID NO: 27518 - DNA, 5550 bp, Nitrospirillum amazonense Y2
atggccagaacaatccaggagaccattgatcgtctccattcctcgctgaaggaatatatcgaggccacctaccacatcggcgacgccgcgctcatcgaacagcggcgcacgctgcttgaccggatcggcgtcacccatcaagagccattccttgaaacgacgccgcgctatcagaccggcgcgaagtttcgggacatggtcgggctgccgacttcggcgcgcacaatctacgcaatgctatcaggcatccgaaaggatcgtgcgcgacttctttttgatcccccgtatcgccatcaggccgatgccgttggccacgctctcgtcgaggggcgtaacctcgtgatcatgaccgggaccggctccggtaagacggaatcgttcctgctcccgatactcggcaagtttgcccgcgaagcagctgagcgttcggcctcattcggccaaccggccatgcgtgcgctcctgctctatccaatgaatgcgctcgtgaacgaccagttgggacgtctgcgcgcgatcttcggcgatccagacctagtcgcgcagttcacgaagtgggcaggccgtccgccgcgtttcgcccgctacaccagccggacaccctatgccggcgtccggtcggggaagaaggacgggcgtaagctctcgtctttcgaagacttctacgtcgaaatcgagcgccatgcgttggcgcccgcatctaataagcagaaggcggccgcacgcctgcgtgaacagttacaagagcggggcaagtggccggcgaagcccgatctcgacaagtggtacggcgcgaaagggtcgcgctgggtcgatcccaagacaggcaacttcctccgggccgtcacattggacgaggattccgagctcatcacccgccacgaggtgcaagagacctgcccagatctcatggtcacgaactactcgatgctcgagtacatgatgatgcggccgatcgagcggccgattttcgacactacccggggctggctggcggccaatccgaacgaaaagtttacggtcgtcctcgacgaggcccacctgtaccggggcgcggccggcgctgaggtcggacttctgctacgccgccttcgcgatcggcttgatattcccgctgacaggttccaggtgatttgtgccaccgcgagcttcgaggacaaggtctacgccacggcgttcggcgcccaactctccggtgtgccggccgacagcttcgtcgccgtcacgggcgtgctcgacatgcgctcccacgccgcgcccggcaccaaggccgatgccgaggcgctggccggcctcgatctcgagctcttttactctgcggacgagaccgaccgctcggcgtctatcgcgaatttccttgcgcaccggggcgtggcgcagagcgcgggcgtcgagcgtgacctcttcgaggcgctcaagacttttcccccgctcgacctactcgtgaacgagaccatgggcgccgcgcagcccgtcgcagagctcggttcccggctgtttccggacaccccggatatcgcggacagtgccgtgacggcactgcttgccgttgggagcgtcgcacgcgagcagccggacgcgtcaggtccgctgccttgccgcgtgcacaacttctatcgcggccttcctgggttgtgggtttgtatggaccccaactgcactgagttggctgaggaggatcgtagcggcatctgcggcatgatgtatggccagccacacgaagtgtgcaactgtggatcaagagttctcgagttatttacctgccgtagttgtgggtcggcatacgccagagcctattccgacgatctcgattcaccagacgtcctctggtccgagccgggtcggcggctacgtatgccaaacgtcgagaccctcccgctcctcgacctcgacctgttactcgaaacgccgaagaagaccgatctggccgaactcgccgagtatgacctagacacgggacgactgtctgcgggtcagcggacgcgcacggtgtacatccgtaaggacagaatcacgcccgcgctctacgacgatgatgacgagggtggtaaagcggacgacaacgcggatggtcgcgggcggttcgtgccgtgcgcggtgtgcggcgagactgccagcggcaggacaacggtccaggaccaccaaacaaagggcgaccagcccttccaggctctcgtagcgcggcagttggctgtgcagcagccgggtaagcaggcgccctcggcgttcgccccgctccgcggccgcaaagttctcgtcttctcggactctcgccaggtggcggcgcgcctcgcgccgaacctgcagatgtattccgtccgtgatgcgctgcggtctctcattatgtggggttacggccgcctgtcgcaatcgtcgatgatccagccactgctgagcctcgacgagctctatctgtcggtactgctggcatcgaaggtgctgggtgtccgcctgcgtcctgaactgaagtccggggagaatttctccaccgccgaggacgcggtcgagaaggcggtcgccgagaaggccgagaccgatgacgccaggctcgcgcaactttggatggagacgaagacggaggtgccgccggcggcactgctcgatgacatcgcgaagaccgtccaggaccgatatctcggccttgaggcgcttgcgctcgcctcgatccgcgagcgcgccaacaagacgaaggacctgcacgcgctgccggacatccccggcattgcggagaacgacgaggacaaggtcgcgttggcgcgcgcctggcttcgctgctggcgaccggttggcttctggctgaactcaatgccgagcacatggtacaagcggccccgcggacggggtaccagcgtcggttcgcgcaagggcaccttcaaagcgatggacatcgtgctgaaggatccagccgccaggaaggcgttcaagaactggaccaagccactgctcgatatcttcacccaggaccagggtgggggggcacgccgcctcatggggcagaatctctcgcttgatttggacggcgattggcgcaggtgcgccaactgcaagtcgattcatcggccggtccgcaccataccgcactgccttgattgcgggagcgatgcggtggtggaactgaatccgctcgatgacagtgtgttcgtcgcgcgcaagggctactaccggagcccggtgctgggtgctctgagcacgccgcgcgaggcgccgatgaccctcatcgcggcggagcataccgctcagttgaacgcgccgcagagcgacgacgtcttctcaaaggcagaggagaacgaactcctgttccaggacgtcgaactcgactggggtccatccggcggccaaaacacggcgatcgacgtgttgtcgagcacgacgacgatggaggtcgggatcgacatcggcgccctgtctggcgtcgcgctgcgcaacatgccgcccggccgagccaactaccagcagcgtgccggccgtgccggccgccgtggcaacacggtcgccaccgtcgttgcgttcggcagcgccgacagccacgacgagcactacttcagcgaacccaaggagatgatctcggggaaggtaatcgaccccaagctaacgctcgacaatccggacatcgtcaagcgccacattcgcgcctacctcctgcaagcatatcatcaagttcgaatccccgtcttcgaccccagcgccaacccggatctcttctcggtcctcggctcagtcgaggacttcaagacaccgggcgcgacgctgaacgccgcggacttcaagacttggcttagcgagaacgagaccgaacttcgcgaccgggtggcgtcatggatccccgaggaactggtcggacaggtccgcgaggcactgttggatgagatggtcaacgactgctcggccgaggtcgacaaggcaatcgccaacgattccgtgggcggtgagcggttcgagaaggaggatgacgacgccaacgaggagggcgctgagatgccggaagaagtgggcgaggaggccccaccggtgaaggcgctgaccggtaagctgcttgaccgtttactctacaagggcgtgctgccgcgctacgccttcccgaccgatgtcgcgaccttcagtgtcttcgacaaggagcgatcgacgccataccgccacgtgatgaagttcgcgccgtcgcagggattgccagtagccctgtcgcagtacgcgcctggcaagcaggtctggatctcgggcaagtgctacacgtcgggcgccatctactcgcagatgcccgaggaccgcttcgacgcctggcagaaccgccggttctaccgcgaatgcaccgagtgcggttttgcggagacggtgaagatcgaccgagggctcggccacaaccacgtatcggactgctatgcctgtgggtcgctggagaccttcgggcccacgcgtcattggctccgcccgccaggcttcgcgcatccgctagaactggaggaggtgacatccccggatgacatgcccgagacgagctacgccacgcgggcaaagctggttatgccgacgcctgcggatgacgacaagtggatctgggcgaacgaccggatccgagccatgcccaaccgtcagtacctcctcgtctcgaacacgggtccgaagcaggagggctacaactactgcacactgtgcggccttatcgagtcctcggcggaggggtcggcatcgatcttcagtacccacttgaagccatttcctcataaggaaccgacatgtcccgggtcacgcacgtcgcgccacgtcgtacttgggacggatttcatcacggacatcgcgctgttctctatccgggtagaggccccgctgaagctcaagcctggctacttcccaacggacgtggcactgaggacggttagcgaggcactcaccaaggcggcgtgcgcgatgcttgaggtcgagcctggtgaactgatggccgagtacagaccggcgctgacccaggccgggaaggtcgggctggagtcagagatcttcctctacgacacgcttcccggtggcgcggggttctcgcggcaactcgcagaccgcgggctagagctcttccagcgcgcgctgactatcatgaagacctgcccagaggattgcgattcctcgtgctaccggtgcctgcggagcttcaaaaacaagttcgagcacggccaactcgatcggcatattggcgcggaattgatcgaattcctcctcaccgatcacatgcagcccttcagccctgagcgcatcgatgcatccacgaaggtcctgatgctcgacctcgagcgcaatgccgacagcggcatcacctaccagcgggatgcggctgtgagcgtgccggacatgggtgacgtgacggtcccgatcctcgccactcggtctgatggcgtccagatggtcatcgcactcgccggaccgctcaccgaggagcacccctccgatccccgcatcgcagagatgcgggagaagtggaacggcgaggtcgttccaatcaacgaactgctggtgcggggcaacctgccaacagcgacccgcacggtcgaggaaaggattttggcttga

SEQ ID NO: 27519 - DNA, 1422 bp, Paenibacillus alvei TS-15
ttgagaagtaatagtcactttttcaaatctatatttgaaagattaggactaccagtatacctcagaaaagatggtgatgatagatttgatctatacattggtttttacagtcttgatgaatcactatttagtaatgctgaaaaagataaacttaaaatcactattaatccatatcaaaaggatagtctttttaaaaattctataagttttatgattgatcggaataactttttggtgggaacaactactttactaaagattgattacatttcacctcgttattctattacttgctcattgtcccagtatgaaggaatgatatatgaaagatgggggaattatgtcgagggtattttgaaggagggtgctttattttcgcataatgatcaaggtggtaggaaaattagaattaatgatgaaatcacaacagatacagaatatctttatttatgcacgaatgaacaattgttagatagacataaagatattcaaagaacttactgtggaatgatatcgttgttacacagtgaccgtgaaaatttttacaacgtatataaaattgtttttaaacctcaaagtgatcaacgctttaaagaattatttaaattttgccgggattatttcaaggttagcttgctttctaaacctgtaagatttgatgccttatggcccccaactatacaaagagataatcaattaagttgtattaatagtaaagataatctttttctgttaaaaagtgatgatacagagctactaagggcttattcacataatggcttacaacatgaagaattacaaggaatggtactaaataataagacaaaactgttagcaattaatatttctgatggtgaggcagctataacaattgcagagaaatatacttccatacattccgtagtacaaaaattcaataaagtaataaagtcatatagaaattcgatgtgcattactgatataaaaggcattcagattaaaggcggcacaacacaagtcttgccttataaagggatactaaaagttagctctgaaagcagaagtagcatactgcgtattcgtaacaataatatttgtcagtataatattaaggcttccaacattagcattgataatctatcttttggtgacgaattagtagcagtgattaacggtcaatttatctcattgataaattttgcacgaaaccatccaataaattcagttctcagtgatgaagagatatttagacagttgatcaaatttaaaggtccattcataaagcccccctcttgggtaaaaagaattttaatccttcttagagatcaacctcgtactagaaaaattatcaaatcgtatgttaataagaatgaaatgccaataaaggctcataatattctacttgaacttttactatttcttaaagaaggggaacgtaattaa

SEQ ID NO: 27520 - DNA, 1941 bp, Paenibacillus alvei TS-15
atgataaataaagaaactaaagatctatttgataagttcactaggggctattcgaaagaagaatttgagtttcttatttctctttttccttatgctaaggttacagaaataataagtaagaatgaaaagaaatttagaaaatacttacaaggatatcgaccacagaaacttccgacaaagaaactgcaggaaatatatgttgagtccatatttgttacgaggaatgaactaatagtaaaacacgttgaatatatgtttatcagttatttgaaaaggtttgatgagattattactgaatatattgggcctgtttgtcttgttagagaaaaaattgaacaggatcaaatggagtatttcgagaaattagtcgatctattaattgaccatagatttgatgagcttcaaaaagttattgtttattttaaaatgattgattacgagcttttagaatcgcaaagaaattatttatttaatgatttggaaaaaaaagtttactataaaaaggttaaggaggaggtaacaaaaacgttatctctatcctatgagaaatcattgcgcgaattaagcgaggagtatgaaacagaattaaagaaatatgatgtaatgataaatgaatataagcaattatcgctgcatactgacaagaagcataaagaggtactgatactaaaagaaaatgaattactaaatgtagagaataaatttaaaacagctactgagagaattgttgaactagaaaagcaagtaaacgaaataatctatgtgaaaaatgaatgtgagcagattattcatgaattatcttctgctgtaaatatgaagtatgacgagtattgtgcaactgttgaagagaagtggatgaaatcaaatgttcaattagttcaaaataaaaatgacattcaaaatacgatagatgaattacttatttcgaagggggatttattaagtgaaattgttgctttgaataaacagaaatctgaacttgaaaacatgatttctttattaaatgactcaggaaaaggaatcgtgcacaatatgcaggattttctctgtaagattggatttaaacatgaagtatctgctcaagtaagcagactttatattattccaagcaaatccactgaattagaagaaatagaagtaataaatgataaatcattttttattgatgatctggctgaaaacctgaagatatgtggtattagtagtgaatacgcaaatgatttagcaatatatttatatgcttcaatagtaaaaaagttgagtttgcttttaatcggttataacagtagaaaaactgcaaatgctttgtcttatcttattagtggatcaaccgcagaaattattacattgccaccaggatacgacgattgtaatgaaatgatttctttagtgcatagttcgaccagtaaagtaatattaatcgaaaatgcaattgaaaatatttcggaaagtgtctatcttccgttgttgaagcaaaatagtgatcatattttgctgttttcgatagactcatcagaacatattgagctactaccgagcagtcttctgaattatatgatgcttattgatattgattcactaatggggcttacaattagtaatgaggaaatgcttctcgcccaatcgaatccatccatatttagtgaagcagtggttcagtatagaaatcttgaaagtaatttcaagcatctcagaaagcttagtagtatttatcctttgtctcaatcagcaaaggtgaaaatagcagaagttatgtgtgtaatagatgaacagaattcgccaaatgcattgtatgatattattttgttttcgttgaacttgttgtgcagatgcaaaggacgatcagaagaactaattgaatttgttgaccattgtgacttcagtccaatgatcttaaaaatgttgcatgctgtaatcgaagaaggtcagtattatgaataa

SEQ ID NO: 27521 - DNA, 1050 bp, Paenibacillus alvei TS-15
atgaataatactgtgattaagcgaatagcagctgatcttcgggtaagaagagtacctgacgaaaaacaggaatatttttattcaaggattgtgtattcagcattatcaatgtggatcagatattctactttagacgaggatatattcgatcactctgttgggaagataggcatgagtaaaagatatatcctgaacaagtgtcaaacttttgttgacaacatgattgaactgtatccttgcatagaaagttggttctatccagagaaacaagatacaaatccaactgaaatagtaaggaatagattgcaccaatgtggcgagcttgttgatgttggcttttttacagatgttgctttacccgactatgaagaatgctccataaatgagaaagtaagaataatcaggggaataccctcagaaggtttatacagaatgacaggattagcccagttaaaggtttctgaaaaagagaaccataactctgtacatttatttgatttctatgggctacgggataaatcagctatttcactactagatgaatatttgaagttagcaaagtggaataaacgaacaactattaatgggcatatattcaataaatatagtatgaaatctttttcaaatagctgggaatctagttgtattttaaaagagcatgatatttcaatttatcgtaatccaatgtatcaaaagggtaatcgtgactacggttttatgaaaaaagtgaataattgtatctatgtaagtcaaattaatgagtatttaattaaccagtacgaaattagacgatttatgtatggtttgaaagggaaagctaacaacccagtgcgggcaacttataaacgatatgacgataagaaaattgttgaacttaatcttttcaatggattaccaactcgtgaagaaagcatattgtttttactaggttggcccatgaacaatataaatgataaaaataatttattatttaataatgatgtgtgggagtttgtcagaaaaatgttaagtaatttgaacataaaattagaggagattgctaatggataa

SEQ ID NO: 27522 - DNA, 5241 bp, Paenibacillus alvei TS-15
atggataaatatagtgtttatgaaacccattattctctaagaaagaaactaattgattacataagagcgcaatatctcggagagaataaactacttcttaacgcatgtaatgatgttctcgaaaaacaaggtgtactatttcaagaaccctatattgaggcaaatcctgcttataaagtagtggagaatggatttgcaagttccgatatcccacctaatattaagaatattttggtagaaatgtcgaatcgtaatttaggcgttttccggcatccatttaaacatcaagttgatgctttagagagtttctacagaggaaaagacttatttataacaacaggtacaggttcagggaagacggaatgtttcatgtggcctatggtaagcagtattgtaaatgaggctgcatcgacccctaagtcttggcaacaaagaggtgtgagggctcttatgctatatccaatgaatgcactagtctctgatcagctcggaagacttcgtagaatgatcggcgatgttaatggcggatttaaagaagtattttataataatgtcaatagcagttctcgatttcctcaattcggtatgtatacgggtcgaacaccatatccaggtgataaagacgaattacaagataaggagttagccaagacgcttgcagagaatctattgaatagaagcgatgaaattaaacaaaagttaatagatatcggaaagtatcctgctaaatatagccttgagcaatttgttaatagtcttaatcaaggaaaacacgtaaccgatgataatgatgctgaactgatgacaagacaagaaatgcaacaactatgtcccgacatattaataacaaactactccatgcttgaatacatgctaattagaccaattgaacgtactatttgggataatactaggacttggttaaatctatcagaagataataaattattaatcattatagatgaagcgcacatgtataggggttcttctggtggtgaagtggctttattattgcgtagattaatgcataaattaggcgttacacgtgaaaaagtgagatttatattaacaagtgctagtgtgcctgctgatggcgagccatccattagagctttctcaaataatttaacggcacaggatcatgaacatttcacgttcgatattatatatggtaaacagcaagaattatctacaactgaagccatagatgtagctgcagatttacttgctaatatagacatagttcaatttttgggtgatgagaacattaagagaaaagctattgaaggatttgcagcgttgatagcgggggctaaaaaaactcagtttacaaattactttgaggcacaacaatggttatattcatttttaaacaagtttaaacctatgattaatattatgaaagtgtgccgtggaaatgcaattacttatcatgaattagcaaagcgtacttttcctagcgatgatgtgaatatagctagaagagctacggaaaccttgctggcgattgcaccgttagccaaaaataaggagaatcaaattttatttccggcaaggcttcatatgatgtttagaggtcttcagggaatctatgtatgtagtaatccagattgtgaagatgcaagcagttatgaaggattgagacttggaaaaatatattttggtgttagaagagacacgtgtgaatgctgtggaagcaaaatttatgagttaataaacgatagacgttgtggagcattgtttttaaaaggatatatttatcaaaactctaaagcacgtgactttgtatggaatacaatcggagaattgtacgacgatacttttaaagaggttcatttatatatagttcctagcaatgggattcataaaaagactaatgagagtaaaatcggatggttaaatgcagtaactggaaaattctttgacaatgataattatattgggcaaaaaggttttttacatgttgcatataataacaaagaattcaaaggtaaaccagggaaattaacttatcattattgtccaaaatgtgaaaaagcccattttaacccttcagattttgtgactaaaggaaatgaatctttctttaacttggtctctgaacaactacatatacaaccgcctactatatttaatgaagaattagttagaaagcttcctaatgcgggaaggaaagtgctgcttttctcagatagtcgacaacgagctgcaggactagcaaaagatcttacaagagctgcagatgatgaagcagtaaggaaagtaatggttctatctgcacaaaagctaaaagaatgggcggttacccataataaataccctactatgaatctattatatatggcgtttttagaggttgctgttactcataatcttcaactattttatggtgatcagaagaatagcttcgtaggcgatttgactaagatcaaagataaactgaagagggcggcgcgtagaaataaaaagttggattatgaatcaataaagactgatttcaattcaacgccaggattatacgatgagcagcttttaaagttgatgtgtagtagttaccgctctcttagtgatattgggttatgttatgtacaaccttgtaatcaagataagttagaagaagttgaagaggaaatgtacgactctaatattaatataacttcagaagagtttgaacacttatttgcatcatgggctaatattgtaatgaaagatagttacgcactgggtgatacgataagtgatgaggttcgggagaatgctcgtgcgacaagttatgatcgatttgggatagatgcaacaaaaattcctacggttataaagcatgttctatctcagaaaggttattctgaaaaagatattgacgttatacacaaatgcttattgaagtatacggctacacctcagggcggtgagaataagtatctaaatttaaatgttatatcgttggtatataatgcagatcaagaatggtaccattgccaaaaatgctcgggtgtttttgcgctgacattatggggaatgtgtgctcattgtggaagtaaacatgtccaggttatgagcaatgaggatctccgtcgatttgaattttggagaaaaccggtgttggatacgttagagtctatagattcaacagctataaccagcataaatactgaagagcatactgctcagttgtcacataaggatcaacggcaaaagatgtggtcgacaactgaagattacgaaatgagatttcaagatgtccaaattaatgatgatgctcccgttgatattttaagttgcactactacaatggaagttggaattgatataggatcattaacagctgtaggtttgcgaaacataccccctatgagggaaaattatcaacaaagagctggtcgtgctggcagacgaagtgctgctatttcaactattgttacatatacagatgacggaccacatgacagttattattttttgcatccaaaagaaattatttctggtgatgttagaaagccatggatcgatgtgaataatccaaagttaattgctagacatatgaatatgattattcttactgagtttatgtctagaatcaatgaaggtatggataaattaggggtcgaaaaatacttcaaacaatatcatcataatttttgtgattttttaattagttatcatagaacgaatagggaacttactgttgttatacctggttcagagttaataaacatttctgatctaaaacagtctttgaaagaaaaacttgataacatatgtaaaaagataaaaatgaacgcctcagattatgtaactgaaacaggagaacaaaaatctttactcgatgttttgtatgaagagagtgttcttcctacatattctttcccaaaaaacgttgtaggtttctacatagaggataaggaagggaaagaaatcgagcagaaacctgaacgatcattggatatggcaattagtgaatatgcacccggtcgtatcatagtcgtaaacaaaaaaacctataaatcgggggggatatataatcatcattctaagtttaaacaaaatttttatgagaaacctgctagaagttattttgaaaatggagagtatttcagagagctttattattgcaaaaatgatttttgtggatggtttggtattgcggctcctggaaataatgaatgtccattctgcaaaggacatgaaatagctatccaatacattttgaagccatggggattttcaccgattaatggaagaagtattcctgaatctgaggctgagaatgagttgtcttatgctgaggcaccttgctattctgcgacaccagcccaagatgatatgacagatacaagttacaaatatattaaggtggctaaacgcgctgatcaaactcttatagtgttgaataaagggccgaaatctaagggtttcaaagtctgtaaagattgtggtgcagctgtaactggggatgaggagttttcaaaacaaatcggaaaaccatttaatcaccccagatcctctaagaagtgtaatcactacgatattgagagggttttattaggacacaattttaatacagacatggtagtgttagaaatagccatagataacactaaaattaatacagatcttaatgatttatggattaagacggcagccttaacgctctcggaggcaattgttcttgcagcaggcaggttattggatgttgaatttaatgaaattaaaagcggttatagactacgatattccccagacattatgtatgttgatatatatttgttcgacagtttatcgagtggggcaggttacagttcagaggttgctaataagattaatgaactgttaagtgtgacagaaaaaatattaaccgaatgtaaatgcacttcatcttgccatgagtgtttaaaccacttttggaaccagagagtacaaaataaattagacagacgtattgcaatgcaattgcttaaatgggggcaatatggagatatcgcaaaggaatacagtttacaagaacagttaaatttgttcaagcctttgaaagagctgcttgagcttgatggttcagaggtcaagttaaataataatgtattggtgattgcaaacgatcaagtgaagaaaaatgtatatgtgtacccgacaatgtggaataaagcaaataaagtgatccctgataatgttatcgcgatctcagacagacttattactaatgctctgcctgaagcatactaccaattaataaataatcgttaa

SEQ ID NO: 27523 - DNA, 1638 bp, Paenibacillus sp. Y412MC10
atggaaactgcaatagattattatgaaataggcaaagtccgtacaattactgcgagttatgcaaagattttattccacacatctataggtacagggactgaaagattcgtttgtccagaatgtggagagtacgtagcatttgtaagaggtaacaatgtaaagcctcactttaagcatgctaagcaaaacgaaacaacaaaagattgtgaaagaagagttaattcacaatcatcttatacttctattcacgagaagctgggccttcctatgtatctccggacctatagtgagaatcagtatgagctttgtattggtttttataagctgggttatacattactacataatattgagaaggagcatgcgaaaataaatataaggcaatttgaaatggtgcatggcataaaaagagaaaataattacttaattgatcaatctaatttccttcctgaatctactacactattaaaagtggattttattgctactaaatatacaattcagtgttctaatttaaaatatgaatcccaattgaaagaacaatggggcggtttcgtagaaggtattttaagcgatggagctctatttacttataacgaatacggtggaagaaaaattagggtcaatgacgaaattacaacaggaacagagtatttatatttatgtaagaatgagcatctacttcttggtaatgaatcaattagccactttttttgcgggacgattataatatttaacggtgcaaagctagaagaactcaatatttataaaataaacttcaccccccagaatgatcaacaattttggagattaattaaattatgtcgagttcgttttaaagttagtttggtttctaaatccgcttctatagtgccaatatggccaccaacagtactaaatgataatcatattggctgtttacgaaattacaacaattttttcttactaaaagattctaaaaatgatactgttgtgtcttcttactttggtgctacttctacgaggttatcaagcaaggtaatctatgaaaatacacaattattagaaatacatgttccttcatctgggttagcattagctattcatgaaaattacacaatgttgcagaagaattcgggaaatatcaaatcttaccgtaattccattagggttcatgaccataataataaggatttagatgttcaaaaaaacagaattcttcctgtagaaaaaacaattagaatcttctcagagagtagatgtagtattttacatagccacggtggcatatttacacagtataaattaaatgactccaccccgcttgttattaataatctggcacagaatgatgaaattattgagataagtgggggccggcatcacaaattacttagattcaataaaacttcggatagtaataagactttagttgatgagagaattatccacaatatgttgacaagactcaatgggccttatgtaagtccgccatattggattaaaaaattaacaattcaacttcaaccaaactccaagctaagaggtttgctgaaatattatttaatgttaaatcgaattccagttgaagggctaagggtattaaaagtaatgtcaaatcaaatgaaagatgggattgatgatgagtttatcagctaa

SEQ ID NO: 27524 - DNA, 1971 bp, Paenibacillus sp. Y412MC10
atgagtttatcagctaatgatcaactcgaggtagtaaatgaattaaaaagtaaatattcaaaggaagagtttgattttattgtttcattattccctactagtaagctatcggaagaaataagaagcaatgagaaaaaattcagaaaatacttgaaggggtttcgtcctgataaactaccgctaaaacgatttcaggagatctattataaaagtatatttattgagaataatctggccttggctcttcatcttaatagcttattgaaaaattatatgctcaaaatggatagaataatttcaaggagaatagagcctgctaaatcgcttagagagaaaatacaaaataatgatatagatggttttataaatctagttgatattttagttaataataattacgaaaaagttgaacatattatagtgtattttaagttttttaatataaccttgacaagggagcagctccaatatgtggataatgaattacaattcctagtacagcgcaaagaattgagaattgaaattgaaaatgaatcggttgaaagatatgaacaagaaataaaggaattgaaaagtagttttaaaggtgagttaaaagagaaagagatgaaaataaaggaacttgtagaacagatagagcataacaaaaaggaatatgatgaaattctatatgttaactccgttcaggttgatgcaatggagtttaaatacaagagacatatggaggatatgataaaggaaaaaaagaatcttaccaacttcataagcgaactggaatccaaaatcacacaaatggaagtgcaaaataaatcagataaaagaaaagtttctgaattgacacttttagtaaatcagaaggaagaagaatttttaccattaatagagtcgaaatggaatgcttcaaatgcggctcttttcgaaaaaaaggtagcaattcaacactcaattgatagtttaatccgggatagggagattttgagattagaaattgaaaaatttatacttcaaaaaaatgacttggagaaaattatagagtctttacagatgaagggtggcacattgttttccgattttaaggatctgttatataaaattggagttcaatcggtagaagcagttccatctaatcaaagtgtttactatttatttggaaatcaaatggatgcagacgaagaaacagtggagcgtctcgattttatcgaggatttatctgataatttaagcatttctggtgtccaaaatttatatgctaaagatttttcaagatatttatatgcaattgttgtttgcggtatgagtccattatttattggatttaatggtagaaaaatagcgaatgctttatctcagcttttagcaggggcaactccagatattatatccctccctcctggatatgttgatagtaatgagttaattcatctagttaagagttcaagcaatagagtgattttaattgagaatgtaatagataacgtatcagagttagtctatttaccattattaaaacaaaataacgatcggctgatcttattctctatggaatcatcggagcctatcacattattacctagtagtattttgaattatttggtcccaattgatgtggattcaattatccaatatgtaaaaaaacctggggaactcattagaacaaatgtagttgaagccgttttcaagaaatctttcgaagaaagctcggtagaagctaacttaaaaacattaaaaaaattcaattctgtgtatagtttgccgctatcaaccagaataaaatgggcagagataatgagtgtgattgactctcttgagtcacctcaagctctgtacaatatgctggtattttcattatctatgttgtgtagtaggactggtagaactactgaattaaatcagtatgtagaacaacaagggttcagcgctgagacttataaaatcttatgctcccatattgaggagaattatagtgagtag

SEQ ID NO: 27525 - DNA, 1059 bp, Paenibacillus sp. Y412MC10
gtgagtagttatccgatcataaaccatatagccagggatctcaagataattaggtttaacaatgaaccggattatcagtttatatcacggattatctactcgggtttaggaatatgggttaggtattcgacagtagatgaaaacatcttaaatcccgacaaaagtaaaattggtgttagtaaaattcatatactgaacagatgtcgaccttttcttgatgaaatgttgggaatttatccagctgcccgcacttggttctatccttcggacacagaatctcatcctgttgaaacagttcgggacagattatgtatgagtggtgagctggtggaagttggatataatacggatctatcacttcctcatttcgaaatttgtccaattaataagaataatagcctcattagagggattcaaaatcaagaactgctgacagctatagggcttgcccaaatgaaaacttcttacagtagaggagctttgtcaaatcaagatttatttcaattctatggattacaaagcagcacagcgagtgtcattatgaatgaaataataagtgcattgaaatggacaaagtggaatgatgagtccccctttcaaatctataataaacatagctctatgagtttttcgaatagctgggattataaattcataggaaatggattagagctttctttataccgacacccaatgtattcgaaaggtaataagaattttgggtttatcaaatgcgtagatggagaaatgtatataagccaagttagcgaatatctggtagatgggtttgaagttaggagatatatgtacgcattaagatatgaagctagtaatccagttaaggccgcatttattcgatataggcaagaaaactttgtggagcttcatttgtataatgcattaccttctcaggaagaaaacttgttgatgttgttaggatggccggttcgtcatatacatgataaatacagactgttatttcatggttcagtttggggatttattgctcaggtattgagaaatctgaatatcaaactggaggaaaagattcatggataa

SEQ ID NO: 27526 - DNA, 5280 bp, Paenibacillus sp. Y412MC10
atggataaatatagcgtatatgaaacccataatgcgttgaaaaagaaatttattgattatattcgggctcaatacttaggggaaaacaaattcttgctgcaagcatgcaatgaaattatagaaaaggaaggggtgttatttcaaaagccatatattgaggcgaatcctgcctataaagtggttgagaatggaatcaaaaatagtaaagtcatcccggataaggttaagcactttttggatgaaatgtctaaaaaaaagctgggtgtattcccccatccatttcttcatcaagtcaaagcactcgaaagtttttataatggacgagacctatttataacaacaggaacaggttcaggtaaaaccgaatgttttatgtggcctatgattagcaagattgtaaacgaagctgctacatcccctgaaacatggcagcacagaggggtaagggctcttatgttgtatcctatgaatgcgctagtatcagatcaggttgggcgtctgcgtaggatgattggtgatgagcgaggttgctttcgtgaagtattctatcaggagacgggaaatagggggctacgtattcctcaatttggcatgtatacaggtcgaaccccctaccccggaaatataaacgaagatgaagataaagaattagctagtacattatttcagagtttgttgaataaggatgaagagactaaacaaaaactaagtaaaatcggaaaatatcctgcgaaatacaaccttgaagaatatatcaatggtcttagacaaggaaaacatataacacatgattacgatgctgaattaataaccagacaagagatgcaacaattatgtccggatatcctcatcacaaactattctatgttggagtatatgcttattagacccattgaacagtctatttggactcagacgagcaattggcttaacgaagcggatgataatcaattacttattgtaatcgatgaagcacatatgtacagaggagcatctggtggagaggtcgcattactaattcgaagattattacataagctgggggttacaagaaataaagttcgatttattcttacaagtgcaagcgttccttctgaaggagaaaagtttatattagaattctcaaatagcttgactgctcaggatactgcaaactccacatttgatattatttatggagagcaacaggaagtggatagatttggcaccatagacttggatcctgaaaaacttgcccaaatcgatacagctccattccttggggatcaggacagtaagcaactggccgtcaatcaatttgccgaagcatttgctaaaaccgggcgagtaaaaataaacagttatgaagacgcacagcaatggttatacacttttctaggaagatgcagaccaatgatttcgattttagatgcttccagaggtaaagcaatatcttatgaggaattatctaaaattacttatccaggaatcaacgaagaaacggctaggaagtgtactgaaacattgctcgcagttgctcctttggctaagaacaaagaggggcaagtcttatttccggctcgattacacatgatgtttagaggactacaaggaatctatgcatgtagtaatcctgattgttctggagctcatcctaatgatgaatttagaattggaaaactatatttcggtagtgtaagagatacgtgtgatagctgcggaagtaaggtatatgagttattgaatgatcgaagatgcggagcattgtttcttaaaggttatatgtatcaagaaccttttaatgcaagagagtttgtgtggaactcaattggagaactttatgatgaaaattgcaaagaggttcatttctatattatttcggaggaaaattataagaaaaccacaaaggaaacaaaagtgggttggttacacgcacctacaggaagactctttattgatgattcttatgcgaataaacaagggtttctgcatgtggcctataatccgaaggaattaaagggaaaaccagggaaactcactttcgattcatgtccaaagtgcagtaaggcaaaattgaacccttcggattttgtaacgaaggggaacgaatctttttataatttggtctctgaacaactaagtattcaaccacctaccatttttgacaatgatctaataaggaaactgcctaatgctggacgaaaagttttattgttttcagatagtaggcaaagagcggcgggactggcgaaagatttaactagagctgcagatgatgttgcggcaagaaaagcaatggtaatcgcagttcagaatcttgaaaaatgggccgctgctcaaaatcggcaacctacaatgaacatattgtatgtagcttttttggaagttgctgttactcataatttacatctattttatggtgatcagaagaagagtcttgtgaacgatatgaacaaagtaagagaacagctgcgtaggaatgaacgaagaaataaggcaatgaactatgaaaccttaaaggctgatttcaatactacaccaggtttgtatgatgaacaattattaaagttgatgtgtagtagctatcgttcattaagtgatattggattatgttacattaaaccttgtagtgaagataaaatcgatgaggttctagatgaactggacgataataatattaatctgtcagtagatgaattcgaaagtatatttgcttcctgggctaattttgttatgaaggatagttatgcattaggtgataccatcagtgatgaagtcagggaaaatgctaggccaactagctatggaagatttggaattcccgcgaacgggaagctttcaggaggaattcttagggtattaatcgaacagggctattctcctgaagaaataaacactatttataaatgtttgcttaaatatacagctactccacaaggtagcgaaaacagttatttaaatatgaatatgctaacactcacttataacaatagccatgaatggtaccactgtaaaaagtgtgcaggggtttttgctcgtacattgtgggggaaatgtgcacattgtggtgattcgcaagtcgctcaaatgacaaaagaagacttccggcgctttgatttttggagaaaacccgtaattgaaataatagaatcatcaactcctcaaccgataacaagtattaatactgaggaacatacggctcagttatcgcacaaggatcaacgtcaaaaaatgtggtctactacagaagattacgaaatgagatttcaagatgttcaagtcaatgatgatacaccggttgatatactcagttgtacaacgaccatggaggttggtatcgatattggatctttaacagcggttggactcagaaatattccccctatgagagaaaattatcaacaacgcgcagggcgagccgggagaagaagttcagcgatatccacaatagtgacttataccgataatgggccacacgatactttttattttaatcatccagaggaaatcatagctggtgaagtaaggaaaccatggattgatgtcaagaatccaaagcttatatttagacatatcaacatgattatattgactgagtatacttcacaaattcatgaaagcatggataaggtcggaattgagacgttttataatcaatactactcagatttctgcatgtttttagagggatataataagaaagaaaatgaagtgaatgttatcttacctgatcgcaaattaataaatttagttgatattaagagttccttaaaacaacatatggatgcgatttatataaaagtacagcataaagtagtagattatgttaatgaaaagggcgatcagaaatctttattagatgtaatgtatgaagaaagtgttcttccaacttattcctttcccaaaaacgttgttgggttttacattgaggataaagaaggaaagaatattgatcagaagcctgagagagccttagatatggcaatcagcgaatatgctccaggacgcacgcttgtagtgaataaaaaaacgtataagtctggaggcatatataattttcactctaagtttcaagtgggtaagtacgataaacctgccaggtcttatttcgaaaatgcagagtacttcaaacatttgtactattgcaagaatgaatcatgcgggtggttcggaataaatagaccagaaggaaacgaatgtccattttgcagacagcatgagatagacgtccaacatatgttgaagccatgggggtttgctcctgttaatgccagaagcataccggagtcagaagctgaaaatgaagtgtcctatgcagaagctccatgttattcggcaacccctactcaagatgatatgcatacaaccgataatcggtatataaaagtcgccagacgtgcagatcagacacttattgtcttgaacaaagggccaaagggaaaaggctttagggtatgtaaggattgtggcgcggctgtttcaggtgaagaggatatgaaacaaatttcaaggccgtatcagcatccaagatccagaaaaagatgctaccacaatgacatagaacaagtagtcctaggtcacaatttcaacacagatatggttgtttttgagtttacattagataacagaaagattaatacaaacattgatgacctttggattaagacagctgcaatgacactggctgaagccttggtacttgcagcaggaaggttattagatgtagagtttaatgaaattaaaagtggttaccgcctacgctattcgcctgaaactacttacgttgatatctatttgtttgacagcttgtcaagtggagcaggttacagttctgaacttgcgaacaatgtaaatgatctactaaattatgcggaaggaattcttgaatgttcatgtaattcttcatgtcatcaatgcttaaatcatttctggaatcaacgaatacagaacagacttgatcgacaggttgcattgcagctacttcgttatggtgagtttggtaaagtagaaaacggatactcgataatgaaacagattgatatttttaaaccactaaaagaattgatagagctgaatggttcaaaagcggaaatattacaaaataccatcgtaataaaaagcggagatatttcaaaacgggtgtatgtttatcctgccatgtggcccaataactataaagaaatacctgaggatgcagttgctctctccgatcgattgatcaacagagcgttaccggaagcatactatcgcctcatgagtagtaacaaggtacttgaaactatgaagactaaaaaagcatag

SEQ ID NO: 27527 - DNA, 1215 bp, Pectobacterium carotovorum subsp. actinidiae
atgcctaaaggcaccgcaacaatagttagtgttaacccgcgcgaagctaaactaaaaagaaaattgcgggagcacttacaatccttaggatttaccaaatcggatgcaggggagctacaggctccaggaaatactaaagatgtgattcgctccctccatagtgctcaacgagcagacaggctttctgcaaatcaggatttcatttcgcttaagtcagtaaagctgatgaaattttttgcatctggtaaagagattgatccagaaaatatatctcctgttcttgagcgagtctcatctggaacctggcaaggcgatctttttaggctggcggcgctatcatggtcagtgccggtatcaaatggatttgggcggcgtctccgttaccttgtttgggatgaaaataatggaaagttgatggggttaattgctattggtgaccccgtgttcaaccttgccgtccgggataaattggttggctgggattcgcatgacagaagttcccgacttgtcaatgtgatggatgcttacgtacttggtgccctccctccttacaattttcttcttgggggaaaactaatcgcctgcctgcttcgtagccgcgatctctatgatgactttgcaagggtgtatggcaataccgttggtgttatttctcaaaaaaagaaaaaggcgcgtctcctggctatcacgactacatcgtcaatggggcgttcgtccgtgtataaccgattgaagcttggtggaattcagtatttaaaatcaattggttacactggaggctgggggcatttccatatccctgacagtttgttcattgaattacgtgactacctgcgcgatatggatcatacctacgcagatcattatgcgttcggaaacggtcccaactggcgtttgcgtacaactaaagcagctctaagtgcgctaggttttagagataacttgatgaaacacggggttcaacgcgaggtgttcattagccagttagctgaaaatgccaccagcattctgcaaactggcaagggtaagccggatcttacttcattgctttcagcaaaagagattgccgaacgtgctatagagcgatggatggttccccgatcgatacgcaactctgaatatcgcgattgggaatcaagcaatctttttgatttacttagtattaatacgttaaacttggaccagatcttggagagaacaaagacagttggctaa

SEQ ID NO: 27528 - DNA, 1614 bp, Pectobacterium carotovorum subsp. actinidiae
ttggccatccgagcatcgaaatatggtcaatatacgtgtccggtttgtaaaaaaggcgtcatcctccgacgggggaaggtaagagtcccttattttgctcatttgcctggatatggcacgcttgaatgtgagaattttattctaggtcattcttcgttgccagtaaaagaaaagctcaacgttactgtaaagcggcgtatggagttacgcttgttgatctcaaccggaagagagaaccagagatggtcattagaactggcattacccacatgtaatttatgccgagctaggatctctctggatgtgggggggagaagccaaacgcttgatatgatgagtatggtaaagcgtcgccagattggtgctgagctttcagtgcggccttatcgtattatttccttttctggtgagccagaccctgagtttgttgctcaagtggaaatggagtgtcaggggctgccttcagtaggggccgctgtgttcaccgctttaggtcgtggtacatctggaggatttccgctggcgcaggaattaagatacaccgataccttcgcctttctttggcagcagcctgcacaacctgatttccctgatgaactggaagtcgaaagactggttagcaggcagggatggaatttggcccttgtaacaattcctgaaattctttctcaggagaatattgcgtggctcaaatgtttcacatccctccctgtcgttcctgccagatcttctgttactgcgatttggccattcttaactcaaaacacaagtgttaatcagatcgaatgttttcattcgaatacagtattgttgtctgcgaacagggttttaacgacatcgcgagaggatgggccgactatgcacgcacaaggtgcctcctcaattctctctgcggttggagtagaaaaatcacctgcattctttactcttaatcctggtgacagtgagttagtgggagtgtcttgcgctagcgacctggatgtaaaaatatttcttgccttctcttcccatgttgaatgttttaataaatatccatcagtggatttggtttttaccaaacaaaaaggagaacaagagattgtttcgttacatcagcgtagatgtgctgttgtcacaactgaagccagactgttgggatataaattagaatacctgtcaatgccgcctggggtggaagggatagcaaaaatagaggggctcaccgaaaataataacattaagcttttttcgggtaatagtgttgccccccatgacaaaaatatgtgcttactacacgcggatgctttatccaaattggctctttatctggcagatacagaatgttatctggaaatagaatttggtgggctggggagattatctctctctggcttttcccggttagcctcaaccgtcgggacaaataaaaaattatctccagtcctgcgttatcgactattcagtttcatacttcagatgcgtcttgtaacccccgattttactgtaaatagtgatgattcttcattaattgaggcattggccaacttacagccagaaccgcacctgttaccccattaccgcgcattggtaaaggaagttattaccagtgggtttgaatttaaccgcttgagataa

SEQ ID NO: 27529 - DNA, 1884 bp, Pectobacterium carotovorum subsp. actinidiae
atgagttaccactacagccaagaagcaaaggaacggatctctaagttaggtcaatcagcagttattgactttatcggggaagtttccccagttcttcgccgtaaagtctacactctcatgcctaaagttcagggattcagagtcgggagtccagcagagctcaaagagaaacagaaacgactcataggatatatgttccagacgcattcctcccctgaggaaatctatgcatggaaaagcttttctcttttttggaaattttgggctgaagagcacattggtaaaccattcccgatgtatgatgacttagagccaactgctaactccggcttaactttcattagggaacttgcagactctttccctaaagtggcgagagaagatattgaacgtttgtttatttttagcggttttgttgacgattcgaatattacggcagcatttgggctttttcgtccagcgactgttcttgctcgtgacaatctagttgatacccttcccattcgtttggatgaacttgaagagcgtattgatttcgctgaaatgatggtgaaggatagtgctaacagtattaaacgtcttgaatctacaacaggttcgtttgcctcagagttaaaaaaatccgttagagatatcagccataatctaaaaataattactgagatacaaaacttactaaatgtgcaaactaaacgttctgataccataatgaaggctattgaagaactctatgcttttaataaagagattagttgtactatagaaagcattgattcaaaaatagattcttactcattagctgtaggcgaactttcgttacgtgaaaaagtactgaataacatgactgaggaaatttccgaattacaaacctcattcaatactctttgtgaaaaagaaaataaattgactgattcaggtagcgaaaatagttatagagacctttctgaaagaatcgactatcttgagaaaaatatatctaagaatggttctgactcagtaatgaatcaatgcgttaaattttacgaaaataaattaccggaaccatatggaaatattttatcgtatgactgcgcatttaatatgattgcatcaaaccttcaggctgttggtttgattaaaggttcctcttttactgtggctcgattaacattggcggcatttatttcagggcagatagttcagttctgtggttctctggccgatattgtagcagacgcgattgcaactgctgtaggtgctccaacttatcatgagtggagaattccggtaggccttatttcagatacggccgcgtttgattttattgagtctacagctgattcatctcgttgcctagtattgaaaggtgctaacctttcagcatttgaaatttatggaactgcaatcagagatattgtcgtccagcgtcaattatatccaacaagttacgatcatcttgcattaattgcgacctggaagcatgggcctgctgtatttcctgatggtggaacgttagctgaattaggtccggttattgatacagataccctaaaaacgcgaggtatatctgctaggttacctgggctaaattccggcggtcttgcaaaggataaatgggatgaaattgaaggactcaaatctgatggcgctggtgaatatatggatgagttgagagatctgctggatgaaactggatttaatggtggtaatttgtggcgaaggatggtcaatcatttttactcgtctcttatgaagatgcctgatggaaatcatatttatgatcttcattcagtcttgtctttttatactctcccctgggccagaattaaaggtggtcccgttaatgaaatcgctgacattgccgctcgtgaattaaaagagcatagtgaaaaaatatcagcttga

SEQ ID NO: 27530 - DNA, 1044 bp, Pectobacterium carotovorum subsp. actinidiae
atggaatggagagccgtgtcacgcgagaaatctctggaaatagtttcggctgcgataaattgccggttctctggcgagggggtgagaatttcaactgtatctgagtgcttacggagtgtgctgcatcaatattctgtatccgatatcaaggaggccaggcaagctgtagcctcacttcgactcaccagtgcggtaagacgtaagctatcgcctttatggccagacattacagatactggcgatgctatacacccgggcattatggcgatactggacagcctggctgaattgggcgacgtgattaggttacagggtggtaagtggctgacggcacctctgcatgcggtacggactaataataagatggcaatcttacttggaggggatcctacatatgcgctttcaacaggtatggttacaagagctgttagcagggttcgcctggttgagcaagaggtttgcgaaggcatggcggaactatgggatgcaaatgagtggatcggtgctccggtagaaggtaatgaaatatggtcattaaagttattggataaaaccatatcccggtttaccgatgcgcctaatgatgttggagaagccacagcatatgtgcgaggtaaatggatccccttgccagagctactttcccatgaaaagaagatcctcttatgtagaacgtttattagcactggtttttcctattttttgggtgaatttgtcgcggggcgtctatggaaaatgagttccattgaatcttctgatgatgtcagaaggctacgcttctatcttgatataaaagaaaattgtccattgaaagttaaaattaaaatatctcatgggttagcaagactacgattagctcgacgactaccaggaagagaatctaaggcacttttgctcggctggcgagactcaggccctgaaggcgagcactcatggataacgcatcatgtattccctgaagaagtattaccaatagtacgttgtgcttttgagggactcggtattattttaattaatgaatctacgcgacggcatgaaatatga

SEQ ID NO: 27531 - DNA, 5511 bp, Pectobacterium carotovorum subsp. actinidiae
atgattaataaaaataaggtatctgagcgttcgggtatacatgaaacagcgaaaagtctggctgataacctgaggcaatatattgaggcgcagtatcatatccgtgatgaagggttgatagacgaacgccgcgcgttattgcagcaagccgaaactattgcacaaattccttatatagaagcaacaccagtctatgagccagggataccgtacagtgaactgcctattcccaaagcggcaagtaatgtactggctcagctatcagaaatgggggttggtctttatccgctcccctatgaacaccagtcacaggcacttgcgtcatttcttggggatgaagcctctgatctggtcattgctacaggcacgggttccggtaagacggaaagctttctgatgccaattattggcaatttggcgattgaagccgccgagaggcctgaatctgcatcccttccgggttgcagggcaatattattatatccaatgaatgcgttggtgaacgatcaactggctcgtatcaggcgtcttttcggtgattctgaggcatctaaagtactgatggctggaagatattctcctgtacgctttggtggttatacgggaaggactccttatcctggccgccgaagttcaaaacgagacgagcaattcatcaagcctcttttcgatgaattttatagcaagcttgcagataatgattccgtacggacagaacttgagcgtattggccgctggccaagcaaagatctcgatgccttttacggacaaggcgcatcccagactaaaacctacatatcaggtaaaaaagtgggaaagcaatttgttgcgaacaattggggggaaaggttagttacacaggcagaggatcgtgaactgatgactcggcatgagatccagcatagctgtccagaactgctgataacgaactactcaatgcttgaatatatgctgatgcggcctattgagcgtaatattttcgaacagaccaaagattggctcagggctgactcccgaaatgagcttattcttgtacttgatgaagcgcatatgtacagaggagccggaggagcagaggtagcgcttctcattcgtcgtctttgtgcccgtctggatattccccgggaacgcatgcgttgtattctgaccagtgcgagccttggttccgttgcggatggcgagcgttttgcccgggacctaacgggtttgtccgaaacatcgccacggaaatttcgcataattgaaggtacacgggaatcacgccctctctcacgagttgttaccaatagagaggccgaagcactggcggatttcgatctgaattcatttcagtgtgtagctgatgatctggaatccgcgtttgtggcaatagatactctcgctgcacgaattggctggcaaaagccgacaataaaaaatcgtagcgcactacgtcattggttatttgataaccttactggttttgggcctcttgaaacgctcattgaaatagtttcaggtaaggcggtgaggttggatgttctaagtaaaaaactttttccaaactcccctcaggaaatcgcggtgcgagcgactgactcactacttgcattgggatgctatgctcagcgaaattcagataacagagtgctaattccaacccgtatgcatctttttcaccggggactccctgggctatatgcctgtatagatcctgagtgcaatcaacggctaggcaatcacagtgggccaaccattcttggccgcctgcatacgaaaccattagatcactgtacatgtgcatcaaaagggcgagtctatgaattactcacccatcgtgactgcggtgcagcctttattcgtggatatgtcagttcggaaatggattttgtctggcaccaacctaatgggccactatcagagggagggaatattgatcttgttcctgtagaaatattagttgaagaaactcctcatccacatagcgattatcaagaccgatggctacatattacaactggacgtctttttaaacagtgtcctgaggatgattctggatatcgtaaagtttttatacctgacagggttaaatcggattcggaaattacattcgatgagtgtcctgtctgtatgcgcaggacaagaaacgatcaggatgagccttccaagatcatggatcatgtgactaaaggcgaagcacctttcaccactttagtccgcacgcaaatgtctcgtcagcctgctagtcgttcaactgatgtcagacaccccaatggcggtaaaaaagtccttattttctcggatggccgacaaaaagcagccaggcttgcccgtgatattcccagagacatagagcttgatctgtttcgccagtccatagcccttgcttgttctaaactggaaaagatcactcgggacccacgaccaacggcggttctttacctcgcttttctgtcagtcctttctgagcacgatctgctgatttttgatggtgaagattccaggagagttataacagctcgtgaagagtttgatcgcgattgtgacagcgatctggagcaagcttttgatgataatttcagtcctcaggaaccaccgtcccgatacaagatggcgttgcttaagcttttatgcagtaactactattctctttcgggaacgactataggttttgttgagccatcaccgcttaaaagaaaaaaattgtgggaggctgttcaggctaagaagatcaatattgagagcaaagatgttcatgcgctggctgttgcctggattgataccttactcactgaatttgctttcgatgagtctattggttcgacattacggagtaaagcggctggtttttacaaaccaaactggggcagcaaagggcagtttggaaaggcccttagaaaagcacttatgcttcatcccgggatgggggaattttcagttgaggccctggaggatatcttccgtactcaactgacatcagggaaagatggagcgaagtttctttctcccaactcacttcgcctgcacgtcaatcttttgcatatctggaaacaatgtcctgactgtacggcgcttatgccatttgctttagaacattccatttgtcttgtttgtggtagcaacaatgtcaaaactgtcgatccgtcggaaagcagttatattaatgcccgaaaaggattttggcgttcgccggtagaagaggcgttcgtttcaaattcgcgacttctgaaccttagcgttgaggagcataccgcccagctatcgcacagagatcgcgccagtgttcatgctactactgaactctacgagctgagatttcaggatgtccttatcaatgatactgacagacctatcgacgtgcttagctgtacgacgacaatggaggtgggcgttgatattggctctctggttgctgtggcattaaggaatgttccgccacaacgagaaaattaccagcaacgagcggggcgggcggggcgtcgtggtgcttctgtttcaacggtggtgacatattctcaaaatggccctcatgacagttattatttccttaatcctgaacgtattgtcgcaggtccccctcgaacgccagaagtgaaggtaaacaaccctaaaatagccagaaggcacgtacactcatttttagttcagacttttttccacgagttaatggatcagggagcgtatagttccggagaaaaaacatccatgctggaaaaggcgcttggtacaacgcgagagttttttcatggggcaaaggatacaggtctcaacctggagggtttcaattactgggtgacagaccgtgttttgtccaccaatggtgatctgagaacgagtgttgcggcatggcttccttctgttcttgagactggcggccttacacctggtgactggtttgctaaggtagcagaagagtttttaaatagactccacaatctggctgaaaatgttccactgcctgtcgtttttgcaggtgaagaagacgagagcgatgatgagaacattattggggcaaaatttgaacaggaggagttgctcgaattcttgttttatcatggtctgttgccgagttatgcattccctaccagtctctgtagcttcttggttgaaaaagtcgagcgaaattccagaggtacttttgaggtacgcacggtacaacaacctcaacagtcaatttctcaggctctcagtgaatatgccccagggcgattgattgttattgacaggaaaacctatcgctcaggtggtgttttttccaatgcattgaaaggagaaattaaccgggccagagtgcttttcaataatcctaaaaaatttgttcattgtgataagtgttcttttgttcgcgatcctcataaatatcagagtgacgacagtatttgtcccatttgtggtggcatgctgaaagaagaaataatgattcagcccgaggtatttggggctgaaaatgccagagaacttaatgaggacgatagagaacaagaaattacttatgcaacagtggctcagtatccacaacctgttgatcctgaagattttgaattcaaagcaggtggagcccacattctttttacccacgcaacagatcagaaactggtgacggtcaaccggggtaagaatgaggggcaatccagtggtttttcagtatgtactgagtgtggtgcagcctttgtttttgattcttactctcctgcaaagggggcgcatgaaagaccttataaatatatatcaaccaaggatacaccacgcttgtgctccggcgaatataaacgcgtttttcttgggcatgatttccgtacagatttgctcttactacggttaacagtcgcatctccgcttgtcactgatacttcaaatgccgtcgttctacggatgtatgaagatgcattacattcaatcgctgaagcactccggcttgccgccagtcgtcataaacaattagatcttgatcctgccgagttcggttctggtttcaggatcttgcccgctatcggggaagacgctcagacattggatctgttcctgtatgatactttatccggtggtgctggttacgctgaagttgctgccactaatctggatgatattcttacagcaacgcttgaattactggaaggctgtgagtgcgatacgtcctgtactgattgtctcaatcatttccataatcaacatatccaaagccgtcttgacaggaaattaggtgcatctttacttcgttatgctatgtatggtgaagtgccatgctgttcttcccccgctgtacaggtagataaactgtcgcaattacgggctagtctggagctggatggtttccaaagttcagagggcggcacacaagaagcgccaatgattgtcgggttaaatggtcactctgttacacttggatgctatccaggtcttatcgatcggcctgacttcatgcacgacgtctgtaaggcgagaaatgtcggagaatatctggcgctgaatgagtaccttcttcgttctaatcttcccgaagcgcaccagaaggtcaggaatctcttacgataa

SEQ ID NO: 27532 - DNA, 1221 bp, Pectobacterium carotovorum subsp. odoriferum
ttgaaatcagctaagtgtaagaacaatggcgagaaagcccctgtagcacacgttttcaccaaagaggcgagcttaaaacgcaagatacgttcacattttacactgctgggctttcgaaaggggcctgatggaacgcttgtgcgccctgattcaggaaaagaatcaatccgtcagttgcaccgtgctcaacgtgaggaacgtctacactcatctgagcactttatatctgaattcttgccaagtgccctaccatattttgcaaatgggagtgagattgaccctaccaagattcgcttatcgctgataaaggtttctgcgaattcgttcgaatccaaactctttagagcagcatctttaacttggtctgttccagtatcaaatggttacggtcgtcgcatgcggtacctcgtgtgggacaaaggacatgatcgaattgctggaatattcgcattgggagatccggtttttaatttatcggtacgtgataatctaatcggatggacatcgaatgatcgctcaagtcgcttagttaacatacttgatgcctatgttcttggcgcggttccaccatacaatatgcttttaggcggcaaagcgattgcctgtttaatacgctcacaagaagtatatgacgatttcctacgaaactatggttcaacaacgggcattatatctggtaaagataaatacgctcacttactagcagtaacaacaagttcttccatgggacgttcatcactttataacagacttaaactagataatgtgcgttattttgaaccaatcggctataccgttggctggggccattttcatattaccgatgagttatttggggagatgcgtgagtatctacgactcgctgatcacccctatgccgatcaacattgctttggcgaaggcccaaattggcggctcagaactattaaagctgcactaaaacaacttgggattaaccaagctgttctccggcatggaattcaaagagaggtctatttttgccagttcgctgaaaatgcaaaagaaatactcgcaactggtaaaggtgtgcctgacctttcaaccttaaaaacgatcgatgaaatatccgaacttgcgcgtaagcgatggattgaaccaagagctctgaggcaggacgattataaaaattggagtcgggacaatatatctctactaattaaaggatcaaaactggacgtaataattagtaaaattgcctaa

SEQ ID NO: 27533 - DNA, 1065 bp, Pectobacterium carotovorum subsp. odoriferum
atgaacgacattaaaatacttaaccgtgttgattgcctaaagtattcatctcgctcactaggactccctgacttgacaaggcttgataatgcgctaatcgctcaagcgttgcgaagaagcgttttcattgcggccccttgttcaatgcgaacagtatgttcactcgtaatgaattccctcggtccgctctctgacgagcctgaaaagttaaagatactcatcgacgatgttattgacgatcttgtcaacatgggtgatgttcttgaaatgcggtacgaaatcgccggagaaccgaacttcattttgcggcctgcaccaccagcatttgtgcttcggcgcgatggcacgtttattatagtgggagttgctggtgatgagatcactccaccacaggcaaatgattacaatctcgtttatcgcttaagtggtttgagaacactcacaccaagcaatgttcagtcctgtcggcaaacacttatcgatctcgggctcattgagttacccatgaatgtatggctacatgcaccagtttcgatcacagccgacaaattcgtcagatcgtgggtcagcagactgccaaacgatatacatccggaaaaaatcgagaatcttgagatgatcgatattagcaaagcaacttcatactataaaggcagatggcagtcacttaacgaacaacatgctggaatttatattgcccgacgctcacaacgctatggcgccaaactgtggtgctttgccgaaattcgggacggattagttcaacgctttgttgatattcattcaagagatgctcgcgttcgagattgtgatgaagcctggcggctactggctgctttagatgcactgtctggctctccacaacaggtcagggttgtttatgaaaaggagatggctgtgctgtcctttacatctcctcttccttcttgggcggttaggcgtcttagtctggtaggtgaacgtttaaagccacatcgcgccttgctagaattttcactgcctttacagaatagtgaagaagaacttcattggctggaggaaaccctctggctcactcggaattag

SEQ ID NO: 27534 - DNA, 5547 bp, Pectobacterium carotovorum subsp. odoriferum
atgaagacgaagacagccacaatccaacaaacaattgacgaattacggcagagtctgacgcattatatcgaggcgacatatcacatcggccacccttccatagtcaaacagcggcgtgaactgttaaatcagatcggtggaatctatcaagctccatatttggaatcaaccccccgctataagagcgccagtccctatgctctgattgacagtttaccaccagcagcacttgaagcgttgagagtactttccgacacaagctcaggaaaaccagtaatctacagttccccctatacccatcaattggaggcattacatgagactctcaacaataatcgaaacctcatgattatgactggaacaggttccggtaaaaccgaatcatttcttttaccaatcttgggcaagttcgcaattgaagcccgtgaacatccagaacgctttaaaaaatataacgctgttcgcgcattagtgctttatcctatgaacgcgctcgtcaacgaccaactaagtcgattgcgaacaatgttcggggcccctcagaccatcaatctattcgaaaaatgggcgaagcgtcccgctctattcgcacgttatacaagccgtactccatatgcaggcctccgcacaccgagtaaagatagcaaacgactagcatccattggtgaatttttcggcgagatagaggatgcgaaacggcgctatgaacaattaccttccgacgaggaggagcgtcgagcttctgaactctttggtaccttaaaaatacggggaaaatggccggccaaagagagtatttccgactggctgggtaaagctcctgtaccttgggcgaggcgagcaatctgccgtccacacgatgcagaactaattacgcggcatgaagttcatgcaactccacccgaccttctaattaccaactattcgatgctcgaatacatgatgatgcgtcccattgagcgaggcatatttgacgcaacgaaagaatggttaaatgcttgtccggatgaaaaatttcttgtggtacttgacgaagctcatctctacaggggagcacaaggcgcagaagtcggattattgatacgcagactaagagagcgtcttggaataccagcagagaggttccaagtcatatgctcgaccgcaagcttcagtgaggagggtaaaaaaaatgctggcgtattcggcgcacagctttccggagttccggccgaatcattcgtgtcaatagttggagaactacagttacgttcccctgaaaaccatggttcaatggtcgatgtaagcaccctcgccactgttaaccttgagcagttctattcagaagaccgcagtcaacaattggcagcgattgagaactttttaaagtttcgaggagtatctgtccaagacgaaagagatgtagacgctaaactttatctagcactgtgcgaatacgcgccattcaatcgacttgtcaatgaaaccatgactgctgcggtatcgctctccaaactgccggaaattatctttggcgatataatctcatcggatcttttggagaaagccactacagtattgctcgcatttgggagccgcgcaaaaaaaacaccagccgaagctagccttctgccatgcagaatacattcattcttccgtggacttcctggcttatggatatgcatggatcccaattgccccgatgccccaagcggcaagcgaagccctgccggaagattattctctcaaccacacgagcgatgcagttgcggcgctccggttttggaatattatacttgccgtcactgcggtacttcttatgcaagagcctatacaaatgatgttacgcagccacgctatttatggtccaaagaaggtgaaagaattgagactgcttcagggcttctagaggctctacatcctcttgatctcctaattgaagaaccatcatcggatgataaagctaaggccgcctactatgatcttgtttcgggccaactcaatccagatgttttaggagagaaataccggacagtgttccttgctcctgcgaaacccgtatcagatagctcgaaaaatacaactcgcggcgcgcgcccagggcaattcgctccctgtgcatgttgtaaccagatggctggtcatggacaatctagcgttcaggatcatcagacaaagggcgatcagccgtttcaggctttattggggtcacagcttagaatacagccccctggtccacagcaacaaacttcttttgcgccgcttcgtggacgtaaggttcttattttctcagattcccgccaagtagccgctcgtctggctggtacacttcagaactattccttacgtgatgctgtgcgggcgctccttccgttaggttataagattcttagcagcgatccggacttctccaaaactcttgtgctcaaccatgcatacttgtctgttttagtggctgctcataagttaggcgttcgactaaggccccaactgggtgatgcagaaacactttcagaggtagaaggactaagtccaggaccatctcctacaggtatgcagctctttcaactcttcacttcgttgtcccgctgtccgcagcgtcttatacaagccatctccgatacggttaagcatacgaacatgggactcgatctggaagccttggcgatcgccacgattggcgagtcccctcacacttcgtctaagattgtaaaatttcccgatctacctggggtcgccgaaagcgacgaggctaaattgacagtctgccgagcttggctacggtgttggactcttgatccgggaatctggttttcagacatgcctgacacctggtggaatgtgcgagtgaaatcccatcagggggtatttactgccatgaaccgagttcttgtatcgaagcaatcgaaatcgatattcaaaaagcattggcttcctacacttctgactatttttaccgagcaaacaatgggaggggggcataggctacttgcttcgaagctttctcttcatttgaatggccagtggcggcgatgcaacagttgcaaatctgttcatcgtccagtcgggactatcagtacatgtattgactgtgaaagttcagatgtaagcaactttgatcctacttcagatgaggtttacaaggcacgtcgtggtttttaccgtgaccctatcgcttcagcacttgatgttgaagacccccaactgatgaccattattgcagcagagcacacagcccaacttggagcggcacagccggatgaagccttctctcacgcagagcgacacgaaataagatttcaggatatcgatgttgcctggagagataaaaatcgtccaggtgaacccgctattgacgtgctttcaagcactacaactatggaagtaggtattgatatcggcgatctttcaggcgtggcacttcgaaatatgccgccaacccgcgccaattatcagcagcgtgctggccgtgccggccgacgtgccaatgctgttgctactgtcgtagcatttggcagcgcggacagccatgacgaacattattttaccgatcccgaggaaatgatacggggtaatgtgattgacccccgactcacattagaaaatccggagataacacgacgtcatcttcgcgcctaccttcttcagcgctaccatgaagaccgtattcctggactaatacctggtgcggatcctaatttattttccgttttgggcaacgttggtgatttcaaaacacgggggcctttgctcaaccgttatgattttgctaaatggctagaagataatatacaggacctcgctagtgctgctgatcgctggctacccacagagttgtcaccagaagatcgccatagattgattaatgaaatgatggttgacgcgaaagctactattgacgaagccatagattttattcagccagaagacgaagtggtcaacgccaccctagaaaaaagtaagaacgactttggtgaccaaaccgagaatgagatgatgaacgagtcggacgacaacacacgtattgttgatcctgccacagataaactacttgaccgtctcctttaccgtggagtagttccccgctatgcgtttccaaccgatgttgtggcatttcacgtttttaatcaacagagatcaaccccgttcaaatcggttattgattatgcacccactcagggacttgcgctggctctatctcaatatgcaccaaacaagcaactctggataaacggcaaacagtatacttccaaagctatatattctccttatccggccgaccgacggaatgcgtggggtaaacgaaaactctacttcgaatgcagcacttgctcacatgcaagaactgacgattacctaaaagaacgggagaacacgacagaaacgtgtccagcctgcagcacccccaactcttttgggcctgcaagagtctggttccgccctgtcggctttgcccacccaatcgaaactccgccggaaactgagccagattcaccaaacgagaccgcccgggcgacacgtgccaaattagttatgcaaactcctaaacctgacaagggctggattcaagtatccgaacgggtacgtgcttttaaagcgaaagaatttcttttggtatcaaatacaggcatcgataaagatggttacgattactgtctcgcctgtggtcgaatcgaatcatcggcggctcctgaggaactactctcccaaccccacgcaacaccatttcgcagtgaagaaggccgtccctgccaaggaggagccgcaaaacgtcacgtcattctcggaactgattttaaaactgacattgcattattttcattcccgctaatagagccgttccggttgctgcccggcagtatagaagctgattctgtacttagaacgctatgcgaagctctagccaaagcggcgtgtcaaacgctagatattgaaccgggagaagttctagccgaataccgcccagcgttgacagaaaaaggagcaatcggtaacgaagttgaaattttcctatacgacacattggcaggcggagctggattttcgaccgaacttgtcaatcgggcaagagaattgtttgaacacgcacgcaacctgctagcaagttgtccagaaaactgtgatacatcctgctatcgctgcctgcagagtttccgaaaccgaatggaccacgcgctactagatcgcaaactcggtattcagtttattgaacatgcgtttgatggtggctatccatcttatcctgccgagcgaactcgacgatctcttgatcttctcgcttacgacctaattcgacagtatgggaacgacttttctttctctcgtgaagttcaaaaatatgacactgaagctggaagcatagtaattccaatcgttgctacacgcttagccacgggcgcagaaacttggatatcactcagttcgccactggccccagcgattccgacagaacataaactccagaaacttagtgttgaaggagcagcaaaaatggagtgtgctgatgaccttgtcattcggagacatttacctgaggcaagtttgcagcttagaggaaaactgagataa

SEQ ID NO: 27535 - DNA, 1434 bp, Pelosinus fermentans JBW45
atgagaaaggcgtatgatactattcttcaatctgaggtagctgcggttttagctgccaaaagtggcgggtgtgagccgtatcgttacgaatgtgccaattgtggagaagaggtgtatgttgccgctcgctacagcaccaacatggtccctcatttcaggcatcttagcggaaataatgatgtcgcatgtgagaactatcttgggcagtatggcgcgataagtatagattctcgttcaagaaaaagcaatcgtgaaagagtagaattccattttgaaaataacaacaaaaagttttatttagaacttcgcttcagcgcagatgaaattcagtactacgggcaggaaaatgttgatttcgagattagaatgaacgcttcagggcctccgttctatattttgccaatcaataacattcattttgcgcccgatgctcctacaccgatttccttgtacaacttctcattttgctattatttatccaatactcttactgacacaagacggaaatacgattttttgaaatctgggaatacgcctagctttttcaagttacaaggtaacgatagtgatttcaaagctaaattagtacgcggtacagttttgtttactaatgttcagtatttcgttgtattccagagcaaatattcaactccacaaggtattcgctttcctgatgcaatacaggtaaacgagacgtttcgtttcgagacgatgggattaaatttcttaggtatgactttatcaatacagaaaaaaacagcggatatagacgagctgttgaaaacttggggttacatattagaggaatctgaaatgctcacactactatggccccctgcgccagtgattgatgatgttagtgttgtaacttcaaatgaagcttttgtatttacgagtttcgagttgcaagcgcatgggaacattaatgttcattcgacggatattttgcgagtcaatcatggtatttctagagtattggttaaacaaaaaacaaaaatatttaagaaaaatgctgagattgttattgataagttcaaatcgcctattgacgcttataacctgattactctatttgaatttgcagcagttagtttctctattcctaattatggcacatggtttcttttcaaccattcaggagttagtcctttgaaaactggacaggttgtttacttgacaccggaaagtgtgattaaacagtatgagcacaactatcttacccaaattatttatccgtgtcgtcaaaaggaattggttaatgaaaaattgcttgacgatattctcatgcactgcaagcgaacggaaacacttgaatttaatcagtttatgtcgctggaactgagcaatactacttctcaatacattgataaatgtagcgtttcgggttctattaattcggtcgcaaaacaatttatcgtggaggggctgttatga

SEQ ID NO: 27536 - DNA, 1584 bp, Pelosinus fermentans JBW45
atgaagtatctttctcaactaaccgaagatgaagtgcgctatatttgtttagttgtgccttatcagcacacgaaagattatttttcaaaaaatccagaggagtttgcaaaaattcatccgggatttcgaggtaataagatttcagaagctacggcaagaaaactgcttttcgattttagcagcaaacgctttatttcatatttcattgagaaacatattagtgattggctttctcagataaaaaaacactacaataacagaattgaaactggtgaaagcaaagatgttgctttcttaaacacattaccgttctgttttttcactgagaacgttggtctgtactttaaacttatcaatgaagaatattctgaagaatacattgcgctaatgggtgcagctataaaatctattaaagaagcgactgacgaacaagacagattaagcaaagaattgaaagccagagattcggatattaggaatctccatactgaatttgattctataaacttagatttggatagaaccaaagctaagttaaataagcggttgtcggagattgacgctttcaaaatcaaacttattgacattgaagaactcaggattgccgcttcgagggataaacaaaaaattgattctctcgaaaatcaaattatagcttatgaggaagcaattaaggggctaaaaatagagttggacgaaagcaaagtcagcagtagccaactcgaagaacaaatacgggaagagttggaaagacaacaaactgtcaagtggaatgaacagcaatcaataaaggcatcaaaatgccctagcgatattgatgagttcaaagactatctgggttacaatcttaaagatatcggtgtgcctaatgacgcatattgtactctattgaaagagcatttaagtaaaatcctctttcagggtattcccatacttgttaatcgctcaacaggcaacaatattatgaaatgtgttgcaaacacgctaatcggacaaccaacgattaaaacacttatttttaacaaggatatctcgactgaagaagtcagccatttcttatcattgggcgcacgtattgtgtgtttggataactttctcgggaattttaacgaaacagaattgctgcctttgtttgaaaaatacagagataaaatcatcttcttgaccgttgcttatgatagaacaatcaattacatatcaaaggagtttttgcggtactgccattatctcaatgtcaaccgaatcaaggcgttaaccgccaacgcacatttaactgaagacccgtcaacaatagtggaagtcgattttgatcctcagtgggcgggtgtagaaaaccggtattctaatttattaagagaagtgttgcgagaattaggcttccctcaaagtctgattgagaaaaagtgcaccacagtatttaacgaacaagatttatgccaattactggtatttgatgttttaccatactgtgcggacgtattgcaaattgccccatataatacatccgagcgattactcaaatatgccggagatgatggaagatgcccatgcaaaaaactgcttaaggagtggttcgcgctatga

SEQ ID NO: 27537 - DNA, 1020 bp, Pelosinus fermentans JBW45
atgaatgatttcttaattgctatgtcaactgacatggacattagccgttatcagagcgaatctgatgactcattcatcttcagactttgctattcggcgttaggacagtggtgccttcgaacagctcaaaatttgtcaggaggaattgcgggaacaaccaaacacaatcagacaatcgtgttgaacgaattgctacagcgctattcagaactgtttcctcgcgttgctaacagattcatcgatgccaataatcagcaggcgagcctgcctgttcatatacggcgggtatacgaagaaacgggttatcttttaactgacgataacaatcggaatcaattagccaatttcgagcgaagcattacaattggaaatacttctttgttttttggcgttctcaatatggcttttaccatgaatgggtttggcgtattttcaactcccacattatataagtttacagcacaagagtttttaatcagagataccttaacatgcgaagaatactttcaatcacgatttgatgttatagatttctatgaaagagacataaacattgacgaactagaatttttcaatccgctatcgaacaatgtcccttcattatcttggtcgaagaaaattgagacagattgctcagtagcccgaaaaagtgagatgggcccgttttatagagtgatgcgcgaatctgatgccacactgttgtttgctgaagaacccatcgaaccacaaaatgatagcttaatatcgcatgaatacaggaggttatattatgcgctcaaagcgcactatggtaatcccctgactgcaagagttgtaaagaaggatattaaatactctgaaataaaaattcacggacatttaccaaaccgagaatactattatttgctgcttttgtcgtggccagtaaatcacgcttttgacaaagttaactttttagtcaaaaattgctttgttgcagaaataatagctactttaaagaatattggaattgacgttaaaggaggaaatgcaaatgcgtaa

SEQ ID NO: 27538 - DNA, 5208 bp, Pelosinus fermentans JBW45
atgcgtaacttaaacggagttcaacaatactatcaggcaatccgtgatagattgaaaaactacataaaatcggattacttagccaatagtgaaaccctactcctttatgtcgatgaccttctgggagagctttgctctgagcataccaatatcgcccgcgagccgtatatcgaaacttcggcgtcgtataaaaaagtacataatggaattaaaaactcacagcatatcgaacagggcgtaaaagaatcgttgttgaagcttgttaaggagaacctcggcatattttccgatccatttgaacaccaagttaaagcgctggagtatttttcgtctgggagagatttatttgtttccactggtacgggttctggtaaaacagaatgctttctctggccgattatagccaagtgttttgatgaggccaaaaaccgtcctgctggattcaaaaacgaggcagtgcgtaccctaatcatttatccaatgaacgccctcgtgtctgaccaactcgccagattcaggaagattattggaaacgataagttccgagaaattttcacgacagatacacacgctacgcgtattccgcatttcggaatgtatactggaagaacaccttattctggtgatgcaaaaccagcaagcagccgtgaattggcgaatacattccgcgaaaattatttaatagatgaaaccgctgattcagaaaccaaacggcgacaaaccaacaatgtaaacgggctcaagagtatcaacaaatacccggccagattcggcgaaaacggactccaagtttttattgaaaatttggaaaagaacatccacaagccaactccgtatgatgctgaactcataactcgattcgagatgcaggaatgtccgccggatattctgattacaaactactccatgctggagtatatgcttatgcgccaacgcgaagcaaacatatgggataaaacaaagcaatggcttgatgaatccaacgacaataaacttctcattgttttagatgaagcgcatatgtaccgcggctcagctggtggagaaattgcgctgttattggagcgactgttctatcgtgtgggtattacaatcgatagagttcagtttattcttacaaccgcaagtatgccattaaatgagcaaaaagcgatagatgctttttactctggtctcacggggaaagaaccgacttcttgtgagttcttattcggtgcaaaggaggctgtcccagatgaattggaggtgaacacggatattgatgcattggcatcgattggttctgaccaagtgcaaggtgaggggatcgctgttcgaatcaaagattttgctaaagctgtttttcattgcagcttgccgaacgacattagtcagagtgaagctcaagaatggctctacgataatcttccgaaatatcaagcgtttgttttgctgaataaactatgccgtgatggcgcaaaatcatatagcgagattaaggaaacactatttggagacagtgtgaatgctgaaaaagcccttgatgctttattggcattggtttctcttgccgcaaagaacggaaacatcctattcccagtgcgccttcatatgtttttgcgtgggttgcaaggtctttacgcgtgctctaatccgaaatgcacctgcgggaagtattccgaaagcgaaaagcttccattgggtaaggtcatctctatcccaaaatataaatgtgagtgcggcggcaggatttatgaacttgttaatcatataaaatgtggggcattatatctaaaagtttatcttcaaaaaaacgatggacaaccatattggtatgtcttccctgaacgtggcttgaacggtgacgctaattcgctcaaagaaatgcttctctatgttgttcccaataactatcaaaaggggaagaatgacaagatgggtgcgcttgaccccttaacaggcaaactgtatacgtcacctcaaaacgatgaaagtttgttaaccgttatatacaatgataaattcgatggtaagaaacaatcatatacttttagtgtttgcccaaagtgtaagaaacctatgccgcttaaaaaaccggttgacttagccaccaagggcaacatcccattctataaccttacaaaggcgcagtttgaattgcaacccgccaagtcggaactgattaatcaaggaaaaaaggtcttactattctcggattctcgtcagaacgctgcaaaacttgcattggatttgtcaaaatcatctgatgcagatgcgtttcgacaggcagttatgcttgcgtcgcttcttttgcaggttgacggtaaagaacattctttattcgatttatattcggcatttttggatgtttgcatacaaaacaaccttgcttttttcagtggaagaagcaaagtgaagtttgaaaacgacaagcgtttgtttaagtataaaaaaggtacaactgaacgacgcggaagaaccattgactatacggaaatagctgcggagtatcaacctctgccggatgactactacgagcagttgctaactttctttacagaaagccctcgttcatttaaagatatcggtattggttttttagctcctgtatcttctgctcttgacgattgcgtatatgatttagaggatgacggattaatcgttgataaagatattatttatcaattgcttgtgctattattctgggatgttatggatgaaagcgctgcacttggggaaacgattcaagatgatattcgaaaaggtttacctggacgaagcaagagccaggcgtttgggttgaacttcaatttttcaaacgaattggacaaaggttttatccagcgaatccaagaactactaaagcttgatagtatttctattgcaaaaatcgtagatagagtgcgcgacttgttttttgcttcctcatcaaataaccgttattatatcaaattatcctcagtgaaaatcgagtttgcagataaagatttcacatggtatcgctgtgttaaatgcgggaaattatctccatataaaataggggattattgcggtgtttgctttgattcaacggagttggtgcttattgatgaatcggatttgtcgcgctttgaattttggcggataccagttctcaatgctttgaacaaactcgaaactatccatacgattgacacagaggaacataccgcacaattatcccataaagaaaccagaagcgatacttggagccgcacagaaaaatatgaaatgcgtttccaagatattaatgcaggcgagaacggcgaggaatctatcgatgtattgagttgtacaacaactatggaggtcggtattgatattggttcactaaccgccgtcggacttcgtaacatacctcccatgagagaaaactatcaacaacgtgcagggcgtgcggggcgtaaaaatgccggcatctctactatcgttacatatgcttccggaggaacgcacgatagccactacttcttgcatcccgatgaaatgatttccggctctccgcgtaaaccttggataaaccgttacaatcgcaaaattaggcagcgtcacataaatatgctggcgctgaacggcttcatgtcgactccagatatgaaaacgcaattcgacggtattgctgacattggaataatatcgttctgtgaaaagttcggtgaaaactttattgcgtatgcaaaatccatagatgtatcaactgatgttactatttttcaatttcgagaaatatgccaaagcgttttagttgaaggtaagcgcaatgagtttattaacaatgacaaagagacctcggcttttgatgtattttatcgtgaaggctttataccgtcatattcgttcccaaagaatgttgtaaggtttttcgtagagaaagaatctgaacggggcaagaatgctcctcgtgatatcaattatgctcccgagagagacatcgccatagcgctcagtgagtatgcgccaggaaggttcgttacgattgataaaaaaatatataaaagcggtggcatttatgctaatcctcgaccaagaggttttgagaaaaaccaagccgaatactattttgagaacaaagattatcataatgacattcacatctgttctgaatgcaactggtttggtattgatcaagaagaatttcctaatatgcagtgcccatattgcagtgccccaattgaaaacaaaaaaatgttacgcccatggggattttcttctgttagaggggatgaagttaaatttgaggatgaggatgaacagtatacctatgcggaagcaccctactattcttatgttccggcagacacagaaatggttcaatttggtcatagtaatatccgttatgctaatctatctgataaaaaagttttaaccgttaacatgggtaaaagtaagaacgggtttaatgtctgcaaaaagtgtggaggggccgaggttgcagatgataagaacactggaagattctcattttcacaaccctatcacgataactatttatgccgtcatgaaggtacggtatctaccaatatatgcttaggatatgaatttttgacggatatgttcatgctagatatctcttatgattttgcaaaacttgttgggaacaaaaatgcagaagaaaagagtattcttcgggcggcggtgacgacgctacatgaagcacttaaaaaagctgtttcgcttgtactagatatagattacaatgagataagcggaggatggcgcccgaggattacgatcgacggtgattctcacatagaaatgtttttctatgataatctcaccagcggtgcgggttattcatcgttaattggctcaattcttgataaggtgcttgaacgcgccagaataattctatcagagtgtgagtgttcacgaacctgcaaaaactgccttgataatttttggaaccagaggaatcatcagttgtttgacaggcatttaggtttgcagcttctcaactatgttcagtttggacagttacccgatgaatacgacaaaggcgagcaacaagcgttgcttgctccattgcaaaaactcatttcagaagatagtgagactctccagcctacttctaaaattggatttgaagttatgcctgctattctaaagaaaccagaaaacacaagtacgaggattttcctaaatccctatgatttgtcgtgttggttgcccaacgcatttatgacatatagaaacttaataagcaagaggtaa

SEQ ID NO: 27539 - DNA, 1431 bp, Propionispora sp. Iso2/2
atgagaatagcctatgatactgttcttcaatctgaggtatctgcgttagctgcaaaaagtggcgggtttgagccgtatcgttacgagtgtgcctgctgcggagaagaggtacatgtcgccgctcccaacagcaccagcagggtgcctcatttcaagcatcgtaacggaaacaatgatgttgcatgcgaaaactatcttgggcaatatggagcgataagtatagattctcgttcaagaaaaagcaatcgtgaaagagtagagttctattataaaaatagcaacaagacgttttgtttgggactctgtttcagcgcagtgggaattcaacactacgagcagcagaatgttgatttcgagattagaactgacgaatcagagccaccgttctatactataccgataaacaccctttattttgcacccgatgttcccacaatgatttccttgaacaaattctcgttttgctattatttagccaatactcttaatggcacaaaacggaaatatgatttttttaggtttggaaatacgcctacctttttcaaggtacaaggtaacgatagcgattttaaagccaaattagtacgcagtacggttttgtttaataatgttcaatatttcgttatattccagaataaagatttaactccacaaattagtcgctttcctgatgagatgcaggtaaatgagacattttgtttcgaaacgatgggcttaaagttcttaggtatgactttatcaataccaaaaaagacagatgaaatagataggctgttaaataattggggttaccaattagaggcatctgaaacgattacaccactgtggccacctgcgccagtgattgatgatgttagtatggtaacttcaaacaaagtttttttatttacgagttttgcgttacaagcacatggaaacattaatgttcattcgacggatattttggaggtaaattacgatatttcaagagtattggttaagaaaagaaccaaaatatgcaagaaaaatgcggagattgttattgataagggcgagtcgcctatttatgcttataatcagatttctacatctgaaactgcaaaagttagtttcactattcctgataatggctcctggtttcttttcaaccgttcgggagttggttctttgaaaaacggacaggttgtttatttgacaccggaaagcgtgattaaacggtatgagagcaactatcctactcgcattatttatctgtgtcgtcaaaaggaattggttaatgaaaaattgcttgaagacattctcatgcactgcaagcgaacggaaaaacttgaccttaaccagtttatgttgcttgcactgaacaatactgcttctcaatacattgataaatgtagcgtttcgggttatatcaactcggtcgcaaaacaatttatcatggaggagttgctatga

SEQ ID NO: 27540 - DNA, 1584 bp, Propionispora sp. Iso2/2
atgaattacctttctcaactaaccgaagatgaattacgctatatttgcttagttgtgccttatcaggacacgatagcttatttttcaaaaaaaccaaaggagtttgcaaaaattcgtccgggatttcgagttaagacgatttcaaaagatgtggcaagtgaactgctcttcgattttagcagcaaaccctttatttcatatttcattgagaaacatattagtgattggctttctcagataaaagaccactataataatagaattaaagatggtgacacaaaagatgttgctttcttaaacacattaccatccagttttttctccgagaacgttggtctgtacttcaaacttatcaatgaagaatattctgaagaatacatatcgttaatgagtgcggctataaaatctatcaaagaagtaactgacgaacaagacagattaagtaaagaattgaaagctaaggattctgatattaggaatctccatactgaactcaattcggcaaaattagatttggacagaactaaagctaagctaaatatgcggttatcggagattgacgctctcaaaatcaaacttactgaccttgaaggacttaggattgccgctacgaaggataagcaaaaaatcgagtctctcgaaaatgaaataataacttatgagaaggcaattaaagggctaagaatagagttggacgaaaccaaaggcagctgtaaccaactcgaagaacaaatacgggaggagttagaaagacagcaaactgccaaattaaatgaacagcaatcaataaaggcaccgaaatgccctagcgatattgaagagttcaaagaatatctgggttacaatcttaaaagtatcggtgcgtctgatgtcgcatattatgctctattgaacgcgcatttaagtaaaatcctctttcagggtgttcctatacttattaatcgcttaacaggcatcaatgttatgaattgtgttgcaaacacactaattggacaaataacggttaaaacacttgtttttaacaaggatatttcgaatgaagaagttagccggttcttatctttgggtgggcgtattgtttgtttggataactttcttgggaatttcaacgaaacagaattgctgcctttgtttgaaaaacataaagataaaatcatctttttgaccgttgcttatgatagaacaatccattacatatcaaaggagtttttgtgttattgctattatttcaatgtcaatcgaatcaaggcgttaaccgttaacgcagttttaaccgaagacccgtcaacgattgtggaagtcgattttgagcctcagtggtcaagcgaagaaaattggcattctaatttattaagagaagtgttgcgagaattagacttccctcaaagcctggttgagcaaaaatgcgctgcagtatttgacgaacaagatttatgccgattgcttgcatttgatgttttgccatactgtgcggacgtattgcagattgccccatataatacatccgagcggttactcaaatatgccggagataccggaagatgcaaatacaaaaaactgtttatggagtggtttgcgctatga

SEQ ID NO: 27541 - DNA, 1059 bp, Propionispora sp. Iso2/2
atgcaaatacaaaaaactgtttatggagtggtttgcgctatgaatgagttcttaactgctatgtcaactgatatgggcattagccgttatcagaacgaatctgatgactcattcatcttcagactttgttattcggcattagggcagtggtgcctccgaacagctcagaatttgtcaggtggaatcgtagggacaaccaaacacaatcagacaatcgtgttaaatgaattgctacagcgctattcagaactatttcccagcgttgctaatagatttattagcgccaataatcagcaggcgaacctagctgttcacatacggcgggtatacgaagaaacgggctatcttttaactgatgataataatcggaatcgtttagctaatttcgggcgaagcattacaatcggagatacatctctgttttttggtgttcccaatatggcttttaccgtgaatgggcttggcgtattttcaactcccacattatacaagtttactgcacgagagtttttaattagagacaccttaacatacgaagaatactttcaatcacaatttgacattatagatttttatgaaagagacataaacattgatgaactggaatttttcaatcctctatcgaataatgttccttcattatcttggtcaaagaaaatggagacagattgttcaatggcccgaaaaagtgagatgggtccgttttacagagtgatgcgtgaatctgataccttactgttgttcgctgaagaacctataggaccacaaaacgatagcttaatatcttatgaatacagaaggttatattatgcgctcaaagcgcactatggtaatcccttgaaggcaaaagttgtaaagaaggatagcaaatactctgaaataaaaattgacgggcatttaccaaaccgagaatactattatttgctgcttttgtcttggccagtaaatcacgctattgacaaagttaactttttagtcaaaaattgctttgttgcagaagtaacagctaccctaagaaatattggcattgacgttaaaggaggaaatgcaaatgcgtaa

SEQ ID NO: 27542 - DNA, 5205 bp, Propionispora sp. Iso2/2
atgcgtaacttaaacggagttcaacaatactatcaggcaatccgtgatagattgaagaactacataaaatcggattacttagccaatagtgaaaccttactcctttatgtcgatgacatcctgggagaacgttgctctgagtataccaatattgcccgcgagccttacattgaaacttcggcgtcctataaaaaaatatccgatggaattaaaaactcgcagcacattgaacagagcataaaagaatcgttattgaagcttgttcaagagaaactcggcatattttccgatccgtttgaacaccaagttaaatcgctggagtattttttatctgggagagatttgtttgtttccactggtactggttctggtaaaacagaatgctttctttggccaattatagccaagtgctttgatgaggctaaaaaccgtcctactgatttcaaaaacgaggcggtgcgaaccctaatcatttatcctatgaacgcccttgtgtctgaccaactcgccagattcagaaaaatcattggaagcgataattttcgagaaattttcacgacggatacacacgctacgcgcattccgcatttcggaatgtatactggaagaacgccttattctggcgacgcaaaaccagctagcagccgtgaattggcgaatacattccgcgaaaattatttgatagatgaaaacgccgatcccaaaacaaaacagcgacaaagcaacaatgtaaaagggctcaagaaaatcaacaaatacccggccagatttggtgaaaacggactgcaagtttttatcgaaaacttgggaaagaacatccataagccaactccgtatgatgctgaactcataactcgattcgagatgcaggaatgtccgccggatattttgattacaaactattccatgttggagtatatgcttatgcgccaacgtgaagcaaacatatgggacaaaacaaagcaatggcttaacgaatctggagccaataaactcctcatcgttttggatgaagcgcatatgtaccgtggctctgctggtggagaaattgcgctattattggtgagactgttccatcgcctggggattacagccaatagggttcagtttatccttacaaccgcaagtatgccgccggacgaaaaaaaagcgatagacgatttttactctggtcttacggggaaagagccgacttgttgtgaatttttattcggtacaaaggaggagagcccagatgaattggaggtaaaaacggatattgatgcgctggcgtcgattggctctgaccaagtgcaaggtgatggtgtaaccgccagaattaaggattttgccaaagctgtttttcgttatagcttgccaaacgacattagtaaggctcaagctcaagagtggctctacgataatcttccgaaatatcaagcgtttgttttgctgaacaaactatgccgtgatggtgcaaaatcatatagcgagattaagaaaacgctgtttggggacagtgcgaatgccgaaaaagcgcttgacgctttattggcattggtttcccttgccgcaaagaatggaaatatcctatttccagtgcgacttcatatgtttttacgcgggttgcagggtctttatgcatgttctaatccgaaatgcacctgtgcgaagtattctgaaagcgaaaagctccctttgggtaaggttatctctatccccaaatataagtgcgagtgtggcggcaggatttatgaacttgttaatcatataaaatgcggggctttatatctaaaggtttatcttcaaaaaaatgatggacaaccatattggtatgtcttccctgaacgtggcttgaacggtgatgctaattcgcttaatgaaatgcttctctatgtagttcccaagaactatcataaggggaagaacgacaagatcggtgcgcttgaccccttaacaggcaaactatatacgtcgcctcaaaacgatgaaaatctgctaaccgtcatatacaacgataacttcgatggtaagaaacaatcatacacttttagcgtttgcccaaagtgcaagaaacctatgccgcttaaaaagccggttgacttagccactaagggcaacatcccattctataacctgacaaagactcaatttgaattgcaacctgccaagtcagaactgatcaatcaaggaaaaaaggtattgctgttctcggattctcggcaaaacgcagcaaaacttgcattggacttgtcaaaatcatctgatgcggatgcttttcggcagacagttatgctcgcgtcgcttcttttgcaggttgatggtagagagcattctttatccgacctatatccggcatttttggatgtttgcatacaaaacaaccttgcttttttcagtggcaaaagcaaagagaagtttgaaaacgacaagcgcctgttcaaggataaaaaaggcagagctgaacggcgcggaagaaccattgactatacgacaatagctgcggagtaccaaactctgccggatgactactacgagcagttattaactttctttacagaaagccctcgttcatttaaagatatcggtattggctttgtagctcctgtatcttctgttcttgacgattgcgtatatgatttagaggatgacggcttaatcgttgataaagatgtcctttatcaattgcttgtgctattattctgggatgttatggatgaaagcgctgctcttggggaaacaattccagatgatgttcgaaaaggtctgcccggacgaagcaaaagcccgacgtttgggttggacttcaatttttcaaacaaattggacaaagggcttatccagcgaatccaagggctattaaatcttgataatattgcaaaaatcttagataaagtgcgagacttattttttgcttcctcatctagcaaccgttactatattaaattagccgcagtgaaaatcgagttcaccgataaagatttcacgtggtatcgctgcgttaaatgcggaaaattatctccatataaaattggggattattgcggtgcctgctttgactcaaccgatttagtgccgattgatgaaacggatttgtcgcgctttgacttttggcgaataccggttatcaacgccttgaaaaaactcgaaactatccacacgattgacaccgaggaacacacagcacaattatcccataaagaaactaaaagcgatacttggagccgtacagaaaaatatgaaatgcgcttccaagacattaacgcaggagaaatcggcgaggaatccatcgatgtattgagttgtacgacaactatggaggttggtattgatattggttcgttaactgccgttgggcttcgtaacataccacccatgagagaaaactatcaacaacgtgcagggcgcgcggggcgtaaaaatgccggtatctctactatcgttacatatgcttccggaggaacgcacgatagccactactttttgcatcccgatgaaatgatctctggttctccgcgtaaaccttggatagaccgtgacaattccaaaatcaggcagcgtcatataaacatgctggcgttgaacggtttcatgtcgactccggatatgaaaacccaattcgacggtattgttgacattggcataatatcgttctgtgaaaaattcggcgaaaactttgttgtttacgctgaatctatggacttgccaaccgatattactatttctcaattccgagaaataagccaaagcgttttagctgaaggtaagcgcaatgagtttattaacaatgacaaagagacatcggcttttgatgtcttctatcgtgaaggattcataccgtcatattcatttccaaagaatgttgtaagatttttcgtggagaaagaatctgaacggggcaaaaatgctcctcgtgatatcgaatatgctcccgaaagagatctcgctgtagcgcttagcgagtatgcgcccggtaggtttgttacaattgataaaaaaatatataaatgcggaggcatttacgctaatccccgcccaagaggctttgagaaaaaccaagctgagtactatttcaagaacaaagattactataatgacatttacatctgttctgaatgcaactggtttggcattgggcaagaggatttttcaacgatgcagtgcccatattgcggtgcgccaattgaccacaaaaaaatgctgcgcccatggggattttctccggttagaggggatgcggttaaattcgaagatgaggatgagcagtatacctatgcagaggcaccctactattcctacgttccagaagacacgaaaatggataaattcggtcatagcaatatccgttatgtcaatctttctgatagaaaagttttaactgttaatatgggtaaaagtaagaacggttttaatatctgtaaaaagtgtggaggcgctgaggttgcagatgataagaacaatggggatttttcattttcacagccctatcacgataacaatcttttatgtcgtcatgaaggtatggtggatactaatatctttttaggatatgaatttttaacggacatgtttatgttggacatttcctatgattccgcaatacttgttggaaacaaaaatgcagaagaaaagagcattcttcgggcggcagtgacaacactacacgaagcaattaaaaaagctgtttcgcttgtgctggatatagattacaatgagataagcggaggatggcggccaaggattaagttcgatggtgactctcatatagaaatgtttttttatgataacctcaccagcggtgctggttattcatcgttaattggctcaatttttgataaggtacttgaacgcgccagaataattttatcagagtgtgagtgttcacgaacctgcaaaaactgtcttgataatttctggaatcagaggaatcacctattgtttgacaggcatttaggtttgcaacttctcaactatgctcaatttggacagttacccgatgaatacgacaacggcgagcaacaagcgttacttggcccattgcaaaaactcatttcagaagacagagacactccccagcctaatcttcaaattggatttgaagttattcctgctattctgaagaaaccagaaaacacaagcacgaggattttcctaaatccttatgatttgtcggattggttgcccaacgcatttatgacatacagaaacttaataagcgagaggtag

SEQ ID NO: 27543 - DNA, 1221 bp, Pseudomonas aeruginosa
atgccaatcggcagagcgattattattggagtcaatccgagagaagcaaatctcaaacgaaaagtgcgagagcatttgcatcaattaggtttcacgaggacccaggagggcgcgctatgcccgcctggaaacggtaaggaagcgatccgcactttacacggcggccaacgtgaagaacggctcagcgccagtacacgcttcatcgagcgcagcggtgccaaactaatgcaatattttgcagatggccgcgagattattccggaaaaaatttctccggtgcttgagcgcgtctcttccggcacgtggcaaagcgacctgttccggttggcgtcactgtcgtggtctgtccctgtgtctaatggttttggtagacgcttgcgttaccttgtctgggaccaggcgaatggcaaactgatggggttgattgccataggtgatccggttttcaaccttggcgtcagagacaaattcatcggctgggatactgcggacagggctgcccggctggtcaacttgatggatgcatatgtccttggggcggtcccaccttacagcgccttattgggcggtaagctggtcgcttgcctgcttcgtagtcgggacatttatgatgattttgccagtgtttacggaagttctacgggcatcatctcgcaggccgaaaaaaatgcgcgtctgctggcagtcgtgactacctcgtcgatggggcgttctgcggtctataatcgattgaaactggatggcacggagtacctcaagtccatcggttttaccggtggctggggacatttccatatacccgactggttgtttattgagcttcgagactatcttcgtgaactcgaccatcattatgcagaccaacacgccttcggccagggccctaattggcggttgcgcaccacgcgtgcagcactgaaggcacttggctttaaggacgacctgatgcgccacggcatccagcgtgaagtcttcatctgtcaattggccgacaacgccacgaagctactgcattccggcagtggaaaacctgacaccaaatcgctgttgtcggtaggtaaaatcggtgagttagcgctgaatcgctggatgattccacgttcaaggaacaggcccgaatttcgcgattggaagccgacggatctcattcacttgtacggcagccaagcgtgccatttttcagccctcagccacctagccccgcgtcgcgttgcattttag

SEQ ID NO: 27544 - DNA, 1278 bp, Pseudomonas aeruginosa
atgcgcgggatgggctcaggcttcagggtcatggctgagcctacggcgaacgactacaggatcatgtccttcgaaggcgagccggacccttcgttcgtagtggaagttgcgcggacctgcccaggtctacctgcctggggtgcggctgcattcaccgccattggtcgaggcgccgaaagtgggtttccccgcgctcaagcgctgaatcgctgcgaaacctacgcactgctatggtcggcgccggtgaccccggaattccccgaagaactgcttgtggataggctcaagtcacggcaaggctggaatttggctctggtcaccgtaccggaagccccgtcagacatctgcatcagttggctggaagactttacccaactgagcgtgatgccagcggcgcctgcgatcacgaccatttggccgttcctgagccgcaacgcgagcatcaatacggttgaatatatcgagtccgacgcggtcatcctggccgctcataggatgccgggtggcccgcatgacggcggaccaaccttgcaagccgtcaatcagcatgattgcatttccgcaacagcccccgatcgatcacccgcattattcaccgtgatacgagctggaagcgatgaattcaggatcggcaagagcggtctcccagatgtcgacaagttttttttcaagagcacgtcgctggggcgaagctttaaataccctacggtggacctggtcttcattgacgagcgtaacgaacgctttgttgccccattgcacagcagacaaagccaatcctatgtgatggccacgcgagcgggggaactacattttgactccctcactatgccgagaggggccaaaggcagactggaggttgtctcacccaatgggcacaagcaataccgccgactggcgtctagcgaagtgtcggctgaccactcaccacaggcatgccagttgccatcggcaatgaatagtttgctcaaagaatatctcactgacccgcaataccagttctatttggactttggcggtttgggccggttgtccatcggggcgatgcagcagttggccacccacacacccgcttttctgtcgctcgagcgatccttacgcttgcgcctgcagagctttctatcccagctacacgtcggtggggtaaccgcactctctggcagtgatcaggcattggtcagcgcgtttggcgcatcagtaccgaggccggaattgctcccgcactaccgccaactggcggctgctgtgcgcgcctgtggatttgatgttcgttattaa

SEQ ID NO: 27545 - DNA, 1893 bp, Pseudomonas aeruginosa
atgagctacctgtatagccaagaggcacgagagcgtatctcggcgctcggaatcacgatgattaccgagtttatcgaagaggtaccccatgtctttcgcaagtcattcttcgaccgccaagcctcgatccccgggtttaggcgcggttccccgccagaagtcaaagagaaacaacgacggttgatcgggcacttggtgcatccccagccgggtcagaaaggggaggcggactggcaagccttcgctagcttgtgggtggcatgggcaaagagccgcttggactgcgcgtttcccgctgcagacaagtttccccaatcggcggacacaggcgctgatttcttcaaacgattggctgagttgtacccggacgcccctcgggaaacggtcgagcgactggccgtgtacagcggtttcgccgaagatccggcgatgcaggcagtcctgaacagctttcatccggcgtccaccctggccaggaatcgaatgatcgatggcttgccgggacgtttggataaaattgagagttattttgaattggcggaaacggcgaccgaggagaccgctgagcacatcgatcaactggaagtgactgtcactgcaacggctgaagcagttaaacaactgactggcagtttcgctagtgttgaccatgatgtcgaagcattacgtacagcgctacacggtatcactgagcgcttgcaacaactgagcgaactggctcagtcaacggccagggcgcagcaagaggtatcgcaagcgatcgcgcgctcagacctccgcggcgagcacatgtcgactgcgctggactccctctctgttcaggtcacagacctggtggcggaacgcgcgcaggtcctagctttcgaggaagcactgaccacacttggtgcgcgtattcccgattgggagctcacggcagccactattgcagcgttgcgcgaacgcctcgacgaccacgattttcgggttgccaaaccacgtgacgagaccagtggccatacacgcgtccgcttgatcgagaacgaagcaaccggtccgttcgttgaagtcagttccgtggatgtcgcctggaaggtcatagccaacaacctgcaggcatgcggtgttgtgaaaaatgatgccaatcgttgcgctgggcatatcctagcagcagttatttccggccaactgatccagttcaaagggtcgacggctgacttaatagcagatgccgtggcagcagccgtaggaggggcgattttccatgagtggcgggttcccgtcggtcttctatcggaggacgccgcggccgactgcctcgaagtagtgtacgagtcgtctgggtgcctactgctcaagggggccaaccggtctgcgtttgaggtgtatggcagtgccatccgtgatcttgtagcgcgtcgtcagttcaccctagcggtcgatgcgcgcctagtgctgatagcgtcttggactcatggcccagcagcatttccagacggaggtacgttgtctgaactcggccccgtgtttgatacggatgaattatctatgcgggggttatctgcccaactgccgctgatgcagttcggccaccttgctgtggatgactggagagtcctgcacagtcctgctgaaaacacgcaattggcgttaccgagcacattgagggagcgccttgcacaggtggactttgttccagggaatctgtggctacgggtcgctgaccgggcgtatgcccagttgcgactgctatcgccaggccctgcggagcgaacgctccatgcagtgttgaagcagtgggcactgccatgggcgcaatcccttggtgggccggtcgaggcgctaacgcgcagcatcatcgaactccagagtgaaatcgacacgcaggcggtccatgcggagcatgtcgagtga

SEQ ID NO: 27546 - DNA, 5523 bp, Pseudomonas aeruginosa
atggcagggattgcgatgaatgaagcatcgggtgttcacgagacagcgaaaaatctggccgagagccttcgacaatacatcgaagcacaatatcatattcgcgatgaagggctcgtcagagaacgtcatgctctgctcctgcgccctgaaaccattgcccaggcgccttatgtagaggcaacggcggtctacaaagtaggcgacccgttcgatcaactcaccattccgaaagtagccgcccatacgctcacccagttgtcgcatctggggctaggtctttaccctcgtccctacgagcaccaatcgcaggcgctcaccgcatttttaggtgccgagtcagcggatctggtggttgcaacgggtaccggctccggcaaaaccgaaagttttctgatgccaatcattggtcaattggcaatcgaggggcaggagcggcccgagtcggcacagttgccgggttgtcgggccctgttgctctaccccatgaatgccttggttaatgatcaattggcgcggatccggcgcctcataggagatgctgaggcgtcgtcgatcttgacgcaaagccgctctcagccgatccgtttcggtagctataccggtcgcaccccgtatccgggagagcgttccaaagaacgcgacgaacgctttatagagccgctgtttgaagagttctataacaaagtggccatgaaacctaccgtgaaagacgaactggtcaggatcggacgttggccgagtaaggacctagaggggttttatggcgcctcaactattgaggccaagacctattcatctggcaagaagaagggcgaaaacttcaccaaaaagcattgggccgggcggcttcagacccagcccagtgatcgcgagatgatgactcgtcatgaaatgcagacgcgctgtcccgaactattgatcaccaactactccatgctcgagtacatgcttatgcgaccgattgaacgcaagatgttcgatcagacgaaggcgtggctcaaagcggactcgcgcaacgaattcatcctcgttttggacgaggcgcatatgtacaggggggccggtggagccgaggtggctttgttgatccggcgcctctgcgcgcgacttgacattccacgagaacgcatgcgttgcatcatgacaagtgcgagcctggggcccgcagacaccgctgcagtggagggtgagcgttttttgcgggacctgacgggcttggccgacacatcgccgagacgcgtcagggtaatccaggggactccggagcaacgctatgaggcacaggcagtgccaatcgtgcaccttgaggcgctggcagatttcaacttggccgattttcaacgcgcggccgaggaccttgacgcagcgaccgaagcggcggcgcaccttgcccatcggctcagttggagtcaaccaccgcgcggggagcatgctgcgtttcgcaactggttgttcgaccaactcaccggatttgaaccgctggagaacttgattaccgcagtatcaggtcatgcagttcgattagactatcttcgtgatcggctgtttggcgaccatccctcggtcgatgcggaaaaagccactgacacgcttttggcattgggtagctacgcacaacggagcagggatggccgggtattgctgccgacgcgcctgcacctcttccatcgcgggttgccaggtctgttcgcttgcgtgaaccctaactgctccaagcgcctaggccatcatgacgggcccacgatcctgggtcgactgcttacgaaaccgtcagcccagtgtggttgcgaggtcaatggccgcgtgtatgaactgctcacacatcgcgactgcggagccgcttttctacgtggttttgtaaacaaggatatggacttcgtttggcatcagcccagtggcctgttatccgacggtacggtacctacgctgatgccgattgagttgtgcgtggaggacgccgtccatcctcgcagtcgacatatcgagaaatggctgcatatggccactggcaagctctcgagtgaacagccgagcgacgaagccgggttccgaaggattcgcgtgccggacaaagcggcggacgctggcgacatgacttttgaccactgcccggtctgtacccgcaagataaaaaacgccaaagacgccccatcaaaaatcatggatcaccttaccaagggtgaggcgccgttcactgcgctcgtgcggacgcaaatggccaagcaacccgccagtcgaaccaaggataaacggcacccgaacgccggtcgcaaggtgctgattttctcagatggtcgacaaaaggccgctcggctagctcgtgatattccgcgtgacattgaactcgatgtttttcgacaggctgtcgcattggcttgtcacaagctcagaggattaggaaaaaccgccaaacccacggccttactctatctagctttccttagcgtcttgaccgaccacgacctaccgatgttcgatggtggtgattcgagaagagtcgagaatgcacgcaaattatttgatgacaactataactccgatttggtcgaagctattgaggcgcactttacgccacaggaaattccggcgcgctaccagattgcgctcctcaaactgctttgtggtaactattactcgctgacgggaacaatggtcggcttcgttgagccaacccctccaaaactgcgaaaactcggccagcacttgtcgacggccggattcactatcagcgaaacgaacctccgcgaattggcggtaggatggattaactcgatgctgcaggaatatgccttcgacaaatccattgagtcagtctatcgctggaaagcagccggttataccaactcagtctgggggagtaccggtcagtttggaaaagctttgaaggagagtctggccaaccatttcggttggtcaagcaacgctgtgaaaagtgttgaagcgattttccgagatcaactggcggaagagttcgaaggtgcctggttcttggtgcccgactccttagctgtggttgtcgacttagcccactgctgggcgcaatgcgctgactgtactgcgcttacacccttcgctttggcgggcaaggtatgcctggcgtgcggcagcaacgcagcgtcgccccttgatccgaagaacagcgattatgtcactgcgcgtaaagacttttggcggcttccagtggccagggccctaacgccaggtgcagaactgtccaacatgagcgtcgaagaacataccgcacaattgtcgaaccgtgaccgtagccgggttcatgccaccaccgaactctatgagatgcggttccaggacgtactgatcgaagatcgagatcgcccgatcgacgtgctcagttgcacaacgaccatggaggtaggggtcgacattggttcgctggtcgccgtagcgttacgaaacgtccctccacaacgggaaaactaccaacagcgcgccggtcgagcagggcggcgcggttcgtcggtttcaactgtagtcacctactcgcagaacggcccacatgacagccactacttcttgaacccggaacgtatcgtggccggtccgcctcgtacaccggaggtgaagattgataatgcgaaaatcgcccgacggcatattcacgcctacttaatccagacttttttccatgaaatcatggcgcaatgcgccgactcggtgactgaaaataactcatcactgctaaaagcgctggggccgactgaggatttcttctgccgtatcgagcaaaccgggcccacgttgaacagcttcgaggcttgggtgactcgccgggtgctggcctgtaatggcgatctgcgcgagtcgattgtcgcctggctgccgccggggttggatacccgtgggctttcattgatggaatggttggctgagaccagtaagggattgctggttgaactcaaacaactgggcataaccgtcgaagcggctaggaagcctgatgtcctcattgaacaagagattgaggatggcgacgatccccgacctagtatcgaacaggcggagcttctggagttcttgtttttccacggtttgctccccagctatgcgttcccgaccagtctttgcagttttctcgtggaaaagctcagcaagaactcgcgggatcgatgggaggtgcgaacggtgcaacgacctcaacagtccatcatcaaagccctgagcgagtacgccccgggacgcctgatcgttattgacaagaagacctatcgctcaggcggtgtttttgcagatctaccagcgggtgttgtaaatcgtgcgagccttctcttcaagaacaaaaaaccgcacacccactgcaaagcctgctcctttgtacgtgaccctaatcgttcagctaaagatcagatgacctgtcccgtctgcggccaacagttggtgactgaacagatgatcgtgccacaggtgttcgggccggagggcgctgccgatttgccggaaaatgaccgcgagcaggaaatcacctacgcgacgatggctcagttgccgcaacctgtagatccggagatttttagcttttctgcctgtggcccgtatgcaagcttcacccatgctgtcgaccgcacgcttgtcaccgtaaaccgaggcaaagagggtacaggggaagggggcttttcagtctgcatggactgcggtaatgcctcggtctttgatcaagaggcgaaagcgggagcacacgaccgcccctacaggcaactcggtccaaaaggaacgtcggagaagtgttctggccagttcgcacgagtgttgctgggccatcacttcaacacggacctcttgctgttgcgtcttagaatcgcagaaccaatcgtgactgatacgataaacagggtagtgttgcatattctcgaagatgctttgcattcacttgccgaggctctacggctagcggcgagccggcatcggcagttggatctggatcctgccgagttcggctctggctttaggattgagccagcgctgcaagatgagacccgtatcttggatatctttttgtacgacaccttatcaggaggcgcagggtatgccgagatcgtagcgcggcacatggtcgagattttagacgcgacgcttgagctgttggaaagctgcacatgcgagacttcctgcacagaatgcctcaaccacttccataaccaacaccttcagcaccgtcttgatcggcatttggcggcaatgctcttgcgttatgcggtacgtggagaggttccaacctgttcgtcggcaaccggccaattggtgaaactcgctccgcttcgagccagccttgagttggcaggatatgtctgtcgagttggctcgattccgtctgcgccattgctagttgagcaacagggtaaagccgtggcggtgggctgctatcctggcctgatcgatagccttgagcgtcagcaacccagcactaggacagcaggcgttaacgcaataatcgggctcaacgagtacctactacgctcggatcttgcgagcgcccagttgaaagttcaagcacttttcaaagtgtag

SEQ ID NO: 27547 - DNA, 351 bp, Pseudomonas aeruginosa
atgcgtggggtatccgccaaattaccggagctcaagtttggccacctggtgcgcaactcttgggatcagattgacggctttgacgatgattcgccgcgggcacttgtctctgagctgaaggaactcatagaagagagctcgtttgtccccggcaatctttggacaaggatggccgaccgtgcttactcacgtctgcggactatccccggcgggtcatcagaagaggatctgcactccgtgttgacgttgtgggctctcccgtgggcgaaggcaacggccggccccgttgaggatatcgctcgtatcgcgggccggatgttggccgaattgcaagccgaggcagagacctga

SEQ ID NO: 27548 - DNA, 1041 bp, Pseudomonas aeruginosa
atgaagtggcaggcgatttcccgcgaaggagcgcaaaaaattctcgcggcaagtattcgttgcagagtaggaggggaagggcttcgtatcgctgcgatagccgagtgtctgcgagcggcgtcgtacctcgcttctgcaccagtcgctggcaatggcacttgggagcccgctgcctcccttaacttgaccagtatggtccgaaggcgattatcaccactttggccagatcttgcagaggataaggatgctcgccctggtgtgttgtcggtcttgaatagtttgggcgagttgggtgacctggtcagacttcgaggcggaagctggctgacgccaccagcacatgccatcaaagcggccaatgacagcgcagtgataataggcggcggtcccttagagactctccctcacagcatccaaacacaagccgcaggcagggtgcgacttgtcgatctagtcgcctgcaatgattggatcgacgtctgggatgctcgcgagtgggttggtgcgcccgtcgaagggctcgaggcttggtctgtccgactgatagcaacgatgaagtcgcggttcaccgacgtgcccagcgatttgggtgagattgcgatttacgataaaggtcgatggggtgccttggcggaactgcccaacgcgggaggggtttttctttcaaaatgtcagacaggtccggtggctttacatttcattggggattatttccgtgggcgcattcgcaaaatggcgtctctcgactttcaggatgctagacgcctccgctttcatttagatgctcaagctggtcggcccatgagagtcaaagcgatgacctctcagggctttgtaaaacttcgattagaacgtcggttacccccccaggaagccagggtgcttttactgggctggcaaatacctacgcctgaaggcgagcacccaggcgtgacgtatcacgttttacctatagaaatgctatccatcgtgcgcgctgcgctcgacgggttaggcgtgattttggatgagcgctgcggcgcagaaggagggaaccaatga

SEQ ID NO: 27549 - DNA, 5526 bp, Pseudomonas aeruginosa
atgagtgtgaagtctacgttgactgaagcggcaggcgtccatgagaccgcgagtagcttggctgatagcctaaggcaatatatcgaggctcagtatcatattctcgatgaaggtctcgtcagggagcgacgcgcgcttctccaagcgaatgaaactattgcccaaaccccctatgtagagtcaacgccagtctacaaactgggaactccctacgaggacttgccaataccgcaggctgcctctgacgcattgaccaaattgtcggtaatgggacttggcctttaccctctgccgtatgagcaccaatctcaggcgctcatctcattcctcggcgatgaggctgctgacctggtggtggcaaccggtacgggttcgggtaaaacagaaagctttttgatgccggtcattgggaaactggcagtagaaggcgccgaaagacctgagtctgctgctttgccgggttgtagggcgatgttgctgtaccccatgaacgccttggtgaatgatcaactcgcgcgtatccgtcgaatactcggtaaccctgaggcagcgaaactgcttttgaacagcaggaaaacaccgatccgcttcggcagctataccggtaggacaccatacccggggcagcgctcttccacacgagacgagcagttcatcaagccacttttcgaggagttttataagaaagtggccaagatcccggccatccaaaaagacctggctcgtattggccgctggccgagcaaagatcttgatgctttttacgcggatgatgcggtagagaccaaaacctactcctccgggaagaaaatcggcaaccaattcgtttcaaaaaattggaaggggcggctgctaactcagcctggtgaccgtgagctcatgacacggcacgagatgcaggtacgctgtcctgaactgctagtgacaaactattccatgctcgaatacatgctcatgagaccgattgagcgtgggatcttcgagcagacgagagactggctcaaagaagacatccggaacgagttcatactcgttctggatgaggcgcatatgtataggggggctggaggtgctgaagtcgcgcttctcattcgccgtctatgtgcccgcttggaaattccacgagaacgcatgcgttgcattctcaccagtgcgagtcttggcgccggtgaaactgccgtcgcggacggtgaacgatttgcacgcgacttgaccgggttgctggaaagctcctcccgcaaggttagagttcttcaggggacgaacgagcagcgttcctcggtgcacactgttacccgtgaacagattgatgccttggcgggctttgatctcgacgccttccaagaggcagcaaatgatctcccttctgcccaaaaagccgcggcggcgcttgctggacagcttggttgggaagctccgaatgcaagcgatcactcagcatttcgcgactggctgtttcgaagcctaactgacttcggaccgttagaaaaacttattacattagtgtcaggtaaagcggtcaagctagggacgttgagccaaactctttttgaggggtgtcctctagaaacagccgaaaaagctactgacgcactactcgccttggggagtcatgcacagagaagctcagatggtcgcgtgttgcttccgacccgtctgcacttatttcatcgcggattgccaggactctatgcttgcgtggacccaaactgttcgaagcgcttgggtgagcatggcggacctaccattcttggccgcttccacactaaaccattgagtcattgcggttgtgagtccaatggtcgggtctatgagctgttaacccaccgtgattgtggcgccgcctttatccgagggtatgtcagcgctgaaatggatttcgtatggcatcagccaaacgggccattgtccgaaggtggaaccttggacctcatgccggttgaaattttcgtagaggaaactgctcacccgcgcagtcgacacaaggacatgtggctgcacatttccaccggcatcctttctgcgacatgtccagcggagggaaccggttttcgcaaagtccgtgtagcagataaagtcgccattggtcctgatgtaactttcgataattgcccagtctgtatccgtaggaccagaaattccaaagacgaaccgtcgaagatcatggaccatgttacgaagggcgaagcaccgtttaccacgttggttcggactcaaatggcccgtcaggcggcgagtcgtgctaacgatgcaagacatcccaacggtggtcgaaaagttctcattttttccgacggtcgccagaaggctgctcgcctggcgcgagatattcctcgagatattgaactcgacgtttttcgtcaggctatagccctggcatgtgggcaattggatgagcaaaggttagagcctcgaccaacaccgacgctctatctcgccttcctttccattttaaccggtcacgatctcgccatatttgacggcatagatgcaaagaaaattgaggatgcgcgcagcgtctttgagcgtgactacgactctgatttgggtcaagcgttggaggatagattcaacccacaggaggcaccttcacgttatcgaattgctttgctcaagctcttgtgtggcagctattactcgctttcaggcacgaccgtaggctttgtagcgcctgcgcgagcaaagcttaaaaagctgaaggaggtcctgagtaacgaaggggtttcagttggggaggaggatctacttgcgcttgcggttggctggattgattccatgcttcaggatttcgccttcgacgcgacaatcgatcaggtttaccgctacaaggccgctggatactacaagcccgcgtggggtagtaagggacagttcgacaaagctttgagagaggcactcactagccgttggggctgggatacgtccacctatgaagtcgtggaagacgctttccgcgggcagctagccgatgaagtcgatggtgcgtggttccttgctcctaattctttgcgcctcgtgattgatctttctcacgtctggactcagtgtccagattgcactgcgctgatgccatttgcgctaggcggaaatatttgtctgtcctgtgggagtgaaggcgccgtaccgatcgacccctcgacgagcgactatgtcacggcacgcaaaggtttttggcgtcttccagtaaaagaggcgctcgaaccgggagcacgcctctcaaacttgagcgtggaggaacataccgcgcaactgtcgaatcgggacagaagcaaagtccatgcaaccactgagttgtacgaattgaggttccaggacgttcttgtcggcgccaaggataggcccatcgatgttctaagttgcaccaccactatggaggtgggcgtcgacattggctcactggtggcggtcgcacttagaaacgtgccccctcaacgcgaaaactatcagcaacgcgccgggcgtgcagggcggcgaggttcttctgtctccaccgtggtgacatattcgcaaaatggaccacacgacagccattacttcttaaacccggagcacatcgtcgccggtccaccacgcactcctgaggtcaaggtcgataacgcgaagattgcccgccggcacgtgcatgcttatttggttcagactttctttcatgaagtgatggctgagggcaccaatcctccggcagaaaaaacctcattgcttttaaaggcgctcggattaacccaggactttttttacggtgccgatgatacagggctcaatctagcgagcttcgagaactgggtatcacgtcgagttctcgcatcagatgcggatctaaaagcctcggttttggcttggttgccgcctaacttggacactcgcggttctactcttggtgagtggttagtggaaacggttgagggcttgctgtcgactctgcacgagctcgcttcagatgtcgcgcaacccatcgcggctgatgagattagtgaggaagaagccgaggtagatgaaaatcccggagccggtgttgagcagaaggagttgttggagttcctgtttttccatggacttttgccgagctatgcctttcctacgagtctctccagcttcctggtcgaagagctgaagaaaaacccgaatggcaattgggagatccgtacgcttcagcgtccccagcaggcaatttctaaagcccttagcgaatacgcaccaggtcggcttatcgtaatcgacaaaaagacctaccgatcgggaggggtttttgcagatatgcccgccggcgaggtcaatcgtgctcgtcctcttttcaaaaactcaaaaaaacatgtccactgcgaagcatgttcatttgtacgagaccccaacaaacctggaggtgatggtgaaatctgtccggtatgtggtggagaactcaaagaggaaaccatgattttgccggaagtattcggtccagaaaatgcgcaagatctaccagaggatgatcgtgagcaggacattactttcgccaccatggctcaatttccccaacccgttgacccagaggtgtttaccttcaccgagtgtggacctaacgcaagcttcacccacgcgaccgaccgaacattggtgacagttaaccggggtaaggaaggttcgcagcttggagggttttcggtttgtgtcgactgtgggtatgccatcgtattcgatcaatatgcaccgcaggcgggagtgcatgaccgtccataccgacaactgggtccaaaagggacaccgccgcgctgctctggcgcattccggcgagtcctgttgggccatgacttcagcaccgacctactcttgctgaggctgaagattgccgagccattggtaacaaatacggttgaggtagtcgtgttgcagatgctcgaagatgcattgcactcgatagcggaagcgcttcgacttgctgcaagtcggcacccgcagttggacctagatcctgctgaattcggttctggtttccgcattgagcccgcgcttaaggacaacgctcgaatgctcgacatttttttgtatgacacgctttctggaggagcagggtatgccgaagtcgcagctaggaatttgcctgaaattctagagtcgacccttgcgcttctggaaggctgcacgtgcgaaacctcctgcactgaatgcctaaaccattttcacaatcagcaccttcagaaaagactcgaccgaaaacttggcgcactgctactccgctacgcagtgttgggcgagaagcctagctgctcctctcctgacgagcaggtagccacactgtcccaacttcgctcaagcctcgaattggatggtttccgttgtacgccagtcggaacaccagagattcccctgctggtagaacgggatggccggcgtgttgccattggctgttatccaggcctcattggaacgtcagagtttgtgcatcctgtcagacacgccgcagatgtcagcgacagtcttgagttgaacgagtacttgctcaggtccaacctacctgacgcacatcagagggtacgagcaatatttcaatag

SEQ ID NO: 27550 - DNA, 1221 bp, Pseudomonas aeruginosa; identical to SEQ ID NO: 27543

SEQ ID NO: 27551 - DNA, 1278 bp, Pseudomonas aeruginosa; identical to SEQ ID NO: 27544

SEQ ID NO: 27552 - DNA, 1893 bp, Pseudomonas aeruginosa; identical to SEQ ID NO: 27545

SEQ ID NO: 27553 - DNA, 5523 bp, Pseudomonas aeruginosa; identical to SEQ ID NO: 27546

SEQ ID NO: 27554 - DNA, 1230 bp, Pseudomonas aeruginosa
atgccaaatggcgatacaacaagcattgatgtcgactctcgtgaggaggatctaaaggaaaagttacgggagcacctgcactctcttggctttactaaagctgaaaagggagtattgcaagctccaggaaacactaaggaggcgatccgctctctccacagtgcgcagcgagaggagaggctctcggctaatgagaaatttgtctcactaactggccgaaaattgatgaaattttttgcgtccggggcggatattgatccggaaaaaatttcaccggtcctcgagcgtgtttcatcgggaacgcaacaaggtgagctctttcggcttgcatctttgtcgtggtctgttcccgtttcgaacgggtttggtaggcgtctccgttaccttgtctgggatgagaataatgggaagctaataggattaattgccatcggtgaccctgtgtttaatctcgctgtgcgagataggtttattgattggaatactcatgacagaagtgcgcggctcgtaaatctaatggacgcctacgtgttaggggctctccccccgtacaatattctcctgggcggtaagcttatagcatgcttattgcgtagtcgtgatctttatgatgatttttccactgtatatggtggtatgacaggtatcatctccggggaggtcaaaaaagctaggcttcttgcgataacgacgtcgtcgtcaatggggagatcatcagtttacaatcggcttaagcttgatggaataaagtatttagagtctattgggtataccgatggttgggggcattttcatatccccgatcagttgttttcggaacttcgtagttacttgcgcgatattgaccatacttacgcggatcagcatgcattcgggcagggtccaaactggcgtttgcgaactatgaaggcagcgctgtctgcgcttggcttcaaacaaaatctaatgcggcacggtatccagcgcgaggtttttatatgccagctggccaataacgcgacagaaattctgcggaccggaagaggtcagccggacttgacatcgctcctgtctgcaaaggatgttgccgagcaagcagtgagtcgctggatgatacctcgttcaaggcgtagacctgagtatcgagactggatgcctgggagtcttattgacatgtttggaaatcaggcgcgaaatctacgtgcccagatagagaaaatagaaaagcataggaatattgaccggctgtag

SEQ ID NO: 27555 - DNA, 1671 bp, Pseudomonas aeruginosa
gtggagtatgctttcaacaaaataactggcagattggagtcggcggcgaaagtatcgttttcctgggtttatatatgcccagtctgtaaggcgagggtttctcaccgctccggtgtgagaaggaaacctcatttcgcccattggcctggaatgggatcgcctgagtgtgagatgtttgttccgggccttcaagggcagtatatccacggacaagcctctgccactatggagaagcagaggatggagctccgcttggtgatccctccaataggggccgatcgtgctggctggtcgctcgaactggtgctgcccccatgtcgcgaatgtccggccatactctcgctggacgtggggggaagagtccagacgctgaatatgcgtggtatgcaggagcgccgccgtgtgactgttgagctttctactgccccttactctatagtcgagttcagcggcaaacccgacccttcgttcgtgctcagtgtggatagagagtgccgaggattacccgccgtaggagctgcggccttcaccgcgtcgggccgaagcgaacctcgaggattcccacgaacacaggagcttagagcctcggaaacttttgctctgctgtggagggagcctgctaagccagattttcccgatgagttagtaatcgataggtttcctgggcgacaaggatggaatctagctctagccacatttcctgatgaattatctccaggatgcgccgattggctgcattcattcacggggctgccaattgcaccgcccgtgcccgcaatcaccgctgtttggccattctttactaggaacgcaagtgtcaatgtggttgagagtgtcaggacaagcgtactcttgctagcagcgaagatgatgccgttggaacagtcggatcaaggtccgacaatgcaagtccaaagtgggtcctcaaagtattccgttttaggaaaggaacgatcgccagcgttttttgcccttaagactgacggcgcgcagactgtaaaagtttcagatgcgaacaatccagggattgaagagttcgtatccttcacccttaatccagtgctctctcagtggctcccctctgttgaactggggttcacgacaccaatgggagttcgccatgttgttcctctgcatcaacgcaggtgtacagatatggtgaccgaggcccggacacatgggagggggccagactatctatcgatgcctcctggcgcgacgggagtcctccgcatagatggaccaattgggcgatttataacagcgctttcctctgggagtgactcttctcctcatagccgtcatatgcgtctcccacctcctgacgtgctgacgaagataacttccgccttggccgaccctgcatgtcacgtggaaattgaattcggtggttttgggcgattgcgcgtcgccggcacttgggcatgttcttcagtaggactccgtagtaaggagctcactccagccctacgatcaaggttgcttagcttcatgttccagttgcaaattgcttcgccaacgacagtgtgttctgacgacaactcgctagttggagtcttcgctgcagcgaggcccgaagcgtcgctcatcccgcattatcgttcgctggtaaaggagatccttgcctgcggctttgaaattaaacgtttgggagaaggtgcctcatcatga

SEQ ID NO: 27556 - DNA, 1878 bp, Pseudomonas aeruginosa
atgagttaccaatacagccaggaggcaaaacagcgaatctctgcattgggacaaaccgtggtcgcagaattcattgaggaaattcctcatggattgcgcaagacaatctataaccgtttgccgcgcattcaaggattcagaccaggcacgcctcccgagttcaaggagagacagaaacgtctaatagggcatctgatccatccgcaaacaagcctcaaagatgcatttgactggagtatcttcacccagctttgggaggcttggggtaggggccggctgggaggttccattccacaaggcgacaactccgagcctacctccgacgccggtccttccttcttgagggagctcgctgagcgttttccgcgcgccgctaaagaggacgtagagcgattattcattttcagttgttttccagaccatcctgatgtcgcgatggcacttgcttgtttccgctcggcttcaactctggcacgcgatcagatgatcgacggcctgccgacccgtattgaagacatggagcaacgctttgcagttgctgaggttgctgctgcgggtcaggccaaccgcattgggcaacttgaaatcacagcagcttctcttgtcagaggtattgaggacttcgccaaggacgttagtcagagctccaatgcagtgtccgacttgcggatgtcactggatgcggaattcacacgttccgaaaagactgaaaaatttattgattcgctaagcgttgccgctaagcagaacgctgacgctatcgccgccgtcggcatcaaagccgatgtccttgaggaaggcgtgcgggcgcttgcggtacgtggagagaggtgggatgaggtcgcaactgacatagcagcgctgagggtggctgtcgaaagtctttcagcaagcgaagccgatcaggcagagacggctgagaccgttggcatacttttgggaagagtcgctgcccttgaaagcatcttggtgggaagtggtgcagactcgggaacaaggcaacgggttagattgcttgagaacaagccggagggagcgtttgtcgccattctttctatccaaaacgcctgtgacttagtcgcttcgaatcttcaggcgaccggaattgcgagaggggcagcaatcgccgctgctcgccagatagttgcagctgttgtcgcaggccaaatggtgcagttctcggggtcgctcgctgacttggtggctgactctgtggccgcagctatcggcgggccgattttccatgaatggcgagtgccggtcggacttatatctgatgaggttgcgtccgactgtgtcgagattgttgcagactcgtcaagttgcctgcttttgaagggggcgaacctctcagcttttgaggtctacggtgctgctgttcgagatattgtcgtacgacggcagttcaccgggtcaagctacggaggctttgctctaatcgcctcttgggcgcagggtccggccgcgttccctgatggaggcacgcttgctgaactggggcccgtattcgatacggatgctcttccgatgcgcggaatatccgccaagctaccccagttgaagtacggccgactcgcgaaagaagcctggccacaggtcgatggccttgaaactagcgagacgactccagttacgagccagttgggtgagcttctgaaggaggcaggctttgaaggcggcagtttatggcggcgcgtgtctagccgtgcttacgcggctctcagggcgataccaggtggaaaagcggaggatgatctcaattcgctgcttgtctcatgggccgctccatgggctagagccaccggtggtcctgttaaggagatcattcaaatcgctgagcgcgagttggccaacgggcgagcagacatgacagtttga

SEQ ID NO: 27557 - DNA, 1062 bp, Pseudomonas aeruginosa
atggagtggcaggcagtttccttagagggcgcgcgtaggggcgtcggggcggggataggctgtaggcgaggaggggaatgccttcggatatccgcagtgtcggaatgcttgcgagcggtatcgcatctttgctccgcccctaaaggcagtcagggagcgtgggagcctgctgcctcggttcgtctctccggtatggtgcgacgtaagttggtttcgttgtggccaaatcttgctgccgatggagtggatactcaacctggagtaataggaatacttaatagtcttgccgatctgggagacatggtcagactcgagggcggcaagtggcttgcggcgccagctcacactgttcgggcaggagacgggttagctgtgctgctaggtggggggccaaaggagatactcccacaagcggtgagggcatcggcaaaggctgagggtagggttcggctggtggagaccgctgcttgcgaaggctgggcagatatgtgggaggcagaagagtggatcggagcccccgccgaagggcttgaagcatggtcagcgcggctgctggctgaggctacgagtcgactgacggatgctcctgacgacatgggtgaggtctccgtctacttgccgcgtgaatgggtcagacttacggatctgccggctggcgagggatcaattttactctgcagagtgcgtagttcgggagttgccgggccgatgttttcctatttcattggcgaatttgtaaggggtcgcctgcggagacttagtggcattgattccaaggatgccagacgctttcgcttccatctggatgcacgggcagggcgttctatccgcgtcgtcgcttcagtgtctcagggctcggtgaaactcagactagggcgccgcttgccagagcgtgaggcaagggtactcctgcttggttggcaggtccccgcgcctgatgggggacatcctggtgtaacgcatcacatgtttcccgtagagactttaccaatcttgcgtaaggcatttgaggggcttcggatcgtactggatgagcgtttggacgcagggagagaaaactga

SEQ ID NO: 27558 - DNA, 5535 bp, Pseudomonas aeruginosa
atgaccgtagtgtcgaaaactgttgaagcaacgggcgtccatgaggccgcgaggagtttggcagagagtctcaggcaatacattgaggctcaatatcacatccgtgatgaggggctcattaaagagcgtcatgcgcttcttcggagggatgccaccattgcccaagtcccctatgtggaagccactccggtctataaggtgggtgatccctacgacagcctgccgatccctaatgctgccatcgacgcactgacccaattggcggggatgggcgtcggcctttaccctcatccctacgagcaccaatcggaagcactcgtgtctttcctcggtgatgaagcaactgacctggtagtggctactggtaccggttccggtaagaccgaaaccttccttatgccagtcattggtaagttggcgatcgagggggaagaaaggccggcgtctgccgagcttccaggctgcagggcgatgttattgtatccgatgaatgccttggtcaacgaccagcttgcacgtatccggcgaatgcttggcaaccccgaggctgcaaaagtcctctcaaagggacggccgaggcccatacgtttcggcagctatacgggacgcactccctatccaggacgccgatcctccgggcgggatgaacgatttattaaacctcttttcgaagagttctatcgcaaggtcgcagagaaatcggcagtccagatggagctagagcgcatcggccgctggcccagtaaagatctggacgccttctatgggcgagagctggctcagaccaaaacctacgtgtcaggtaagaaggctggcaagcaatatattgccaataactggggtcatcggcttgttacgcagcccggtgaccgtgagctcatgacccgggacgagatgcagcagcgctgcccggaactgctcatcaccaactactccatgcttgaatatatgctcatgcgccccatcgagcgcggcatcttcgagcagactagggattggctcaaagctgatccccggaacgaattcgtcctcgttctcgacgaggcgcatatgtacaggggggctggtggcgccgaggtcgctcttctcatccggcgcctctgcgcccgcctagagataccccgtgaacgcatgcgttgcattctaaccagcgcgagccttggttcaggcccgactgcagtcgaggacggcgagcgcttcgcccgggatctaactggcttgccagtaggttcctcccggcgcgtcagagtgatccaaggaacctcagagccgcgttctctccctcgtcccgccacgcgcgaagaggccgaggcgttggcggaattcgatcttggggcctttcagaatgctgccaacgacctcggcgctgcgcagatggccgcgatggaactcgccgcacgtctgaactggcaggtgccaaccgcaggggatcatgcatcattccgtgactggctcttcgagaatatgaccgacttcggtccccttgagacactgatcgcgacggtgtcgggcaaggcggttaggctcgacactctcagcgaggcgctcttcggcgagtttccatctgacaccgcagcgcgggcggctgacgccttgcttgctttgggtagttatgcccggcggcgctcagatggtcgcgtattgataccgacccgcttgcatcttttccatagagggctgcctgggcttcacgcttgtgtggaccctgaatgttcgcaaaggctcggcggccacgccggccccactatcctaggtcgccttcatacgaagccgttggaccggtgctattgcacgtcgaagggaagggtctacgaattactcacccaccgcgattgcggtgccgctttcatccgcggctacgtgagttccgacatggactttgtatggcatcagccgagtggaccattgtccgaaggcggtactatagaactcattccgattgagatattggtcgaggagaacgttcacccacgcagccgccacaaagatatgtggcttcacgttccaaccggaaaactcttcccaatctgcccctccgatacctcgggctaccgcaaggtaaaagtacccgacaaggtcgccgcaggccaggtggagatctccttcgacgaatgccctgtatgcatgcgtaggacccggagctctaagaacgagccctccaaggtgatggaccacgtgacgaagggcgaggctccattcactgcgctggtccgcacgcagatggctcgccagccggcaagtcgtactatcgatgcaaagcatcccaacggaggtcggaaggtactcatcttctccgatggtcgccagaaggctgcacggttggctcgcgacatcccacgagacatcgagctcgacgtgttccggcaggcggttgcgctcgcatgcgcgcggctggaggcaattccccaagagccgcgacctaaccttagcctctatctcgccttcttgtccgtcctctctgaacacgaccttctcattttcgacgggcaggatgcgaagaagatcgccgccgctcgcgccgaattcgaacgcgactgtgagggagacctgaggcaagctctcgacgatgatttcgaaccatcggaaacgccacccgcacgctatcggatagctctgctgaagcttttttgcagcaactactactcgctgtcgggaacaaccgtcggcttcgtcgagcccgcacgagcaaaactcaggaagctcaaagacgatatcaaggcggcagggatcgctcttgggggcgaggacgtccgggcactcgcagttgcctggatagatgcactgctcagggagttcgcattcgacccgtcgctggacccggtactccgctgcaaggcggccggttacttcaagcctgattggggaagcaaagggcagttcgaccgggccttcgcggaggcccttgcccgtcgccccggttgggggaagctcgccgtcgaggctatcgaggcagcgttccgcagccagttggcgtccgagaaagacaaagtctggttccttactccgaacacactccgcctacgagtcgacctttcccacgtttgggctcagtgtccagattgcacagctctcatgcctctcgctttaggtgggacgatctgcctcgcttgcggaagtgaaggagtcagactagttgatcccctggtaagcaattacgtggccgcccgtaagggcttctggcgcctgccggtgcaagaggctctcgcttctggcgctcggctctccaacctgagcgtcgaagagcacacggcccaactctcaaatcgggaccgaagcagtgtccacgctaccaccgagctttatgagcttagatttcaagacgtccttatcgaggattccgacaggccgattgacgtgctcagttgtaccaccaccatggaagttggcgtcgacatcggctctctggtcgcggtagcactgaggaacgttcccccccaacgtgagaattaccagcaacgtgccggtcgggctggccgtcgaggtgcttcggtctcgactgtcgtgacgtattcccagacagggcctcacgacagccactatttcctgaaccccgagcacatcgtggctggggcgccgcgtacacccgaggttaaggtggataaccccaagatcgctcgacgtcacgtgcacgcttatttggtccagaccttctttcacgaacttatggggcaagggggttatggtcccgctgaaaaaacgtcaatgcttgaaaagtcgctcggtccgacacgacagtttttccatggggcacgggacactggtctaaacctagaaggttttggcgattgggtgtcacatcgcgtcctatcagccgagggtgatctgagggcatctgtcgcagcatggcttccaccgtccctagataccggcggtcgaccgctcgaggagtggctcgcggaggtggcagaggagctcctgacgactttgcgtcggctcagcgcagatgtcccatcacctgctgtttcggaggacgacggagagaataaggaagttgaggacaacgaaaacgcgggaccgaatctagagcaggaagagtttctggagttccttttcttccatggcctcctaccgagctacgcatttcccacaagcctctgcagtttcttggtggaaaagcgcgagaagaatctcaaaggcattttggaggttcggacggttcagcggcctcagcagtcgatttctcaggcattaagtgagtatgcccccgggcggctgatcgttatcgataagaagacttaccgttccggaggtgtgttcgctgaccttccagccggggaggtgagtcgggccagaccacttttcgcaactgcgaaaaagctcgtccattgcgaagcatgctcctttgtacgtgatccccatacggcccagggaaatgatagtacctgccctgtttgtggcggagcgttgaaagaggagacgatgattcagccagaagtctttggtcccgaatgcgccagagaacttcccgaggacgaccgcgagcaagagatcacgttcgcaacgatggcacagttcccgcagcccgttgatccggaggtattcacctttaggccgtgtgggccaaatgctagtttcactcacgcgaccgaccgcaggctagtagccgtcaaccgaggcaaagagggggggcaggccaacgggttctcggtatgcgtcgaatgcggagctgcctccgtcttcgaccagttctcgccggctagtgggcctcacgaacgcccctaccgctacctcggcccgcaggggactccacagctatgctctggtgagttccgacgtgtgcttcttggccatgacttcacaactgatttattgctggtaaggctgaaagtcgccgctccgctagtgaccgacaccagtgacatagtgacactacgaatgctggaggatgcgcttcacacgatcgcagaagccctccggctcgctgcgagccgccataggcaattggaccttgatcctgctgagtttggttccggtttccgtgttgtccccgttcttcaaaacgaggctcggatgttggacatattcttatacgatacactttcggggggcgcaggttatgccgaggtggcggcgagaaatcttccagatatcttggcggatactcttgttctgttggagaattgcacctgcgacacttcatgcactgaatgtctagaccacttccacaaccagcacatccaggatcgactagacaggaagctcggcgcggcgcttctacgctacggaatattcggtgaggagccgcgttgctcccctccaaatgtacaggaggtcactctgtcccagttgtgcgccagtcttgagttggagggcttccggtgcttgcctggtggcatgcctgaagcccccatgcttgtagagcgtggagggtatcgaatggccttgggggccttcccgggactaatcggtaggccggaattcgcccatgcagtcaatagcgcacagaatgttcatggctacttggcattgaacgagtacctgctcagatccaacctgccggattcccatcagcgggttcggagctttttccgttag

SEQ ID NO: 27559 - DNA, 1032 bp, Pseudomonas aeruginosa 148
gtgcgcagcggcgccaagctaatgcagtactttgccgatggccgagaggtggtgccagaaaaaatttcccctgttcttgagcgcgtctcgtcaggtacgtggcagagcgaactctttcggctcgcatcgttgtcgtggtctgtgcccgtgtccaatggttttggcaggcgcttgcgttacctagtctgggaccaggcgaatggcaaactgatggggttgatcgccataggggatccggttttcaaccttggcgtaagagacaaattcatcggctggaatactaatgaccgagctgcccgactggtcaacctgatggatgcatatgtccttggcgcgatcccaccctataacgccttgctgggcggtaagctgattgcttgtctccttcgcagtcgggacatttatgatgattttgccagtgcctacggcgggtccaccggcattatctcgcaggcggaaaaaaatgcgcgtctgttggcggtcgtgacgacctcatccatggggcgctccgcggtctacaaccgattgaagctgggtggcacgcaatacctcaagtccattggctttaccggcggctggggccatttccatatacccgactggttgtttgttgagcttcgagattatctccgagatctcgatcatcaatatgcagaccagcacgcctttggccaaggtcctaactggcggttgcgcaccacgcgagcggcgcttaaggcgctaggattcaaggacgacctcatgcgccacggcatccagcgtgaagtatttatttgtcaattggcaaccaacgccgcgaagcttctccacagcggcagcggaaagccggatacccaatcactgttgtcagtccgtgaaatcggtgagttagcactgaatcggtggttgatcccgcgttcaatgaacaggcctgactttcgctgttggaaatctacggatctcatccacctctacggccatcaggcacggcttttcgcggctcacggtcatttagccactgagccgcggcgtattatcagtttgcgcggatga

SEQ ID NO: 27560 - DNA, 1893 bp, Pseudomonas aeruginosa 148
atgagttacctgtacagccaagaggcaagagagcggatctcggcgctcggaacaatgatgattaccgagttcatcgaagaggtaccccatgcctttcgcaagtcgttctttgatcgtcaagcctcaattcccggctttaggcgaggatccccacctgaattcaaggaaaagcagaggcgcttgatcgggcatctggcgcatccacagcccggacataaaagcgaggctgactggcaagccttcgctagcctgtgggtagcgtgggccaaaagccgcttggacagtgcctttcccaccgcagacacctccccccaattggcggatgcgggtgctggcttcttcaagcgcttagccgagttgtatcctgatgcctcaagggaaacggtagagcggctggcgacgtacagtggtttcgccgaagatcctgccatgcaggccgccctgaatagctttcatccggcttccaccctcgccagggatcggatgattgatggtttgccgggccgtttggataaaattgagggttattttgacttggctgaaacggcggccgaggaaatcgccgagcgcattgaccaacttgaactgacggcgacagtaaccaccgaagcggttgagcagatgacggccaacctcagtggtgttcacaaggatatcgctgagtggcgtaccgcactgcaaagcgtcgatctgcgcttggagcaggtaagcgaactggctcagtcaacgggtagcgcgcagcaggaggcgtcgacagcactggctgactcagacgtgcgcggcgagctcatttcggagagggtaagcgccctagctgcccaggtagagaacttggttgccgagcgtgcgcgggttttagtgctcgaggaagcactggcgatcctcaacgcccggggtctcgactgggatgccgcggcagccaaccttgcttcactgcacgcgcgcgtcaacacccaggagtctcgagtcgtcggaccgagccatgaagtcgggggtcaatcacgcgtccgcttgatcgagaacgaagcaacaggtccgttcgtcgaaataaactccatagaagttgcctgccaggtcattgccaacaaccttcaggcaagcggcgtagtgaagcgcgaggccaacagctacgcgcggcatattttggcggcaatcatctgcggccaacttattcagttcaaaggttcaaccgcggatttaatcgcagatgcggtcgcagcagcggtaggaggggcgatcttccatgagtggcgagttcccgtagggctagtatcagaggacgcagcgacagattgcctcgaagtggtagccgagtcgtctggatgcttgttgctcaaaggcgcgaacaggtcggcattcgaggtgtatggcagtgccattcgcgatgttgtggcacgtcgtcagttcgccacgagtgttaacagtcgcttggttctgattgcgtcttggacacacggccctgcggcgtttccggacggcgggacgctgtcagaactcgggccggtgtttgatacggacgagtttgctatgcgtgggttatcggcgcagatgccgttaatgcagttcggccaactgaccgtggatgattggaaagccctgcacaaccaggctgaaaacactccattggcactgctaagcacgctgagggagcgtctagggcaggtggactttgctccagggaacctgtggctcaggatcgctgaccgagcgtacgctcaattgcgactagtattgcaaggtccttctgagcgagcgcttcacaccgtgatgaagcaatgggcactgccatgggctcaatcactcggggggccagtagaggcgcttacccgcagcacgaccgagttactgagcgacatcgacgcggacgccgtgcacgcggagagtgttgagtga

SEQ ID NO: 27561 - DNA, 870 bp, Pseudomonas aeruginosa 148
gtgcctgcgaccacgctcagtttgacaagtatagtccgccagcgtttgacgcctctgtggccgactctcgacgacgaacacgctgctgaaccaggtatcaaggcgattctgtacagtctgggtgaccttggggatttggtgcgactcgacggcggacgttggttaacgccttcaccccaggcggtcagacttggggacaagcaggcagtgatcatcggcggggggcccgcacaaacctttccctggccaatcgcgatgcgcggggcagggcgggtcagactagtcaacgtcgatgcctgcgcggaacggattgacctctgggagccaaacgaatggattggctcccccatcgaaggattgcaggcgtggtcgacccagttgttaaccagcgccaaagagcaactggcgcccgcgacgactgaattagcggacatttcaattcggaccagtggtaaatggatcgcgctgtctgcttgcgcgaccgccgaagggctcttcctcgccagatgccgtacaggtctacggtttgagtattttgtggtccaggtgtcgcgggggtgtctgcggcaactgacgggactgcgaccgcaacaggcgaggcgcttgcagttttatttcgacgtgcaagccggtcatcccatgaaggttgaagcgcatgtgtcgcaagtacatgttcgactgcgcctgcatcgttacctgccacgggaagagacaaaagcgctgctactgggctggcaactgccgtcactcggcggcggcgtagggacgaccgactatgtgataccacgtgagctgtttccgctcgtgcgccaagcacttgcagggttgagcgtggaagtggctgagcgccagtttgccgagggaagttaa

SEQ ID NO: 27562 - DNA, 5409 bp, Pseudomonas aeruginosa 148
gtgagagagcgccacgctcttctcctaagttctgaaacgattgtccagacgccttatgtggaagcgacctcagtctacaaaattggagatccgttcaaccgacttcccattcccaaggtcgccgccgatatgctcacccagttgtcgctcatggggctcgggctttaccctcggccctacgagcaccaatcgcaagcgctaactgcgtttctaggtgacgaggctgcagatttagttgtcgcaacaggtaccggttccggcaaaaccgaaagctttcttatgccaattattggtcaattagccattgagggacaggaacggcccgactcggcgcaactgccgggttgtcgggcactgttgctttatccgatgaacgccttggttaatgatcaattggcgcgaatccgtcgcctagtaggaaacactgacgcatcgtcgatcttaacgcagactcgttcccacccgatccgcttcggcagttataccgggcgcaccccctacccgggagagcgctccaaagagcgtgacgagcgcttcatagagccgctgtttgaagagttttataacaaagtcgccgaaaagcctgccgtgaaaggtgagctcgtgaggattgggcgctggccaagcaaggatttggtaggtttctatggcgctgcagccatcgaaacgaagacctacggatcgggtaagaaaaaaggcgacaatttcaccaaaaaaaactggaccggtcggcttcaaacccagcctggcgaccgcgaaatgatgactcgccatgaaatgcaagcacgttgtcccgagttattgattactaactactccatgctcgaatacatgctcatgcggcctatcgagcgcgacatctttgatcagacgaaggcatggctcaaagcggactcgcgtaacgagtttatcctcgtgctggatgaggcacatatgtacaggggggccgggggggccgaggtggccctgctgatccgacgtctctgcgctcggctcgatattccacgagaacgcatgcgctgcattatgaccagtgcgagtctgggacctgctgaaactgcggcagtcgatggcgagcgctttgcgcgggacttgaccggtttggctgatacatcaccacggcgcgtcagggtaatccaggggacgccggaggaacgttccgcatcacaggcagcgccagcagaacaactcaatgcgctggcggatttcaatttggcggacttccagcgctcggccgatgacctcgtcgcggccaccgaggccgcagcgcaactggcacgacggttgggctggagccaaccgccgagtcaggaccatgccgcgtttcgcaactggttgtttgaacgtctcacggggttcgaaccgctggaaaacttgattaccgctgtatcgggtcgcgcagttcgcttagatgagttaagtgatctcctgtttggcaattacccagcggtcgacgcacaaaaagctaccgacacgcttttggcgctggggagttacgcacagcggagcacggatggccgggtcttgctgccgactcgcctgcacctcttccatcgggggttgccagggttgttcgcttgcgtgaaccctacttgctccaagcgcttaggtgatcacgacgggcccacgattctcggccgcctgtatacgaaaccctcgacccagtgcggttgtaagtccaatggacgtgtgtatgaactgcttacgcatcgtgattgcggggcagctttcttgcgtggttttgtgaacgaggagcagaacttcgtttggcaccagcccagcggtccattttcagatggtgcgatttctgcgctgatgccgatagagttgtgcgttgaggatgccactcatccccgcagtcgtcacatcgataaatggttacacatggccagcggcatcctcacggatgatcagccgagagacgaaaccgggttccgtagggtccgcgtaccggacaaggcggcagacgcaggtgatctgacttttgatcattgccctgtctgcacgcgtaagattagaaataccaaagatgatccatcgaaaatcatggatcaccttaccaaaggggaggctccgttcactgcgctcgttaggacgcaaatggcgaagcagcctgccagtcgagccaaagatgcccggcatcccaatgcagggcgaaaggttttgattttctcggatggtcgacaaaaggccgctcgactagcgcgtgacattccgcgcgacattgaacttgacgtgtttcggcaggctgtcgccttggcatgtcagaaactgaaggacttagacaaacccgccaaacccgccggcttgctttacttggcatttctttccgtgttgaccaagcatgacctccctatgttcgatggcggtgattcaagacgagttgagagcgcacgcaagttatttgatgacaattatgactctgacttggcggaagccattgaggcgaatttttcactacaagagattccggcgcgctaccaaattgcccttcttaaattgctttgtggcaactactactcactgtccggaaccatggtcggtttcgttgagccaacgcctctgaaacttagaaagttgaggcagcacctggtgaatgccgagcttgcgataagcgaagcgaacgtccgcgagttggccgtaggttggatagactcgatgctgcaagagtacgcattcgatagatccattgagtcagcctaccgctacaaggctgcgggctactcgaaaccggcatggggcagcaacggtcaatttggtaaatcgctgaaagagagcctgatcaaccatttcggttggtcgagtgaggtggttcagcgcgttgaagcgatcttccgagatcagttggcagaggaggacgatggtcactggttcctggtgcctgactccctagccattgtcgtcgacttggcgcattgttgggcgcaatgcgctgactgcacagccctgatgcccttcgctttggcaggtaaggtttgcctggcgtgcggcagcgacgcggcgtcctccatcgatccgataaacagcgattacgtcacggctcgcaaagagttctggcgacttccggtggcgcgcgccctaacaccaggtgcagagctatccaacatgagcgtcgaggaacacacggcgcagttgtcgaaccgtgaccgcagtcgagtgcatgccaccaccgaactctacgaaatgcgattccaggacgtgcttattgaggatcgggaccgcccgattgacgtgctcagttgcacaacgacgatggaggtaggggtcgacattggctcgctggtagcggtggcgctgaggaacgttcctccgcagcgggaaaattaccagcaacgcgccggccgggcagggcggcgcggttcgtcggtatccaccgtcgtaacctattcacagaatggaccacatgacagccactacttcttgaatccagcgcgtatcgtggcgggccccccacgtacaccggaggtcaagatagacaatgcgaaaatcgcgcgccggcatcttcacgcgtacctgatccagactttcttccatgaaatcatggcgcaaggcactggcgcgtcgactgaaaaaacctcgtcgttgctcaaagcgcttggtccgaccgaggatttcttctgcagttccgaccaatccggcccgaacttgaagagctttgaggcttgggtgacacgtcgggtgctcgccagcgacggcgatctccgagagtcaattgtggcttggctaccgccggggttggatacccgcggcctttcgttgatggagtggttagccgcgaccagtcaacgcttactcgtggaacttaagaagcttggttcaaccatccaggtgaatgccacgcatgaggaaatcgctggacaagaagcccaggacattgaaaatccctcatcaagtatcgaacaggcggagcttctggagtttctgttctatcacggattgctccccagctacgcgtttccgaccagcttatgcagcttcctagtagaaaagctgactaaaaacgcgcgagatcgttgggacgtgcgcacggtgcaacgaccgcagcagtcgattatcaaagcgttaagcgagtatgccccggggcgcctcatcgttattgacaagaaaacctaccgttcgggaggcgtctttgcagatctaccgccgggagttgtgaatcgtgcgggcccgctcttcgagaacgccaaaccgcatacacactgtaaagcctgctcgtttgtgcgtgaccccaatcggtcagcgaaggaacaaacgggttgtcccgtctgcggccaacagttgataactgaactgatgattgtgccagaagttttcgggccggagagcgccgctgacttgccagataatgaccgtgagcaagaaatcacctacgcgacgatggcccagttgccacaacccgttgatccggagattttcagtttttccgcatgtggtccctacgcgagctttacccatgcggtagaccgcacgctcgtcaccgtcaaccgaggcaaggaaggcacaggcgagggtggcttttcagtctgcatggaatgcggcaatgcctcggtcttcgatcaggaggcaaacgcgggggcccatgaacgtccatacaaacaactcggtccaaaaggaacaccgccgaagtgctctggtaaattcgcacgcgtgttgctaggccatgacttcgatacggaccttctcctgttacgcctcaaaatcgcctcgccaattgttaccgatacggtcaacggggtggtgttgcgcattctcgaagatgccttgcattcgcttgcagaagcgctgcggctagcggccagtcggcatcggcaattagatctggaccctgccgaattcggctctggctttaggattgaacccgcgctgctggatgaggctcgcatcctggatgtatttttgtatgacacgttgtcagggggggcagggtacgcagagattgcagctcgacacatggaggaggttttggacgcgactcttgagctgttagagaactgtacatgtgagagctcctgcacagaatgcctcaatcacttccataaccaacatcttcaacaccgccttgatagacatttggcttcgatgctcttgcggtacgccatacgaggagaggagccggcatgtttgccggcgacggggcagatggtgaaactggcccagcttcgagccagccttgagttagcagggtatgcctgtagggttggctcgattccctctgctcccttgctggttgaccgagagggtaaaacggtagcggtgggctgctacccggggctcatcgatagtctggagcgccagcaacccattggcggcactgcaggagttcacgcagtgatcgggctcaacgagtacctgctacgctcggatctggcgaacgcccaattgaaggtacaatcgctgtttaaatcgtag

SEQ ID NO: 27563 - DNA, 1230 bp, Pseudomonas aeruginosa B136-33; identical to SEQ ID NO: 27554

SEQ ID NO: 27564 - DNA, 1395 bp, Pseudomonas aeruginosa B136-33
atgatcgacggcctgccgacccgtattgaagacatggagcaacgctttgcagttgctgaggttgctgctgcgggtcaggccaaccgcattgggcaacttgaaatcacagcagcttctcttgtcagaggtattgaggacttcgccaaggacgttagtcagagctccaatgcagtgtccgacttgcggatgtcactggatgcggaattcacacgttccgaaaagactgaaaaatttattgattcgctaagcgttgccgctaagcagaacgctgacgctatcgccgccgtcggcatcaaagccgatgtccttgaggaaggcgtgcgggcgcttgcggtacgtggagagaggtgggatgaggtcgcaactgacatagcagcgctgagggtggctgtcgaaagtctttcagcaagcgaagccgatcaggcagagacggctgagaccgttggcatacttttgggaagagtcgctgcccttgaaagcatcttggtgggaagtggtgcagactcgggaacaaggcaacgggttagattgcttgagaacaagccggagggagcgtttgtcgccattctttctatccaaaacgcctgtgacttagtcgcttcgaatcttcaggcgaccggaattgcgagaggggcagcaatcgccgctgctcgccagatagttgcagctgttgtcgcaggccaaatggtgcagttctcggggtcgctcgctgacttggtggctgactctgtggccgcagctatcggcgggccgattttccatgaatggcgagtgccggtcggacttatatctgatgaggttgcgtccgactgtgtcgagattgttgcagactcgtcaagttgcctgcttttgaagggggcgaacctctcagcttttgaggtctacggtgctgctgttcgagatattgtcgtacgacggcagttcaccgggtcaagctacggaggctttgctctaatcgcctcttgggcgcagggtccggccgcgttccctgatggaggcacgcttgctgaactggggcccgtattcgatacggatgctcttccgatgcgcggaatatccgccaagctaccccagttgaagtacggccgactcgcgaaagaagcctggccacaggtcgatggccttgaaactagcgagacgactccagttacgagccagttgggtgagcttctgaaggaggcaggctttgaaggcggcagtttatggcggcgcgtgtctagccgtgcttacgcggctctcagggcgataccaggtggaaaagcggaggatgatctcaattcgctgcttgtctcatgggccgctccatgggctagagccaccggtggtcctgttaaggagatcattcaaatcgctgagcgcgagttggccaacgggcgagcagacatgacagtttga

SEQ ID NO: 27565 - DNA, 5535 bp, Pseudomonas aeruginosa B136-33
atgaccgtagtgtcgaaaactgttgaagcaacgggcgtccatgaggccgcgaggagtttggcagagagtctcaggcaatacattgaggctcaatatcacatccgtgatgaggggctcattaaagagcgtcatgcgcttcttcggagggatgccaccattgcccaagtcccctatgtggaagccactccggtctataaggtgggtgatccctacgacagcctgccgatccctaatgctgccatcgacgcactgacccaattggcggggatgggcgtcggcctttaccctcatccctacgagcaccaatcggaagcactcgtgtctttcctcggtgatgaagcaactgacctggtagtggctactggtaccggttccggtaagaccgaaaccttccttatgccagtcattggtaagttggcgatcgagggggaagaaaggccggcgtctgccgagcttccaggctgcagggcgatgttattgtatccgatgaatgccttggtcaacgaccagcttgcacgtatccggcgaatgcttggcaaccccgagactgcaaaagtcctctcaaagggacggccgaggcccatacgtttcggcagctatacgggacgcactccctatccaggacgccgatcctccgggcgggatgaacgatttattaaacctcttttcgaagagttctatcgcaaggtcgcagagaaatcggcagtccagatggagctagagcgcatcggccgctggcccagtaaagatctggacgccttctatgggcgagagctggctcagaccaaaacctacgtgtcaggtaagaaggctggcaagcaatatattgccaataactggggtcatcggcttgttacgcagcccggtgaccgtgagctcatgacccgggacgagatgcagcagcgctgcccggaactgctcatcaccaactactccatgcttgaatatatgctcatgcgccccatcgagcgcggcatcttcgagcagactagggattggctcaaagctgatccccggaacgaattcgtcctcgttctcgacgaggcgcatatgtacaggggggctggtggcgccgaggtcgctcttctcatccggcgcctctgcgcccgcctagagataccccgtgaacgcatgcgttgcattctaaccagcgcgagccttggttcaggcccgactgcagtcgaggacggcgagcgcttcgcccgggatctaactggcttgccagtaggttcctcccggcgcgtcagagtgatccaaggaacctcagagccgcgttctctccctcgtcccgccacgcgcgaagaggccgaggcgttggcggaattcgatcttggggcctttcagaatgctgccaacgacctcggcgctgcgcagatggccgcgatggaactcgccgcacgtctgaactggcaggtgccaaccgcaggggatcatgcatcattccgtgactggctcttcgagaatatgaccgacttcggtccccttgagacactgatcgcgacggtgtcgggcaaggcggttaggctcgacactctcagcgaggcgctcttcggcgagtttccatctgacaccgcagcgcgggcggctgacgccttgcttgctttgggtagttatgcccggcggcgctcagatggtcgcgtattgataccgacccgcttgcatcttttccatagagggctgcctgggcttcacgcttgtgtggaccctgaatgttcgcaaaggctcggcggccacgccggccccactatcctaggtcgccttcatacgaagccgttggaccggtgctattgcacgtcgaagggaagggtctacgaattactcacccaccgcgattgcggtgccgctttcatccgcggctacgtgagttccgacatggactttgtatggcatcagccgagtggaccattgtccgaaggcggtactatagaactcattccgattgagatattggtcgaggagaacgttcacccacgcagccgccacaaagacatgtggcttcacgttccaaccggaaaactcttcccaatctgcccctccgatacctcgggctaccgcaaggtaaaagtacccgacaaggtcgccgcaggccaggtggagatctccttcgacgaatgccctgtatgcatgcgtaggacccggagctctaagaacgagccctccaaggtgatggaccacgtgacgaagggcgaggctccattcactgcgctggtccgcacgcagatggctcgccagccggcaagtcgtactatcgatgcaaagcatcccaacggaggtcggaaggtactcatcttctccgatggtcgccagaaggctgcacggttggctcgcgacatcccacgagacatcgagctcgacgtgttccggcaggcggttgcgctcgcatgcgcgcggctggaggcaattccccaagagccgcgacctaaccttagcctctatctcgccttcttgtccgtcctctctgaacacgaccttctcattttcgacgggcaggatgcgaagaagatcgccgccgctcgcgccgaattcgaacgcgactgtgagggagacctgaggcaagctctcgacgatgatttcgaaccatcggaaacgccacccgcacgctatcggatagctctgctgaagcttttttgcagcaactactactcgctgtcgggaacaaccgtcggcttcgtcgagcccgcacgagcaaaactcaggaagctcaaagacgatatcaaggcggcagggatcgctcttgggggcgaggacgtccgggcactcgcagttgcctggatagatgcactgctcagggagttcgcattcgacccgtcgctggacccggtactccgctgcaaggcggccggttacttcaagcctgattggggaagcaaagggcagttcgaccgggccttcgcggaggcccttgcccgtcgccccggttgggggaagctcgccgtcgaggctatcgaggcagcgttccgcagccagttggcgtccgagaaagacaaagtctggttccttactccgaacacactccgcctacgagtcgacctttcccacgtttgggctcagtgtccagattgcacagctctcatgcctctcgctttaggtgggacgatctgcctcgcttgcggaagtgaaggagtcagactagttgatcccctggtaagcaattacgtggccgcccgtaagggcttctggcgcctgccggtgcaagaggctctcgcttctggcgctcggctctccaacctgagcgtcgaagagcacacggcccaactctcaaatcgggaccgaagcagtgtccacgctaccaccgagctttatgagcttagatttcaagacgtccttatcgaggattccgacaggccgattgacgtgctcagttgtaccaccaccatggaagttggcgtcgacatcggctctctggtcgcggtagcactgaggaacgttcccccccaacgtgagaattaccagcaacgtgccggtcgggctggccgtcgaggtgcttcggtctcgactgtcgtgacgtattcccagacagggcctcacgacagccactatttcctgaaccccgagcacatcgtggctggggcgccgcgtacacccgaggttaaggtggataaccccaagatcgctcgacgtcacgtgcacgcttatttggtccagaccttctttcacgaacttatggggcaagggggttatggtcccggtgaaaaaacgtcaatgcttgaaaagtcgctcggtccgacacgacagtttttccatggggcacgggacactggtctaaacctagaaggttttggcgattgggtgtcacatcgcgtcctatcagccgagggtgatctgagggcatctgtcgcagcatggcttccaccgtccctagataccggcggtcgaccgctcgaggagtggctcgcggaggtggcagaggagctcctgacgactttgcgtcggctcagcgcagatgtcccatcacctgctgtttcggaggacgacggagagaataaggaagttgaggacaacgaaaacgcgggaccgaatctagagcaggaagagtttctggagttccttttcttccatggcctcctaccgagctacgcatttcccacaagcctctgcagtttcttggtggaaaagcgcgagaagaatctcaaaggcattttggaggttcggacggttcagcggcctcagcagtcgatttctcaggcattaagtgagtatgcccccgggcggctgatcgttatcgataagaagacttaccgttccggaggtgtgttcgctgaccttccagccggggaggtgagtcgggccagaccacttttcgcaactgcgaaaaagctcgtccattgcgaagcatgctcctttgtacgtgatccccatacggcccagggaaatgatagtacctgccctgtttgtggcggagcgttgaaagaggagacgatgattcagccagaagtctttggtcccgaatgcgccagagaacttcccgaggacgaccgcgagcaagagatcacgttcgcaacgatggcacagttcccgcagcccgttgatccggaggtattcacctttaggccgtgtgggccaaatgctagtttcactcacgcgaccgaccgcaggctagtagccgtcaaccgaggcaaagagggggggcaggccaacgggttctcggtatgcgtcgaatgcggagctgcctccgtcttcgaccagttctcgccggctagtgggcctcacgaacgcccctaccgctacctcggcccgcaggggactccacagctatgctctggtgagttccgacgtgtgcttcttggccatgacttcacaactgatttattgctggtaaggctgaaagtcgccgctccgctagtgaccgacaccagtgacatagtgacactacgaatgctggaggatgcgcttcacacgatcgcagaagccctccggctcgctgcgagccgccataggcaattggaccttgatcctgctgagtttggttccggtttccgtgttgtccccgttcttcaaaacgaggctcggatgttggacatattcttatacgatacactttcggggggcgcaggttatgccgaggtggcggcgagaaatcttccagatatcttggcggatactcttgttctgttggagaattgcacctgcgacacttcatgcactgaatgtctagaccacttccacaaccagcacatccaggatcgactagacaggaagctcggcgcggcgcttctacgctacggaatattcggtgaggagccgcgttgctcccctccaaatgtacaggaggtcactctgtcccagttgtgcgccagtcttgagttggagggcttccggtgcttgcctggtggcatgcctgaagcccccatgcttgtagagcgtggagggtatcgaatggccttgggggccttcccgggactaatcggtaggccggaattcgcccatgcagtcaatagcgcacagaatgttcatggctacttggcattgaacgagtacctgctcagatccaacctgccggattcccatcagcgggttcggagctttttccgttag

SEQ ID NO: 27566 - DNA, 1236 bp, Pseudomonas aeruginosa BL12
atgccaaccggcagtgcgattattattggagttaatccgagagaagcgaatctcaagcgaaaagtgcgagagcatttgcaccagctaggtttcactaaaacccaggaaggtgctctttgcccacctggaaatggcaaagaggcgatccgcgcattgcatggggcccaacgagaagaacggctctccgccagtgaagccttcgttgtgcgcagcggcgccaagctaatgcagtactttgccgatggccgagaggtggtgccagaaaaaatttcccctgttcttgagcgcgtctcgtcaggtacgtggcagagcgaactctttcggctcgcatcgttgtcgtggtctgtgcccgtgtccaatggttttggcaggcgcttgcgttacctagtctgggaccaggcgaatggcaaactgatggggttgatcgccataggggatccggttttcaaccttggcgtaagagacaaattcatcggctggaatactaatgaccgagctgcccgactggtcaacctgatggatgcatatgtccttggcgcgatcccaccctataacgccttgctgggcggtaagctgattgcttgtctccttcgcagtcgggacatttatgatgattttgccagtgcctacggcgggtccaccggcattatctcgcaggcggaaaaaaatgcgcgtctgttggcggtcgtgacgacctcatccatggggcgctccgcggtctacaaccgattgaagctgggtggcacgcaatacctcaagtccattggctttaccggcggctggggccatttccatatacccgactggttgtttgttgagcttcgagattatctccgagatctcgatcatcaatatgcagaccagcacgcctttggccaaggtcctaactggcggttgcgcaccacgcgagcggcgcttaaggcgctaggattcaaggacgacctcatgcgccacggcatccagcgtgaagtatttatttgtcaattggcaaccaacgccgcgaagcttctccacagcggcagcggaaagccggatacccaatcactgttgtcagtccgtgaaatcggtgagttagcactgaatcggtggttgatcccgcgttcaatgaacaggcctgactttcgctgttggaaatctacggatctcatccacctctacggccatcaggcacggcttttcgcggctcacggtcatttagccactgagccgcggcgtattatcagtttgcgcggatga

SEQ ID NO: 27567 - DNA, 1668 bp, Pseudomonas aeruginosa BL12
atggattacgccatagatcgagtgacgaataaaccggttaccgcagatttagcgacacgctccggatattatatttgttctttctgccgcatgcgggtggggcttcgctcagggccatcgcggaaaaactacttcgcccactggcgtggcgtgtcctccagttcctgcgcttatttcatgtccgggccactgagccatgtcaactctgataaggctcaaccagcatcgatgcggcagatggatctgcgcttgatgataaaaaaaggtgagaacgcaggggcgtggtggattgaattagtcttgcctccctgtcgtacatgtcacgcttacatcaacctcgatgtcggcggcagggtgcagaagcttaatatgcgcgggatgggctcaggtttcagggtaaccgcagagcccacagcaaacgactacaaaatcatttccttcgaaggcaagccggaccctttgttcgtatcaggcgttgccaggacatgcccaggcctatctgcggtgggtgcagccgtgttcaccgccattggtcgggatggcgacagcggcttcccccgcgcgcaggtgttaagtcgctccgagacttatgccctgttatggtcagtaccggcgacaccagtcttccctgaggaactgctggtggacaggttcaagtcaaggcatggatggcagttggccctggtaacggttccggataccccgtcagaggcctgcataaagtggttggaagaatttacccaactgagcgttatgcctgcgacaccctcgatcacaaccatttggccgttccttacccgttactccagcatcaatacggttgaatacatcgagtctgaagcggtcatcctcgccgctcaccggatgccgggaggagcacacgacggcgggccaaccttgcaagccgttaaccagaatgatcgcatttctgtaacggcgcccgatcggtcacctgcgctattcactgtgatacgcgaaggaagcgatgatttcaggatcggaaaaaccgggcatccggatgtcgataagtatttttccaagaataattcgctggcgcgaagctacaaacaccctacggtagacttggttttcattgacgacaaaggggaacgtgttgttgccccattgcaccgcaggggatgccaaacctatgtcatggcgacgagagcacaggaactgtgtttcgattctctggcaatgccgatgggcaccaggggaaggctagaggctatttcacctaatgggcatagggagagccggcaccttgtgtctagcgacgtgacggatgaccacacctcgcagaaatgccagttgtcccctgcgttgaatagcctgctcaaactttatatcaccgaccccaaataccagatctacctggatttcggcgggttcggacggttgtccatcggcgctacgcagccgatggacaacccaacaaccgtactgctttcgcttgggcggtctttaagattgcgcctgcgttgttttctatctcagctacacgctggcggagcgattgcactctctggcagtgaccaagggttggtcaacgccttcttggccgcgcgtcccaatccgggactggtaccgaattatcggcaattggcggctgatgtgcgtgcacgtggatttgatattcgatcttcaggagatggggtctcgcgatga

SEQ ID NO: 27568 - DNA, 1893 bp, Pseudomonas aeruginosa BL12
atgagttacctgtacagccaagaggcaagagagcggatctcggcgctcggaacaatgatgattaccgagttcatcgaagaggtaccccatgcctttcgcaagtcgttctttgatcgtcaagcctcaattcccggctttaggcgaggatccccacctgaattcaaggaaaagcagaggcgcttgatcgggcatctggcgcatccacagcccggacataaaagcgaggctgactggcaagccttcgctagcctgtgggtagcgtgggccaaaagccgcttggacagtgcctttcccaccgcagacacctccccccaattggcggatgcgggtgctggcttcttcaagcgcttagccgagttgtatcctgatgcctcaagggaaacggtagagcggctggcgacgtacagtggtttcgccgaagatcctgccatgcaggccgccctgaatagctttcatccggcttccaccctcgccagggatcggatgattgatggtttgccgggccgtttggataaaattgagggttattttgacttagctgaaacggcggccgaggaaatcgccgagcgcattgaccaacttgaactgacggcgacagtaaccaccgaagcggttgagcagatgacggccaacctcagtggtgttcacaaggatatcgctgagtggcgtaccgcactgcaaagcgtcgatctgcgcttggagcaggtaagcgaactggctcagtcaacgggtagcgcgcagcaggaggcgtcgacagcactggctgactcagacgtgcgcggcgagctcatttcggagagggtaagcgccctagctgcccaggtagagaacttggttgccgagcgtgcgcgggttttagtgctcgaggaagcactggcgatcctcaacgcccggggtctcgactgggatgccgcggcagccaaccttgcttcactgcacgcgcgcgtcaacacccaggagtctcgagtcgtcggaccgagccatgaagtcgggggtcaatcacgcgtccgcttgatcgagaacgaagcaacaggtccgttcgtcgaaataaactccatagaagttgcctgccaggtcattgccaacaaccttcaggcaagcggcgtagtgaagcgcgaggccaacagctacgcgcggcatattttggcggcaatcatctgcggccaacttattcagttcaaaggttcaaccgcggatttaatcgcagatgcggtcgcagcagcggtaggaggggcgatcttccatgagtggcgagttcccgtagggctagtatcagaggacgcagcgacagattgcctcgaagtggtagccgagtcgtctggatgcttgttgctcaaaggcgcgaacaggtcggcattcgaggtgtatggcagtgccattcgcgatgttgtggcacgtcgtcagttcgccacgagtgttaacagtcgcttggttctgattgcgtcttggacccacggccctgcggcgtttccggacggcgggacgctgtcagaactcgggccggtgtttgatacggacgagtttgctatgcgtgggttatcggcgcagatgccgttaatgcagttcggccaactgaccgtggatgattggaaagccctgcacaaccaggctgaaaacactccattggcactgctaagcacgctgagggagcgtctagggcaggtggactttgctccagggaacctgtggctcaggatcgctgaccgagcgtacgctcaattgcgactagtattgcaaggtccttctgagcgagcgcttcacaccgtgatgaagcaatgggcactgccatgggctcaatcactcggggggccagtagaggcgcttacccgcagcacgaccgagttactgagcgacatcaacgcggacgccgtgcacgcggagagtgttgagtga

SEQ ID NO: 27569 - DNA, 1032 bp, Pseudomonas aeruginosa BL12
gtgaagtgggtgggggttaatcgcgacgccacccggaaaaccttggccgccgctttgggctgcagaaacgacggtgaaggattaagggtcgcagcagtagcggagtgcttgcgggctgcatcctatctttgttccgcgcccaggaatgaccgggaagcttgggtgcctgcgaccacgctcagtttgacaagtatagtccgccagcgtttgacgcctctgtggccgactctcgacgacgaacacgctgctgaaccaggtatcaaggcgattctgtacagtctgggtgaccttggggatttggtgcgactcgacggcggacgttggttaacgccttcaccccaggcggtcagacttggggacaagcaggcagtgatcatcggcggggggcccgcacaaacctttccctggccaatcgcgatgcgcggggcagggcgggtcagactagtcaacgtcgatgcctgcgcggaacggattgacctctgggagccaaacgaatggattggctcccccatcgaaggattgcaggcgtggtcgacccagttgttaaccagcgccaaagagcaactggcgcccgcgacgactgaattagcggacatttcaattcggaccagtggtaaatggatcgcgctgtctgcttgcgcgaccgccgaagggctcttcctcgccagatgccgtacaggtctacggtttgagtattttgtggtccaggtgtcgcgggggtgtctgcggcaactgacgggactgcgaccgcaacaggcgaggcgcttgcagttttatttcgacgtgcaagccggtcatcccatgaaggttgaagcgcatgtgtcgcaagtacatgttcgactgcgcctgcatcgttacctgccacgggaagagacaaaagcgctgctactgggctggcaactgccgtcactcggcggcggcgtagggacgaccgactatgtgataccacgtgagctgtttccgctcgtgcgccaagcacttgcagggttgagcgtggaagtggctgagcgccagtttgccgagggaagttaa

SEQ ID NO: 27570 - DNA, 5523 bp, Pseudomonas aeruginosa BL12
atgggtgggatttctatgaatgaagcatctggtgttcatgagactgcgaaaagcctggcggatagtcttcgacaatatatcgaagctcaataccatattcgcgatgaagggctcgtgagagagcgccacgctcttctcctaagttctgaaacgattgtccagacgccttatgtggaagcgacctcagtctacaaaattggagatccgttcaaccgacttcccattcccaaggtcgccgccgatatgctcacccagttgtcgctcatggggctcgggctttaccctcggccctacgagcaccaatcgcaagcgctaactgcgtttctaggtgacgaggctgcagatttagttgtcgcaacaggtaccggttccggcaaaaccgaaagctttcttatgccaattattggtcaattagccattgagggacaggaacggcccgactcggcgcaactgccgggttgtcgggcactgttgctttatccgatgaacgccttggttaatgatcaattggcgcgaatccgtcgcctagtaggaaacactgacgcatcgtcgatcttaacgcagactcgttcccacccgatccgcttcggcagttataccgggcgcaccccctacccgggagagcgctccaaagagcgtgacgagcgcttcatagagccgctgtttgaagagttttataacaaagtcgccgaaaagcctgccgtgaaaggtgagctcgtgaggattgggcgctggccaagcaaggatttggtaggtttctatggcgctgcagccatcgaaacgaagacctacggatcgggtaagaaaaaaggcgacaatttcaccaaaaaaaactggaccggtcggcttcaaacccagcctggcgaccgcgaaatgatgactcgccatgaaatgcaagcacgttgtcccgagttattgattactaactactccatgctcgaatacatgctcatgcggcctatcgagcgcgacatctttgatcagacgaaggcatggctcaaagcggactcgcgtaacgagtttatcctcgtgctggatgaggcacatatgtacaggggggccgggggggccgaggtggccctgctgatccgacgtctctgcgctcggctcgatattccacgagaacgcatgcgctgcattatgaccagtgcgagtctgggacctgctgaaactgcggcagtcgatggcgagcgctttgcgcgggacttgaccggtttggctgatacatcaccacggcgcgtcagggtaatccaggggacgccggaggaacgttccgcatcacaggcagcgccagcagaacaactcaatgcgctggcggatttcaatttggcggacttccagcgctcggccgatgacctcgtcgcggccaccgaggccgcagcgcaactggcacgacggttgggctggagccaaccgccgagtcaggaccatgccgcgtttcgcaactggttgtttgaacgtctcacggggttcgaaccgctggaaaacttgattaccgctgtatcgggtcgcgcagttcgcttagatgagttaagtgatctcctgtttggcaattacccagcggtcgacgcacaaaaagctaccgacacgcttttggcgctggggagttacgcacagcggagcacggatggccgggtcttgctgccgactcgcctgcacctcttccatcgggggttgccagggttgttcgcttgcgtgaaccctacttgctccaagcgcttaggtgatcacgacgggcccacgattctcggccgcctgtatacgaaaccctcgacccagtgcggttgtaagtccaatggacgtgtgtatgaactgcttacgcatcgtgattgcggggcagctttcttgcgtggttttgtgaacgaggagcagaacttcgtttggcaccagcccagcggtccattttcagatggtgcgatttctgcgctgatgccgatagagttgtgcgttgaggatgccactcatccccgcagtcgtcacatcgataaatggttacacatggccagcggcatcctcacggatgatcagccgagagacgaaaccgggttccgtagggtccgcgtaccggacaaggcggcagacgcaggtgatctgacttttgatcattgccctgtctgcacgcgtaagattagaaataccaaagatgatccatcgaaaatcatggatcaccttaccaaaggggaggctccgttcactgcgctcgttaggacgcaaatggcgaagcagcctgccagtcgagccaaagatgcccggcatcccaatgcagggcgaaaggttttgattttctcggatggtcgacaaaaggccgctcgactagcgcgtgacattccgcgcgacattgaacttgacgtgtttcggcaggctgtcgccttggcatgtcagaaactgaaggacttagacaaacccgccaaacccgccggcttgctttacttggcatttctttccgtgttgaccaagcatgacctccctatgttcgatggcggtgattcaagacgagttgagagcgcacgcaagttatttgatgacaattatgactctgacttggcggaagccattgaggcgaatttttcactacaagagattccggcgcgctaccaaattgcccttcttaaattgctttgtggcaactactactcactgtccggaaccatggtcggtttcgttgagccaacgcctctgaaacttagaaagttgaggcagcacctggtgaatgccgagcttgcgataagcgaagcgaacgtccgcgagttggccgtaggttggatagactcgatgctgcaagagtacgcattcgatagatccattgagtcagcctaccgctacaaggctgcgggctactcgaaaccggcatggggcagcaacggtcaatttggtaaatcgctgaaagagagcctgatcaaccatttcggttggtcgagtgaggtggttcagcgcgttgaagcgatcttccgagatcagttggcagaggaggacgatggtcactggttcctggtgcctgactccctagccattgtcgtcgacttggcgcattgttgggcgcaatgcgctgactgcacagccctgatgcccttcgctttggcaggtaaggtttgcctggcgtgcggcagcgacgcggcgtcctccatcgatccgataaacagcgattacgtcacggctcgcaaagagttctggcgacttccggtggcgcgcgccctaacaccaggtgcagagctatccaacatgagcgtcgaggaacacacggcgcagttgtcgaaccgtgaccgcagtcgagtgcatgccaccaccgaactctacgaaatgcgattccaggacgtgcttattgaggatcgggaccgcccgattgacgtgctcagttgcacaacgacgatggaggtaggggtcgacattggctcgctggtagcggtggcgctgaggaacgttcctccgcagcgggaaaattaccagcaacgcgccggccgggcagggcggcgcggttcgtcggtatccaccgtcgtaacctattcacagaatggaccacatgacagccactacttcttgaatccagcgcgtatcgtggcgggccccccacgtacaccggaggtcaagatagacaatgcgaaaatcgcgcgccggcatcttcacgcgtacctgatccagactttcttccatgaaatcatggcgcaaggcactggcgcgtcgactgaaaaaacctcgtcgttgctcaaagcgcttggtccgaccgaggatttcttctgcagttccgaccaatccggcccgaacttgaagagctttgaggcttgggtgacacgtcgggtgctcgccagcgacggcgatctccgagagtcaattgtggcttggctaccgccggggttggatacccgcggcctttcgttgatggagtggttagccgcgaccagtcaacgcttactcgtggaacttaagaagcttggttcaaccatccaggtgaatgccacgcatgaggaaatcgctggacaagaagcccaggacattgaaaatccctcatcaagtatcgaacaggcggagcttctggagtttctgttctatcacggattgctccccagctacgcgtttccgaccagcttatgcagcttcctagtagaaaagctgactaaaaacgcgcgagatcgttgggacgtgcgcacggtgcaacgaccgcagcagtcgattatcaaagcgttaagcgagtatgccccggggcgcctcatcgttattgacaagaaaacctaccgttcgggaggcgtctttgcagatctaccgccgggagttgtgaatcgtgcgggcccgctcttcgagaacgccaaaccgcatacacactgtaaagcctgctcgtttgtgcgtgaccccaatcggtcagcgaaggaacaaacgggttgtcccgtctgcggccaacagttgataactgaactgatgattgtgccagaagttttcgggccggagagcgccgctgacttgccagataatgaccgtgagcaagaaatcacctacgcgacgatggcccagttgccacaacccgttgatccggagattttcagtttttccgcatgtggtccctacgcgagctttacccatgcggtagaccgcacgctcgtcaccgtcaaccgaggcaaggaaggcacaggcgagggtggcttttcagtctgcatggaatgcggcaatgcctcggtcttcgatcaggaggcaaacgcgggggcccatgaacgtccatacaaacaactcggtccaaaaggaacaccgccgaagtgctctggtaaattcgcacgcgtgttgctaggccatgacttcgatacggaccttctcctgttacgcctcaaaatcgcctcgccaattgttaccgatacggtcaacggggtggtgttgcgcattctcgaagatgccttgcattcgcttgcagaagcgctgcggctagcggccagtcggcatcggcaattagatctggaccctgccgaattcggctctggctttaggattgaacccgcgctgctggatgaggctcgcatcctggatgtatttttgtatgacacgttgtcagggggggcagggtacgcagagattgcagctcgacacatggaggaggttttggacgcgactcttgagctgttagagaactgtacatgtgagagctcctgcacagaatgcctcaatcacttccataaccaacatcttcaacaccgccttgatagacatttggcttcgatgctcttgcggtacgccatacgaggagaggagccggcatgtttgccggcgacggggcagatggtgaaactggcccagcttcgagccagccttgagttagcagggtatgcctgtagggttggctcgattccctctgctcccttgctggttgaccgagagggtaaaacggtagcggtgggctgctacccggggctcatcgatagtctggagcgccagcaacccattggcggcactgcaggagttcacgcagtgatcgggctcaacgagtacctgctacgctcggatctggcgaacgcccaattgaaggtacaatcgctgtttaaatcgtag

SEQ ID NO: 27571 - DNA, 1230 bp, Pseudomonas aeruginosa BWH049; identical to SEQ ID NO: 27554

SEQ ID NO: 27572 - DNA, 1431 bp, Pseudomonas aeruginosa BWH049
atggagctccgcttggtgatccctccaataggggccgatcgtgctggctggtcgctcgaactggtgctgcccccatgtcgcgaatgtccggccatactctcgctggacgtggggggaagagtccagacgctgaatatgcgtggtatgcaggagcgccgccgtgtgactgttgagctttctactgccccttactctatagtcgagttcagcggcaaacccgacccttcgttcgtgctcagtgtggatagagagtgccgaggattacccgccgtaggagctgcggccttcaccgcgtcgggccgaagcgaacctcgaggattcccacgaacacaggagcttagagcctcggaaacttttgctctgctgtggagggagcctgctaagccagattttcccgatgagttagtaatcgataggtttcctgggcgacaaggatggaatctagctctagccacatttcctgatgaattatctccaggatgcgccgattggctgcattcattcacggggctgccaattgcaccgcccgtgcccgcaatcaccgctgtttggccattctttactaggaacgcaagtgtcaatgtggttgagagtgtcaggacaagcgtactcttgctagcagcgaagatgatgccgttggaacagtcggatcaaggtccgacaatgcaagtccaaagtgggtcctcaaagtattccgttttaggaaaggaacgatcgccagcgttttttgcccttaagactgacggcgcgcagactgtaaaagtttcagatgcgaacaatccagggattgaagagttcgtatccttcacccttaatccagtgctctctcagtggctcccctctgttgaactggggttcacgacaccaatgggagttcgccatgttgttcctctgcatcaacgcaggtgtacagatatggtgaccgaggcccggacacatgggagggggccagactatctatcgatgcctcctggcgcgacgggagtcctccgcatagatggaccaattgggcgatttataacagcgctttcctctgggagtgactcttctcctcatagccgtcatatgcgtctcccacctcctgacgtgctgacgaagataacttccgccttggccgaccctgcatgtcacgtggagattgaattcggtggttttgggcgattgcgcgtcgccggcacttgggcatgttcttcagtaggactccgtagtaaggagctcactccagccctacgatcaaggttgcttagcttcatgttccagttgcaaattgcttcgccaacgacagtgtgttctgacgacaactcgctagttggagtcttcgctgcagcgaggcccgaagcgtcgctcatcccgcattatcgttcgctggtaaaggagatccttgcctgcggctttgaaattaaacgtttgggagaaggtgcctcatcatga

SEQ ID NO: 27573 - DNA, 1878 bp, Pseudomonas aeruginosa BWH049; identical to SEQ ID NO: 27556

SEQ ID NO: 27574 - DNA, 1062 bp, Pseudomonas aeruginosa BWH049
atggagtggcaggcagtttccttagagggcgcgcgtaggggcgtcggggcggggataggctgtaggcgaggaggggaatgccttcggatatccgcagtgtcggaatgcttgcgagcggtatcgcatctttgctccgcccctaaaggcagtcagggagcgtgggagcctgctgcctcggttcgtctctccggtatggtgcgacgtaagttggtttcgttgtggccaaatcttgctgccgatggagtggatactcaacctggagtaataggaatacttaatagtcttgccgatctgggagacatggtcagactcgagggcggcaagtggcttgcggcgccagctcacactgttcgggcaggagacgggttagctgtgctgctaggtggggggccaaaggagatactcccacaagcggtgagggcatcggcaaaggctgagggtagggttcggctggtggagaccgctgcttgcgaaggctgggcagatatgtgggaggcagaagagtggatcggagcccccgccgaagggcttgaagcatggtcagcgcggctgctggctgaggctacgagtcgactgacggatgctcctgacgacatgggtgaggtctccgtctacttgccgcgtgaatgggtcagacttacggatctgccggctggcgagggatcaattttactctgcagagtgcgtagttcgggagttgccgggccgatgttttcctatttcattggcgaatttgtaaggggtcgcctgcggagacttagtggcattgattccaaggatgccagacgctttcgcttccatctggatgcacgggcagggcgttctatccgcgtcgtcgcttcagtgtcgcagggctcggtgaaactcagactagggcgccgcttgccagagcgtgaggcaagggtactcctgcttggttggcaggtccccgcgcctgatgggggacatcctggtgtaacgcatcacatgtttcccgtagagactttaccaatcttgcgtaaggcatttgaggggcttcggatcgtactggatgagcgtttggacgcagggagagaaaactga

SEQ ID NO: 27575 - DNA, 5535 bp, Pseudomonas aeruginosa BWH049; identical to SEQ ID NO: 27565

SEQ ID NO: 27576 - DNA, 1221 bp, Pseudomonas aeruginosa BWHPSA028; identical to SEQ ID NO: 27543

SEQ ID NO: 27577 - DNA, 1647 bp, Pseudomonas aeruginosa BWHPSA028
atggattgcgccatagacccagtcgagaataaattggttaccgccgatatagcgtcacgcaccggctattatatctgttcctactgccgcaagcgggtcggacttcgttcggggccgtcgcgaaaaaactacttcgcccattggcgtggcgtgtcctctagttcctgcccctatttcatctcgggatcattaggtcacgtcagtcatgacaaggttcaaccacttccaacgcggcagatggacctgcgcttgctgataaaaaaaggtgagaacgccggggcatggtggattgaaatagtcctgcccccctgtcgagcgtgtcatgccttcgtcaaactcgatgttggcggcagggtacaaaaactcgatatgcgcgggatgggctcaggcttcagggtcatggctgagcctacggcgaacgactacaggatcatgtccttcgaaggcgagccggacccttcgttcgtagtggaagttgcgcggacctgcccaggtctacctgcctggggtgcggctgcattcaccgccattggtcgaggcgccgaaagtgggtttccccgcgctcaagcgctgaatcgctgcgaaacctacgcactgctatggtcggcgccggtgaccccggaattccccgaagaactgcttgtggataggctcaagtcacggcaaggctggaatttggctctggtcaccgtaccggaagccccgtcagacatctgcatcagttggctggaagactttacccaactgagcgtgatgccagcggcgcctgcgatcacgaccatttggccgttcctgagccgcaacgcgagcatcaatacggttgaatatatcgagtccgacgcggtcatcctggccgctcataggatgccgggtggcccgcatgacggcggaccaaccttgcaagccgtcaatcagcatgattgcatttccgcaacagcccccgatcgatcacccgcattattcaccgtgatacgagctggaagcgatgaattcaggatcggcaagagcggtctcccagatgtcgacaagttttttttcaagagcacgtcgctggggcgaagctttaaataccctacggtggacctggtcttcattgacgagcgtaacgaacgctttgttgccccattgcacagcagacaaagccaatcctatgtgatggccacgcgagcgggggaactacattttgactccctcactatgccgagaggggccaaaggcagactggaggttgtctcacccaatgggcacaagcaataccgccgactggcgtctagcgaagtgtcggctgaccactcaccacaggcatgccagttgccatcggcaatgaatagtttgctcaaagaatatctcactgacccgcaataccagttctatttggactttggcggtttgggccggttgtccatcggggcgatgcagcagttggccacccacacacccgcttttctgtcgctcgagcgatccttacgcttgcgcctgcagagctttctatcccagctacacgtcggtggggtaaccgcactctctggcagtgatcaggcattggtcagcgcgtttggcgcatcagtaccgaggccggaattgctcccgcactaccgccaactggcggctgctgtgcgcgcctgtggatttgatgttcgttattaa

SEQ ID NO: 27578 - DNA, 1836 bp, Pseudomonas aeruginosa BWHPSA028
atgattaccgagtttatcgaagaggtaccccatgtctttcgcaagtcattcttcgaccgccaagcctcgatccccgggtttaggcgcggttccccgccagaagtcaaagagaaacaacgacggttgatcgggcacttggtgcatccccagccgggtcagaaaggggaggcggactggcaagccttcgctagcttgtgggtggcatgggcaaagagccgcttggactgcgcgtttcccgctgcagacaagtttccccaatcggcggacacaggcgctgatttcttcaaacgattggctgagttgtacccggacgcccctcgggaaacggtcgagcgactggccgtgtacagcggtttcgccgaagatccggcgatgcaggcagtcctgaacagctttcatccggcgtccaccctggccaggaatcgaatgatcgatggcttgccgggacgtttggataaaattgagagttattttgaattggcggaaacggcgaccgaggagaccgctgagcacatcgatcaactggaagtgactgtcactgcaacggctgaagcagttaaacaactgactggcagtttcgctagtgttgaccatgatgtcgaagcattacgtacagcgctacacggtatcactgagcgcttgcaacaactgagcgaactggctcagtcaacggccagggcgcagcaagaggtatcgcaagcgatcgcgcgctcagacctccgcggcgagcacatgtcgactgcgctggactccctctctgttcaggtcacagacctggtggcggaacgcgcgcaggtcctagctttcgaggaagcactgaccacacttggtgcgcgtattcccgattgggagctcacggcagccactattgcagcgttgcgcgaacgcctcgacgaccacgattttcgggttgccaaaccacgtgacgagaccagtggccatacacgcgtccgcttgatcgagaacgaagcaaccggtccgttcgttgaagtcagttccgtggatgtcgcctggaaggtcatagccaacaacctgcaggcatgcggtgttgtgaaaaatgatgccaatcgttgcgctgggcatatcctagcagcagttatttccggccaactgatccagttcaaagggtcgacggctgacttaatagcagatgccgtggcagcagccgtaggaggggcgattttccatgagtggcgggttcccgtcggtcttctatcggaggacgccgcggccgactgcctcgaagtagtgtacgagtcgtctgggtgcctactgctcaagggggccaaccggtctgcgtttgaggtgtatggcagtgccatccgtgatcttgtagcgcgtcgtcagttcaccctagcggtcgatgcgcgcctagtgctgatagcgtcttggactcatggcccagcagcatttccagacggaggtacgttgtctgaactcggccccgtgtttgatacggatgaattatctatgcgggggttatctgcccaactgccgctgatgcagttcggccaccttgctgtggatgactggagagtcctgcacagtcctgctgaaaacacgcaattggcgttaccgagcacattgagggagcgccttgcacaggtggactttgttccagggaatctgtggctacgggtcgctgaccgggcgtatgcccagttgcgactgctatcgccaggccctgcggagcgaacgctccatgcagtgttgaagcagtgggcactgccatgggcgcaatcccttggtgggccggtcgaggcgctaacgcgcagcatcatcgaactccagagtgaaatcgacacgcaggcggtccatgcggagcatgtcgagtga

SEQ ID NO: 27579 - DNA, 1038 bp, Pseudomonas aeruginosa BWHPSA028
gtgaagtggctagggagcgatcgcgatgccgctcgcaaaatcctggcaaccggtatgggctgtagaagtggcgatgaaggattgcggatcgcggcggtagctgagtgccttcgggccgcatcctatctgtcctctgtgcccagtacggatcgggaagattgggtaccagcaagcacgctaagtttaacaagccaggttcgcaggcgtttgcttccactgtggccgactctcgacgatgagcaagccgctgagccgggcgtcaaagcgattctggaaagcctcggagagctaggggatctggtgcgactcgacggcggacgttggctaacccctccgccacaggcgatcagaaccgagggctcgctggccgttgtcaccggcggtgggcctgcacaaacttttccttggccaatcacgatgcgcggggcagggcgactcaggctaatcgacgtaaatgcttgcgcaggacgcatcgacctctgggagccgcaggaatggattggcgcaccgctcgaaggattgcaagaatggtcgatccagttattgacgaatgccaaggaacaactgaaacctgcattggatgagcttgcggacgtttcactccgcagcaatggcaaatggatggcactgtctgcctgcgggaccgccgagggtctgttccttgccaaatgccttacaggtcctcggtacgaatactttgtggttctgatgtcgcgagggcatctgcggcaaatgtcgggactgcgacgggagcaggctagacgcttgctgttctacctcgacgcacaagccggtcatcccctgaaagttcaagcgcaggtgtcgcaatcactggttcgactgcgcctgaatcgtcatttgccgagggaagaggcacgcgcactactgctaggctggcaatcaccgccgcatataggtggcggcacaaccgcgacccactatgtaataccgcgcgaaatgtttccgatcgtgcgccaagcacttacaggtctgagcgtgaacctgactgagcgtgaaatttcagaggaacgagtataa

SEQ ID NO: 27580 - DNA, 5523 bp, Pseudomonas aeruginosa BWHPSA028; identical to SEQ ID NO: 27546

SEQ ID NO: 27581 - DNA, 807 bp, Pseudomonas aeruginosa WC55
atggggttgattgccataggtgatccggttttcaaccttggcgtcagagacaaattcatcggctgggatactgcggacagggctgcccggctggtcaacttgatggatgcatatgtccttggggcggtcccaccttacagcgccttattgggcggtaagctggtcgcttgcctgcttcgtagtcgggacatttatgatgattttgccagtgtttacggaagttctacgggcatcatctcgcaggccgaaaaaaatgcgcgtctgctggcagtcgtgactacctcgtcgatggggcgttctgcggtctataatcgattgaaactggatggcacggagtacctcaagtccatcggttttaccggtggctggggacatttccatatacccgactggttgtttattgagcttcgagactatcttcgtgaactcgaccatcattatgcagaccaacacgccttcggccagggccctaattggcggttgcgcaccacgcgtgcagcactgaaggcacttggctttaaggacgacctgatgcgccacggcatccagcgtgaagtcttcatctgtcaattggccgacaacgccacgaagctactgcattccggcagtggaaaacctgacaccaaatcgctgttgtcggtaggtaaaatcggtgagttagcgctgaatcgctggatgattccacgttcaaggaacaggcccgaatttcgcgattggaagccgacggatctcattcacttgtacggcagccaagcgtgccatttttcagccctcagccacctagccccgcgtcgcgttgcattttag

SEQ ID NO: 27582 - DNA, 1278 bp, Pseudomonas aeruginosa WC55; identical to SEQ ID NO: 27544

SEQ ID NO: 27583 - DNA, 1893 bp, Pseudomonas aeruginosa WC55; identical to SEQ ID NO: 27545

SEQ ID NO: 27584 - DNA, 5523 bp, Pseudomonas aeruginosa WC55; identical to SEQ ID NO: 27546

SEQ ID NO: 27585 - DNA, 1230 bp, Pseudomonas fluorescens
atgtctcaaggcaacatcattatttcgggtgtaaacccgagggaagcgaacctcaagcgaaaagttcgcgagcacctgcattctctgggctttaccagaaccgatgagggcgccttgcgtgctcctggcagtgacaaggaagcgattcgggtgctgcatggcgcccagagggaagaacggctcatagcgagcggtaacttcgtcgcccgagccggtgtgaaactgatgcagtatttcgcctcaggcactgaggtaattcccaagaaaatttcgcctgtgctggaacgagtttcgtccggcacttggcagagtgacctgttcagacttgcatcgctttcatggtcggtgccggtatccagtggattcggcagacgcctacgctatctggtgtgggaccaatccaacggtaagctgatgggtctaattgccgtgggtgatccagtcttcaacttgggcgtgcgtgacaagtttatcggttggaactctcatgatcggggcgctcgactggtcaacatcatggatgcctacgtccttggcgcgctgccgccttataacaccttgctgtgcggcaagctcatcgcgtgcttgctccgcagtcgggacctgtacaacgattttgcccatgcctatggggcctccacgggcatcatttctcaagaggaaaaacgggcgcgcctgatggccatcatcactacgtcttcgatggggcgttcgtcggtctacaaccgtttgaaacttcagggtacggaatatctcaagtcggttggctacaccggcggatggggacacttccatattccagactggttgttcatggaactgcgtgactatctgcgtcacattgatcacacctacgcggatcatcacgcctatggccaagggcctaattggcgactgcgaaccacccgagccgctctcaaggctttgggcttcaaggacgacttaatgcgacacggcatcaagcgtgaagtttttatctgccaactggcagcaaacgccaccaagattttgcaaaccggaaaaggcaagcccgatatccgctctcttcaaaccgtcaagcagatcgcaggtctagcactggagcgctgggtgatcccacgagctgccagcgtgcccgattacagacgctggagggcatcgaatctgattggcttgtatggtagtcaagcccatttgctgcgccccgagatccagttggatcaaggaccgatcagcgctttcggatattaa

SEQ ID NO: 27586 - DNA, 1668 bp, Pseudomonas fluorescens
gtgcattttgccgttaacacaataactaaccagatcgagacagcagagcatgcgacaggcaggcgcaattacgtgtgcccaatatgtcgcgccaaagtattgctccgcgctgggctcaagcagaaaaggtgtttcgctcactggccaggattcggctcggcgcggtgcgaaaattttgtgcctggtctccatgggcagtacggtgccggactcgcattggctgcgcgcccaatgcgcagtatggagttacgcctgaaaatcgagcgagggaaaaaccgcgcagcatggtgcttggaactgacgttaccatcatgtcgattttgcaaggcgaccgtcacgctcgacgtgggcaatgggatacttcaggaaatcgacatgggcgggatgtctacaggtcgtcgcgtaaccgcggagttgtcccaagaaagtttccgcatcgtatcttttcagggtaagcctgatcagaacttcgtagaaggtgtagagcgtgcctgccagggactgcctacattcggggcagccgtcttcaccgcttccggcggtgacggtgcagcaggtttcccccgggcacatgagctcaaaaagtcaggtacttatgcgctgttgtggaaggcgcctgacgcactgaaatttcctgaagaactggtgcccgacaattttatcagtcgtcaggactggaatctggcgttggtcacggtacctgcggcgccgtctactgcatgtactgaatggctggagtccttgacgggcttaaccctcagtggctcgacgcctaatatttcaatcgcctggccattcttggcccgcaatacgagtttgaattccgctgaatgcactacgtctgccgcgctcattgtggctgcgagagggatgccgattgggcagagtgataccggtcccatcatgctgatgcgcggcggccaacagcggttgttggcaaccggggtggagcgggatacggcactgtttgccttgatacctgataactttcagcaattttttgtggccaaagccgggacggaggagatcgaaaaactcctatctacgacattccaggtcgacgctgtagccgatttcccggtggtggaaatggcgtttactaatcccgctggcgtgcggctggtggtgcccttcgatagggctcgctgcaaggactacatcgatttggccaggctgaaccagatgacgctggagtatttggccgtacctcctggcacgcgtgggtggttttacgtggtacgagcttcagtgggcatccggtacgaacttttagcgagcgacctaagagcgccccacagtccgtatcaaaggctaatcgcgccggaaccactagcaaatctgattgattgcctgacagatgctgcatgccacgtcgacctcgatcttggcgggttcggtaagttgcgtatgaacggcagcgaactgctcgctccgaatgtcgccactccaactcttgggacggcgatgcgattgagagtacgcagcttcatctctcaattgcgcggttgcacgccgatccgcgttgatgccgatgatgcccaactggtgtgcgcggtcggcgccatcaatccacaacccgcactcattccgcattaccgtgccctgattagggacgttatcgcctgcggtttcgaggtcaaacgaaaagggaaaagtgtctcgctatga

SEQ ID NO: 27587 - DNA, 1890 bp, Pseudomonas fluorescens
atgagttactactacagccaggaggcaagagttcggatctcggcgttcgaacaacagtaccttaccgatttcattgaggaagtaccgcatagctatcgaaaatccgcctacaaccgcctgtccgcgatcgacggttttcgcagcggctcaccggcggatttcaaagcgaagcagaaacgactcatcagtcatctcttgcacccgcaaggcggcgcgaaaggtgaagccgattggaagaccttcgccaacttctgggtcgcttgggctagacaccatctggatagcgatttccccgcgggtgacaagttgctgcccgcaaatgacgccggtcctcttttcctcactggcctcgctgagcggttcccagatgccccgcgcgagacggtagagcgattaatcgtgttcagtgggttcgctgaccacgacgaaagccaaacagtgctgggcaaattccgtcccgcgtccacggtagctcgcgatcgactactcgacgccttgccgaaacgcgtcgacacgattgaggacagtattaagatcctgcaagcggacaccgagcaggccgccgagacaatcgagtcattgcgctcgaagattgagaacctgatgcaggacgtcggcgacgtcagcgagcgcgcagcgcaatcgacgaatgacttgttcgaactgcacgccatggcggaccacctgcttgccgctgatgagcgactggtctcgaccctgcgggcactgcaagaaaatgcccagcgcgctgatgcggctgccgaagcggcggatggcaacgcgcgatcattgcgcgaggcggttgaggtattggctggccgagcagacggctgggatgaggctgcggctcacctaggcgccattgaggaccagctaggcgccattaccgcacgggaaaagacttggttaggaaccacggaagcggttgcagggctgtccgatcgcctggaagccctgcaaagcaacctaggcagagtgcgcaacagtacggccccaacgtcgcaggttcgtctctttgaggcggaggcacaggggcctgttgttgagatccgcagcgtagagaccgcgtgtgagctgatttcgatcaacttgcaagcttgcggtatcgtcaagggcgcagcacagactgttgcgcggcaagccctggctgccctggctgccggccagttgatccagttctccggatccttggcggacatggcgaccgatgctgcggcagcggcggtgggcggactaatatatcacgagtggcgcgtgcctgtcggtttagtgtcggatgaggccgcggcagaatgcctcgatatggtgggtgatacttcgggttgtttggccttgaaaggggccaatcgctctgcctttgaagtgtatggctacgccgttcgcgatgcgatcacccgccgtcaattgggcatgccagcctatcctcgccttgcactgattgcctcttgggcgcagggccctgccgcgttccccgacggaggtacccttgccgaactcgggcccgtcttcgacactgacgcgttgcccatgcgcggcgtgacttcccgcactttaagcctaaaatacggccaccttacgtgtgatgcatgggatcagcttgagggttttgccagcgacatctcgggcagcctcgtgtcggaattgaaggcgctgttcgaggaggcacacttccagccgggcaatctatggacacgatgcgccgaacgggcctatttgcgtttgcgggcctcactcggtgcgagcgagaccgaggacctgcacgccatgttgaagcactgggcgctgccttgggcgaaagccaccggctgccccatcgacgacttgacccgcgtggcggagcaagttatgtcgcagcaccaggtcgaaacctccggcttcgagggcgcctag

SEQ ID NO: 27588 - DNA, 1035 bp, Pseudomonas fluorescens
atgaagtggcaggcgatttcccagtacgacgcgcaaagaatcgtggccatcggcctgggttgtaccagccaaggcgaaggcctgcggatcgccgccatagcggagtgcctgcgatctgcttgtttgttgtgcgcgattccgacggatgggcagggggcatgggctcctgctgcatcgctcagtctgaccagcgttgcccgcaaacatctgacgccgatctggccagacatgctggaggactcagattctaagccaggggtactgagcgttttggaaagccttgggcagattggggatttggtccgggttgaaaaaggatggttgcctccaccgccacgcgcgatcagatctttggagggcaacgcggtcgtgctgggtggagggccatcaccgtgcttcccacgaggtatcaaaaccaggacattcggacgtgtacgtgtggtaacagcttcgctctgcgagggatggattgatgtaagcgatccgggcgactggatcggtgcgcctatcgaagggctggccaattggtcttcccgctttgtgctgcaagcggctgggcgcttcacccaatgccctaaggtgctagaacccgtgtcggtgtacctacaagggcgctgggctgagctggcatgccacccccatgcctcaggtcagttactgggtaagtgtcaaaccgggaccactgtcaattatttcatcggtagatttcagtccggtcggcttcaacaactggcttccattgaagcgtccgatgttcgccgcctgcgtttccaattggatctagaggcgggctgtccttgtacgatggaaacacaaacgtcgccacgtttcgtgacgctgagatcttatcgccgactcccgccagagcaggagaaagcgctcctccttggctgggagttacccaaagccgagggtgagcatcctgggttaaaaacccacgtcatacctgtcgagacattccccatcgtgcgctgtgcgcttgagggactaggcattgttttggtcgagcgcaagcgcgcgcaaggagggatctga

SEQ ID NO: 27589 - DNA, 5547 bp, Pseudomonas fluorescens
atgagcaatacatctatgaccgcagaggctaccggggttcacgagaccgccaagagtcttgccgaaagcttgcggcaatacatcgaagcgcaatatcacatccgagatgaaggattggtcagagaacggcacgcgttactacaatccaatgaaacgatcgcccagaccccctacgttgaggccactcaagtctacaagacaggtgagacctacgataatttggccatcccgccggcagcggcctcagcattgagtaacctctcggcgatggggctggggctctatccccgcccgtatgagcatcagtcgcaggcacttactgcattcttgggtcaggatgcagcggacttggtcatcgccactggcacgggctcaggaaaaacagagagctttctcatgccaatcattggctctctggcggtggagggtgcagaacgccccacctccgctgcgatgccaggatgcagggccatgctcctgtaccccatgaacgccttggtcaatgatcaattggcgcgaattcgtcgtattttcggcgacaccgatgccgcgggtatcctccagcaagaccgagcgctcccaattcgttttggtagttacacaggtcgcacgccgtatccgggtaagcgagacagtggccgcgatgagcgcttcatcaaaccgctgtttgagcagttctatcaaaaggttgccaaagtccctgcagtacagggcgaactggctcggatcggacgttggccgagcaaagatctggttggcttttatgccgatgactcggtgcagaccaagacttggacttcaggcaagcggcaaggcaaacagttcatctcgaagaattggaaaggtcgcctgcttactcagccaggcgaccgcgagttgatgacgcgtgacgagatgcaggttcgctgccccgagctcctgattaccaactattccatgctcgagtacatgctgatgcgccccatcgagcgcgatatcttcgagcagaccaaggattggctgaaaagtgacgtccgcaacgagttcatcctggtcctggacgaggcgcatatgtaccgcggagcgggcggagctgaggtagcgcttctgatccgacggctgtgcgcccgcctggacattccacgcgagcgtatgcgctgcatcctcactagtgccagcttgggaggcgaggatgctgctgctgccaatggcgatcgatttgctcgtgatttgaccggcttgcttgaggggtcaccgcgcagcctccgtgtgattcaaggcacccatgaaccgcgctctgctgatcgcagcatcaccgattcgcagatgcatgcgctggcttccttggatctgcctgcgtttcagcgcgtggcgaacgacctgccggcggctactcaggcgctgaacaacctggctcaagaactcggatggccctcgttccaaggcctggctcacactgcgttgcgtgactggctgtttgagaacctgaccggtttcggtcccttggaaaagctgatcgaactggtgtcaggtaaagcggaaaagctcgatgacctcggcaaaaagctcttcgctgatgctccgggcgccactgcggagaaggcaacagatgcacttctggcgttgggcagccacgcgcaacgacgctcagacggccgggtattattaccgacccggctacacctatttcaccgcggtttgccgggactttatgcatgcgtcaacccccactgtaccagtcgtcaaggggatcaccagggccctactatcttaggccgcttgcacaccaagccctcgacgcaatgcaactgcgagtccaaagggcgcgtttttgaattcctgactcaccgtgattgcggggccgcgtttgtgcgcggttacgtgaacgaagacatggatttcgtttggcatcaacctaatggtccgttcgccgaaacgagcactgcagcgctgatgccagtggacattttcgtcgaagaaacgacccacccacgcagccgtcaccgcgacaaatggctgcatatgtcgacgggcatcatgagctcgaccaataaggacggggttgaagggtttcgcagggttcgagtgccggacaagccaccggcgggcgaggctattaccttcgacaattgccccgtgtgcactcgaaagattcgcaacggtaaagatgaaccctcaaagatcatggaccacgtcaccaagggggaggcaccgttcaccactttggttcgtactcagatggccaaacaggcagagagcagggtagtggactcccgccaccccaacggcggacgtaaagtcctgatcttttcggacggccggcagaaagcggcacgcctggcacgtgacattccgcgcgatattgaattggatgtcttccggcaagcgatagcactggcctgtcagaagctgcgcgacatttcacgtgaaccgcggcctacgcaagtgctttacaccggcttcctagctgttcttaccgagtttgacctgcccctgtttgacggcaacgatgcgcgcaaggttgccgacgccattacggtgtacaaacgcgattgcgactctgacttggaagaggctctgcagcaaaacggtctgcccccagaactgccgccacgctatcgaatcgccttgctcaaactgctgtgcagcagctactactctctgaccgggacaacaattggctatgtcgagcctgtcgaatccaaacggaaaaaaatcaagcaagatctcggtgcggcgggcgtatcgctcggggatcaagatctgcgagcgctcgccattggctggatagaaacgctgctgcaggacttcgcgtttgataaaacgattgatcgctacctacgttataaagccgcaggctacgtaaaatcaccgtggggcagcaacggaatgttcgacaagccgctgagggaggcgcttgcggcccagttaccaggcagtctgacaacgcttgaagctatcgagacgactttccgcaaccatcttgctgacgaagagaacggcacgtggttcctgtcgcctaactcggttagcctggtcgtagaccttgggcacgtttgggcgcaatgcggccaatgtacggctgtcacgccacttgcgttggccggaaaaatttgtctcgcgtgcgggagtgatcgtgccacgcttgtggatcctgctaccagtccgtacttgtccgcccgcaagggactttggcgcgagccggtacgagaagccttgcagcctggggcccggctcaccaatctcaacgtagaggaacatactgcgcagttgtcgaatcgtgatcgcagcaaggtccatgcgacgacggagctctatgaactgaggttccaggacgtcctgattgatcccacggatcgtccgatcgacgtgcttagttgcacgaccaccatggaggtaggcgtcgacatcggttccttggtcgcggttgcactgcgaaacgtgccccctcaacgagaaaactaccagcagcgcgcggggcgggcagggcgccgtggctcctccgtttccacagttgtcacctactcgcaaaacggaccgcacgacagccactatttcctcaatccgcgacacatagttgctggttcaccgcgaacgccagaaatcaaggtggacaacgagaaaattgcccgtcgtcacgtccatgcatatctgtttcagacgtttttccacgaagtcatggcgcaaaatccgttgctgtctaagcctaagaccgcgttgttggaaaaggcgcttggcgcgactcatgatttctttttcgccggcatcgactcgggccttaatctggaacagttcaagtcctgggtttcgggaaagctgctgcacgatgaagcgcctctaaaaaattcggtcctggcgtggttaccgccaaatctcgacacgcaaggccttaccttggccgaatggctggaagatactgcacgccgcctgattcataggctgcatgagttggcggcagaattaccgcaacaagcggtcaaccaagacgatgagagcgaggcggatgacgccaatgacgatgagagtaatgcttccactgctgaaatagagcaaaaggaactactggagtttctattccaccacagcttgctgcccacctatgcgtttccgacggatttgtgcagtttcctgatagagaacattgccaaggtcaatggcatggcggaaatccagacagttcaacgcccgcaacaatcgatttcgaaagcgctgagcgaatacgcaccgggacgactcattgtcatcgatcggcatacctatcgctcgggcggcgtattcgctgacttgcccggaaatgtggtgaaccgcgccgcgcctctgttcaagaaggctaagcgccatgttcactgcaagacctgttcctttgtgcgcaaccccaactcaccggttggtaatcatggaccatgccctgtttgcggtggcgagctcgccacggagacgatgattctcccagaggtattcggcccggaaaaagcagaagatctaccagagaatgatcgtgaacaggagatcaccttcgccacgatggcacagttcccgcagcccgttaacccggatgaattgaccttccaaatctgcggaccgaaagccagttttacccatgcgacaaaccagacactggtgacggtcaaccggggtatcgagggagccgaattcggtgggttctcagtgtgcgttgagtgtggtcacgcatcagtattcgatcacaacgttcatctcggccctcatgaacgcccctacaagctgttgaacccgaaaggtgggccaactctctgctccggaaggtttgacagggtcctgctcggccatgatttcaagacggacttgctgctgctcaggctgaaggtcgaggctccactggttagcaatactgccgaagtcgtggtcctacaaattcttgaggatgccttgcactctatcgcggaggcactgcggctagcggcgagccgtcaccagcaacttgacctcgatccctcggagttcggatcgggcttccggattgatccaggagtgcagggcgaggcgagaatcctggaagtgttcctctatgacaccctgtcgggaggggcaggctacgcagagattgcagccaggaacatcaaagagatcctcgagtcaacccttgttctgttggagaattgcgactgcgaatcgtcttgcaccgaatgtctgaatcacttccacaatcaacatctgcagcaccgcctcgacagacgcctcggtgcgacgctcttgaagtatgcggtggatggcgttgtgcctggctgtgcgcctttggatgagcagtggcagacactatcgcacttgcgcgccagtcttgagcttgaaggctttgactgctcgttcaataccgtgaaggcggtgccaatgctggtgcagcgtaatggtcgaagcctggcggtcggctgtttcccaggactgattcatacgcccgattttgtgcatggggtggctacggcggataacgtagatggtcaccttgcgctgaatgagtacttgctcaggtcagatatgcccggtgcgcatcagagggtcaaggcattgtttgaaggattcacagagcgttga

SEQ ID NO: 27590 - DNA, 1230 bp, Pseudomonas putida S610
atgtcacagggcaacatcattatcgcgggcgttaatccgagggaggcgaacctcaagcgaaaactccgtgaacacttgcatactctgggcttcaccagaactgatgagggtgccttgcgagcgcccggcaatgacaaggatgcgatccgggtgttgcatggagctcaacgggaggagcgcctcatcgccagcagcaactttgtagctcgagcgggtgcgaaactgatgcaatatttcgcctcaggtaccgaggtgattcccaagaaaatttcccctgccctggagcgggtttcgtcgggcacctggcagagcgacttattccgtctggcatcgctttcgtggtccgtcccggtgtccagcggcttcggcaggcggttgcgctatctggtgtgggatcaatccaatggcaagctaatgggcatcattgccgtgggtgatccagtgtttaacctaggtgtgcgggacaaattcatcggctggaactcgcatgatcgaggcgcgcgcttagtcaacatcatggatgcctacgtcctcggagcgctccctccttacaactccttgctctgcggcaaactgatcgcttgcctgcttcgaagtcgtgatctttacaacgacttcgcccatgcctacggagccaccacgggcataatctctcaggaggagaagcgggcgcgcctgatggccgtcatcaccacgtcttcgatgggccgttcctcggtatacaaccgtctaaaaatcaatggcacagagtaccttaaatcaatcggctacaccggcggctggggacacttccatattcctgattggttgttcctggaactgcgtgactatctgcgccacattgatcacacctatgctgatcatcacgcgtacggccaagggccgaattggcgattgcgcaccacccgcgcagccctgaaggcgctgggtttcaaggatgacctgatgcgtcacggcatccaacgcgaagtctttatctgccaactggcaaccaatgcgacgaagatcctacaaacaggcaagggtaagccggatatccggtctcttcagacagtgaagcaaatcgcagatcaggcgctggatcgctgggtgatccaacgggccgctaacgtccccgattaccggcggtggcgctcatcggacctaatttctttgtttggtagccaagcacaattgctgcgccccgagttccagttgaataacgagaaggcgaaagctttcggacactaa

SEQ ID NO: 27591 - DNA, 1668 bp, Pseudomonas putida S610
ttggattacgccgtcaatacgttaacaaaccaggttgagtcagcagagcaggccacacgcaagggacgttatgtgtgcccgatctgtcgcgcaaaggtattacatcgggctgggatcaagcagaaaaaatgctttgctcattggccaggtttcggctcggcacagtgcgataattttgtgccaggcctgcacggtcagcatggagccgggctcgcattgtcggggcggcccatgcgtagtatggaactacggctgaaaattgagagagggagaaaccgcgctgcctggtatctggaactaacactaccgtcttgtcggccctgcgacgcgagtttcaccctggacgtaggcaatgggattcttcaagagattgacatgcgcggaatgccgaacggccgccgcgtgactgcggaactttcgcaagagagttttcgcatcgtgtcgttccaaggcacccccgatcggcattttaccgatggtgtagagcgcacctgtcacggattgcccaccttcggggccgcagtatttacggccttggcaggggacagaacgccgggctttcccagagcccaggagctcagaacggacggtagctacgctctgttgtggaaggcaccggagaacctgaattttccagaggaactggttcctgataaatttcacagtcgtgagggttggaacctagctcttattacggtgcccacgtcaccttccgatgcctgtgcagaatggctggagtccttgacgggcttgaccatcaatggggccgtgccaagtatttcaatcgcttggccgttcttgacccagagttccagtttaaactccgccgaatgcgttgcctcgaccgcaatcatcctcacagcccgaggaatgccggtagggcagaccgctaacgggccaaccatgttactgctgagcgggcagaatcggctttcggcaacaggagtggatcgagatccggcactatttgccttgatacctgacagccgtcagcagttccacgtggccaacgctggtacgtcggagattgaaaaatacgtatcgacgaccttcaacgtcgacgctgcgatcgatttgcctggggtggaggtggctttcactaacaccgccggcgtgcgcttggtcgtgcccttcgaaggggcccgatgcaaggaatgtatcgccttggccaggctcaatcagatgagactggaatacctgtcaatacctcctggtgcgtcgggctctgtttacctcgaacgcgctgccactggcctcaagtacgagctggcagcaagtgatctgagcgcgcctcacaaccagcatcagcgcttgtttacgccagaactacaagcgattgttattgacggtttgattgatgctgcatgccacgtcgacctcgacctaggcggcttcggcaggctgcgtttacgtggtagcgcacagtgcccgtcggacatcgctgtgccatgtctcgggccatctatacgcttgcggctgcgcagctttatgacgcaattgcagtgctctgcgccggcccacattgacgccgacgatgtccagttggtttacgcgttcggcgccctccaaccacaacctccgctaattccgcattaccgtgccttgatcaaggacgttatcgcctgcggttttgaggtcaaatcttcaggaaaaagtgtctcgccatga

SEQ ID NO: 27592 - DNA, 1890 bp, Pseudomonas putida S610
atgagttactactacagccaggaggccagagttcggatctcggcgttcgaccagcagtcccttaccgagtttattgaggaagtaccgcatagctatcgaaaatcctgctatgaccggatgaccgccattgacggttttcgcagcgggacacccactgacttcaaagccaagcaaaagcgactcatcagtcatctattgcatccactgggtggccagaagagtgaagccgattggaaggccttcgccaacttctgggtagagtgggcgagaaatcatctgcacaaagatttccccgcaggtgacaaattgccgcccgctaatgatgcgggcccgctttttctggcgaagctcgttgaacgtttcccggatgccccacgcgagacggtagagcgcttgatcgcgtttagtgggttcgctgaccacgccgacactcagacagaactgagcaaattccgcactgcggccatagtggcgcgtgatcgactgtttgaagccttgccggatcgcgtcggcactctagaggacagcgttgagagccttgaagcgacagatgatgcttttgtcgaacagctcaatgcactgcgcttgaaggatgacaacctagctggagaactgcgtgacatcagggagcgcgccactgagtcgacgcgcgacctcgccgaacttcgcgcactgacagaacgcctccttgccgcggatgagcagttggtatcgaccgtccgcgcattggaagagaacgccatgcgcgccggtgcttccgacgaagcaacccaagacgatatccgttccttgagcgaagcagtgaaggtgctgtctgagcggtcaggtgcttgggatgagatgacggcacacctcagtgcgatcgaaagccggctaaagcctatcactgcacgcgaaacggcttgggtggagaccacagaagctgtagcgcggctgtcagaacgcctggaaactttgcaaagtagcgttggtacagtaaggagcgagtcaccccctacgtcgcaggttcgtctgtttgaagcagagcctcaggggccacttgtcgagatcctaagcgtggagaccgcgtgcgatttgatctccaccaacctacaagcatgcggtttcgtcaaagggacagcactgaccgttgcacgtcaaatcatagccgcgcttgccgccggtcagttgatccaatttaccgggtcgttggcggacgtggtcgctgacgcactggctgcggccgtgggtggatcaagctaccacgagtggcgcatccctgtcggccttgtctcggatgaggcagcggcggaatgcctggaaatagtgggagagacctcaggctgcctagccctgaaaggcgcaaatcgctccgcctttgaagtctatggctcagccattcgcgaggtgattacccgccgtcaactagcgatgtccgtctacccccgacttgcgctggtcgcctcgtgggcccagggacccgcagcatttccaggcggtggcacacttgccgaactcggcccggtttttgataccgatgtgcttcccatgcgtggcgtaacttcccgattgatcaatgtgaagtatggtcatctcgcgcaagagtcatgggaccaacttgagggcttcgacagcggcatgtccggtgctctcgtggcggagttggaggaactgctgaaagaggcgggctttcagccgggcaacctttggagaagatgcgccgaacgcgcctatctgcgcttacggactgctgcaggaagcagcgaggaaggggacctgtatgctcttttaacggcatgggcactgccttgggcaaagagtacaggcggtccggtcgacgatttagcccgcctggcagagcaggtcatggctcaacaccaggctgagacttcgcatctcgagggggcctag

SEQ ID NO: 27593 - DNA, 1035 bp, Pseudomonas putida S610
atgagatggcaagcactgtcccggcacgaggcacaaagcatcttggccaatggcctaagttgcaccacccaaggcgaaggtctgcggatcgccgctatcgcggaatgtctccgtgctgcctgcttcctacgcgcgatgcctaccgaaaatcggggcgcgtggacacctgtggcttcactcagcctgaccagcctgacccgaaaacatcttgggccaatttggccagggatgctggatgacacggaggccaaacctggcgtactgagcattctcgacagcctagagcagatcggcgatttggttcgggttgaaaaaggatggttgcctcctcctccacgagcgatcaggtctcaggacggctacgcggtcgtactgggtggcggaccctcaccgcgtttcccgcgaagcgttaaggctagggcactcgggcgagtgcgggtgataccgacgtcactctgtgcgggatggctggatatgggcgacccgagtgactggatcggtgcgcctcttgagggattggcaacctggtcttctaactttctcatgcaagcgtccagacgttttacctcttgtccaacggatgtcgcgcctgtatccgtgtatgtgcagggacgttggtctgagctggtaagtcagcccagtaactccggacacttcctggccaagtgtcgaaccgagaacatagtgagttatttcataggcaagtttcactgcggtcggcttgaacagttggcatccatcgaggcatctgacgcacgtcgcctgcgcttctatctggatctcgaagcgggccggccttgtaagatgcaaatagaaagctccccacggtttgtgaccttgcgatcgtatcgccggcttccgcctgagcaggagaaggcactgctgctcggctgggagttacctagaaccgagagtgatcatgccgggttgaaaatccatgtaataccagtcgaaacattccccattgtgcgctgtgcgcttgagggattaggcattgttttggtcgagcgcggcggcgcacaaggaaggatctga

SEQ ID NO: 27594 - DNA, 5538 bp, Pseudomonas putida S610
atgaacaacacgtccatggcagaggctgtcggggtgcacgagaccgcgaaaagtctcaccgaaagcttgcggcagtatatcgaggcgcaatatcacatccgggatgaaggactggtcagggagcgccacgcgcttttgcaagccaatgctaccatcgcccagaccccctacgtggaggccacgcaagtctataaaacaggtgaagcttatcagcacttggccatcccgccggcggctgcttcagtgttgaacgacttgtccgggatgggcttgggactctatccccgcccctatgaacatcaggcgcaggccttgagcgcattcttgggtgatgagtcggcggacttagtcatcgcgactggtacgggctcaggaaaaaccgaaagttttctcatgccagtgattggctccctggcaatcgaaggagcagagcggccaaagtccgcatcaatgcccgggtgcagggccatgctcttgtatcccatgaacgcactagtcaatgaccaattggcgcgaattcgtcgcatttttggcaacgccgacgcagcgggtatcttgcagcagggccggacattgccaattcgctttggcagttataccgggcgcacgccttacccgggcaagcgggaaagtagccgcgatgaacgcttcatcaagccgctgttcgagcaattctacaaaagggtcgccaacgtcccggcagtccagggcgagttggctaggatcggccgctggccgagcaaagatctcgtgggcttttatgccgatgactcggtgcagaccaagacctattcgtcgggtaagcggcaaggcaaacagttcatttccaaaaactggaaagggcgactcctcacgcagcctggtgaccgtgagttgatgacgcgtgacgaaatgcaggtgcgctgccccgaactgctaatcaccaactattcaatgctcgaatacatgctaatgcgtcccatcgagcgggacatcttcgaacagaccaaggactggttgaaaagtgattttcgcaacgagttcattctggtactcgatgaagcacacatgtaccgcggagcgggtggggcagaggtcgcgctgctgattcgtcgactctgcgcccgcttggacatcccacgcgagcgtatgcgctgcatcctgaccagtgcgagtctgggcagcgaggaggctgcagcgtacaacggtgagcggtttgcccgcgacttgaccggtttactagaaagctcgccgcgtcgacttcgcgtcattcaaggtacccatgaactccggcccggtgaccgcagcatcaccgatgcgcaaatgcaagcgctggcctctttggatctgcctgcgtttcagcgcgcggcaaacgacttgtcatcagcgatgcgtgcgctgaatgacctggctcgagcactcggctgggactcgttccaaggctcggatcacgccgggctgcggaactggctgttcgagaacctcactgggtttggccccttggagaggctgatcgagctggtctcaggcaaagccgaaaagcttgatgacctcggcgaaaaactcttcggtaggacgcaggacaacaccccagaaaaggccaccgatgcgttgctggcgctgggaagctacgcccaacgacgtgcggatggccgggttttattaccgacgcggctccacctgtttcaccgcggcttgccgggactctatgcatgcattgatcctgattgctccagtcgtcacggtaaacacgagggctcaactgtcctgggaagcctgcgcaccaagccctcgacgcaatgcaactgcgagtccaaaggtcgagtgtttgaatttctgacccatcgtgattgcggtgctgccttcgtgcgcggctacgtgaacacagccatggatttcgtctggcaccaacccaatggcccgttctccgaagcgggtacggcggcgttgatgccagtggatatttttgttgaggaaacgacgcacccgcgaagccgtcaccgcgacaaatggctgcatatttcgacgggcatcatgagctcgaccagccaggaaggggtcgaggggtttcgcagggtgcgagtgccggacaaaacgccaatgggggaaccaattaccttcgataattgccccgtctgcacgcgaaggatccgcaatggtaaagatgaaccctcaaagatcatggaccacgtgaccaagggggaggcaccgtttactactctggttcgaacacagatggccaggcagccagagagcagggtcgtggatgcccgccacccgaacggtgggcgcaaggtccttatcttttcggacggccggcagaaagcggctcgtctggcacgagacattcctcgcgacatcgaattggacgtcttccggcaagcgattgccttggcctgccaaaaactgcgagatatttcgcgggaaccgcggcctacgcaagtgctttacacaggttttctagcagttctcaccgagtttgacctgccgctgtttgatggcgttgacgcgcgcaaggtcgccgacgcgattgcactgtacaaacgcgattgcgactctgatttggaagaggcactacaacaaaacggtctgcctccagagttgccagcacgctatcgcatcgctttgctcaagctgctgtgcagtagctactactcattgactgggaccaccattggctacgtcgagccagtcaccaccaagctgaggaaaatcaaacaggatctcgttgcggcgggtgtaacaatcgcggaccaggacctgcgagcactggccatcggctggatagaaatgctgctgcaggactttgcgtttgacaaatcgattgatcgtatcctgcgtatcaaagcggcgggatatggaaaaccatcgtggagcagcaacggtaagtttgacaaagcgctgagagaggcgctcgccacccatctgcccggtcacttggcaacactagaggtcatcgaagcaacgctgcgtaatcacttggccgacgaggaaaacggcggctggttcctgtcgcctaactcacttaacttagtggtgaacctcgatcacgtctgggcgcaatgcggccagtgcacggccgtcacaccgctcgcattatcaggcaaaatttgcctggcgtgcgggagtgatcgtgccacgcttgtggatcctgccatgagtgaatatctaaccgcccgcaagggactctggcgcgaaccggtatgggaggcattgcagccaggtgcgaggctctccaatctcaacgtggaagagcacacggcacagttgtcgaatcgtgatcgaaacaaagtgcatgcgaccacggagctttatgaactgcgtttccaggatgtgctgatcgatgctagcgaccgcccgatcgatgtgctcagttgcacgacgaccatggaagtaggcgtcgacatcggttcattggtagcggttgctctgcgcaacgtgcctcctcaacgagaaaactatcagcaacgcgctgggcgggcggggcgccgaggtgcatccgtttccacggtagtgacctattcacaaaacggcccgcacgacagtcactatttcctgaacccccggtacatagtggccggaccacctcgcacgcccgagatcaaggtggataacgccaagattgctcgtcgtcacgtccacgcctatttgttccagacgttcttccatgaagtcatggccaaaaatccggtactgccatcatccaagacggcattgctgcaaaaggcactgggtgcgacccatgatttcttttttggcggtaacgattccgggcttaatctcgagcagttcaaggcatggatcacgagtaacgtgcttcaggacaatggccctttaaaacggtccgtgctggcatggctcccgccgagtctcgatacgcaaggggtcaccttgatggagtggctcgaagagaccgttcatggtttgatgcagaggttgcatgagctagcggcgcagctaccgcaacaggcgttaagtcaagccgacgagagcgaagtgcaagaggtagatgaggtcaatgacgatgacagcaatgcatccgacgccgaaattgagcaaaaggaattgctggagtttcttttccaccacggcttactgcctacctatgcgtttccaacgaatttgtgcagcttcttggtggagagcatggccaaggtaaatggcaggttggaaattcagactgtccaacgtccgcagcagtcgatcagcaaagccttgagtgaatatgccccaggacggctcatcgtgatcgatcgacatacttatcgatccggtggggtcttcgccgacctgccagggaatgtggtcaatcgcgcggcacctctgttcaaaaatgccaagcgccatgttcattgcaaaacctgcactttcgtccgcaaccccaatatgccatccgaccccaaagatccatgtccggtatgcggcggcgtgcttgccacggagatgatgatcttgccggaggtgttcggcccggaaaaagctgaagacttgcctgaaaacgatcgagagcaggaaattaccttcgcaacgatggcgcaatttccgcagcctgttaatcctgatgagttattctttcacccctgtgggccgaaggcgagtttcacccatgcagttgaccagacgctggtgacagtcaaccggggcatagagggggccgaatctagtggcttcctagtatgcgttgaatgcggccacgcttctgtgtctgaccgcaacgctcatctcggcgcacatgaccggccttacaagttgctagctcccaaaggcacacctgcacagtgctccggacgctttgagcaagtcctcctaggtcatgatttcaagactgacttgctactgctcagattgaaaattgaagcgccgctggttacgaatacggccgaggttgtggtcctgcaaatccttgaggatgctcttcactctatagccgaggcgctaaggctagcggcaagccggcatcaacaattggacctcgacccctcagagttcgggtcgggcttcaggatcgatcccggagtgcagggggaggcgcgtgtactggaagtcttcctgtatgacactctttcaggaggagctggctacgcagagatcgcagcccgccacatcgtagagatcctagaggcaacccgccaattgttagagaactgcgactgtgaaacgtcctgcaccgagtgcttgaatcacttccataatcaacacctgcagagccgtctcaacaggcatctcggagccacgctattgaagtacgccgtggatggcgtagagcctggctgtgcgtccttagaggagcagtggcagacactgtcgcaattgcgcgccagcctcgtactcgacggttaccagtgtaggttcgatgcggtgggatcagtaccgatgatggtgcagcgcaatggtcgaagccttgcagtcggctgcttccctgggcttattcacacgccagatttcgtgcatggtgtggcgtcagcgaaaggcgtggatggccatctggccctgaatgagtatttgctccggtcagatatgtccggtgcccaccaaaggatcaaggagttgttcgagtag

SEQ ID NO: 27595 - DNA, 1236 bp, Pseudomonas putida TRO1
atgccaaccggcagtgcgattattattggagttaatccgagagaagcgaatctcaagcgaaaagtgcgagagcatttgcaccagctaggtttcactaaaacccaggaaggtgctctttgcccacctggaaatggcaaagaggcgatccgcgcattgcatggggcccaacgagaagaacggctctccgccagtgaagccttcgttgtacgcagcggcgccaagctaatgcagtactttgccgatggccgagaggtggtgccagaaaaaatttcccctgttcttgagcgcgtctcgtcaggtacgtggcagagcgaactctttcggctcgcatcgttgtcgtggtctgtgcccgtgtccaatggttttggcaggcgcttgcgttacctagtctgggaccaggcgaatggcaaactgatggggttgatcgccataggggatccggttttcaaccttggcgtaagagacaaattcatcggctggaatactaatgaccgagctgcccgactggtcaacctgatggatgcatatgtccttggcgcgatcccaccctataacgccttgctgggcggtaagctgattgcttgtctccttcgcagtcgggacatttatgatgattttgccagtgcctacggcgggtccaccggcattatctcgcaggcggaaaaaaatgcgcgtctgttggcggtcgtgacgacctcatccatggggcgctccgcggtctacaaccgattgaagctgggtggcacgcaatacctcaagtccattggctttaccggcggctggggccatttccatatacccgactggttgtttgttgagcttcgagattatctccgagatctcgatcatcaatatgcagaccagcacgcctttggccaaggtcctaactggcggttgcgcaccacgcgagcggcgcttaaggcgctaggattcaaggacgacctcatgcgccacggcatccagcgtgaagtatttatttgtcaattggcaaccaacgccgcgaagcttctccacagcggcagcggaaagccggatacccaatcactgttgtcagtccgtgaaatcggtgagttagcactgaatcggtggttgatcccgcgttcaatgaacaggcctgactttcgctgttggaaatctacggatctcatccacctctacggccatcaggcacggcttttcgcggctcacggtcatttagccactgagccgcggcgtattatcagtttgcgcggatga

SEQ ID NO: 27596 - DNA, 1440 bp, Pseudomonas putida TRO1
atgcggcagatggatctgcgcttgatgataaaaaaaggtgagaacgcaggggcgtggtggattgaattagtcttgcctccctgtcgtacatgtcacgcttacatcaacctcgatgtcggcggcagggtgcagaagcttaatatgcgcgggatgggctcaggtttcagggtaaccgcagagcccacagcaaacgactacaaaatcatttccttcgaaggcaagccggaccctttgttcgtatcaggcgttgccaggacatgcccaggcctatctgcggtgggtgcagccgtgttcaccgccattggtcgggatggcgacagcggcttcccccgcgcgcaggtgttaagtcgctccgagacttatgccctgttatggtcagtaccggcgacaccagtcttccctgaggaactgctggtggacaggttcaagtcaaggcatggatggcagttggccctggtaacggttccggataccccgtcagaggcctgcataaagtggttggaagaatttacccaactgagcgttatgcctgcgacaccctcgatcacaaccatttggccgttccttacccgttactccagcatcaatacggttgaatacatcgagtctgaagcggtcatcctcgccgctcaccggatgccgggaggagcacacgacggcgggccaaccttgcaagccgttaaccagaatgatcgcatttctgtaacggcgcccgatcggtcacctgcgctattcactgtgatacgcgaaggaagcgatgatttcaggatcggaaaaaccgggcatccggatgtcgataagtatttttccaagaataattcgctggcgcgaagctacaaacaccctacggtagacttggttttcattgacgataaaggggaacgtgttgttgccccattgcaccgcaggggatgccaaacctatgtcatggcgacgagagcacaggaactgtgtttcgattctctggcaatgccgatgggcaccaggggaaggctagaggctatttcacctaatgggcatagggagagccggcaccttgtgtctagcgacgtgacggatgaccacacctcgcagaaatgccagttgtcccctgcgttgaatagcctgctcaaactttatatcaccgaccccaaataccagatctacctggatttcggcgggttcggacggttgtccatcggcgctacgcagccgatggacaacccaacaaccgtactgctttcgcttgggcggtctttaagattgcgcctgcgttgttttctatctcagctacacgctggcggagcgattgcactctctggcagtgaccaagggttggtcaacgccttcttggccgcgcgtcccaatccgggactggtaccgaattatcggcaattggcggctgatgtgcgtgcacgtggatttgatattcgatcttcaggagatggggtctcgcgatga

SEQ ID NO: 27597 - DNA, 1893 bp, Pseudomonas putida TRO1
atgagttacctgtacagccaagaggcaagagagcggatctcggcgctcggaacaatgatgattaccgagttcatcgaagaggtaccccatgcctttcgcaagtcgttctttgatcgtcaagcctcaattcccggctttaggcgaggatccccacctgaattcaaggaaaagcagaggcgcttgatcgggcatctggcgcatccacagcccggacataaaagcgaggctgactggcaagccttcgctagcctgtgggtagcgtgggccaaaagccgcttggacagtgcctttcccaccgcagacacctccccccaattggcggatgcgggtgctggcttcttcaagcgcttagccgagttgtatcctgatgcctcaagggaaacggtagagcggctggcgacgtacagtggtttcgccgaagatcctgccatgcaggccgccctgaatagctttcatccggcttccaccctcgccagggatcggatgattgatggtttgccgggccgtttggataaaattgagggttattttgacttagctgaaacggcggccgaggaaatcgccgagcgcattgaccaacttgaactgacggcgacagtaaccaccgaagcggttgagcagatgacggccaacctcagtggtgttcacaaggatatcgctgagtggcgtaccgcactgcaaagcgtcgatctgcgcttggagcaggtaagcgaactggctcagtcaacgggtagcgcgcagcaggaggcgtcgacagcactggctgactcagacgtgcgcggcgagctcatttcggagagggtaagcgccctagctgcccaggtagagaacttggttgccgagcgtgcgcgggttttagtgctcgaggaagcactggcgatcctcaacgcccggggtctcgactgggatgccgcggcagccaaccttgcttcactgcacgcgcgcgtcaacacccaggagtctcgagtcgtcggaccgagccatgaagtcgggggtcaatcacgcgtccgcttgatcgagaacgaagcaacaggtccgttcgtcgaaataaactccatagaagttgcctgccaggtcattgccaacaaccttcaggcaagcggcgtagtgaagcgcgaggccaacagctacgcgcggcatattttggcggcaatcatctgcggccaacttattcagttcaaaggttcaaccgcggatttaatcgcagatgcggtcgcagcagcggtaggaggggcgatcttccatgagtggcgagttcccgtagggctagtatcagaggacgcagcgacagattgcctcgaagtggtagccgagtcgtctggatgcttgttgctcaaaggcgcgaacaggtcggcattcgaggtgtatggcagtgccattcgcgatgttgtggcacgtcgtcagttcgccacgagtgttaacagtcgcttggttctgattgcgtcttggacccacggccctgcggcgtttccggacggcgggacgctgtcagaactcgggccggtgtttgatacggacgagtttgctatgcgtgggttatcggcgcagatgccgttaatgcagttcggccaactgaccgtggatgattggaaagccctgcacaaccaggctgaaaacactccattggcactgctaagcacgctgagggagcgtctagggcaggtggactttgctccagggaacctgtggctcaggatcgctgaccgagcgtacgctcaattgcgactagtattgcaaggtccttctgagcgagcgcttcacaccgtgatgaagcaatgggcactgccatgggctcaatcactcggggggccagtagaggcgcttacccgcagcacgaccgagttactgagcgacatcgacgcggacgccgtgcacgcggagagtgttgagtga

SEQ ID NO: 27598 - DNA, 1032 bp, Pseudomonas putida TRO1; identical to SEQ ID NO: 27569

SEQ ID NO: 27599 - DNA, 5523 bp, Pseudomonas putida TRO1
atgggtgggatttctatgaatgaagcatctggtgttcatgagactgcgaaaagcctggcggatagtcttcgacaatatatcgaagctcaataccatattcgcgatgaagggctcgtgagagagcgccacgctcttctcctaagttctgaaacgattgtccagacgccttatgtggaagcgacctcagtctacaaaattggagatccgttcaaccgacttcccattcccaaggtcgccgccgatatgctcacccagttgtcgctcatggggctcgggctttaccctcggccctacgagcaccaatcgcaagcgctaactgcgtttctaggtgacgaggctgcagatttagttgtcgcaacaggtaccggttccggcaaaaccgaaagctttcttatgccaattattggtcaattagccattgagggacaggaacggcccgactcggcgcaactgccgggttgtcgggcactgttgctttatccgatgaacgccttggttaatgatcaattggcgcgaatccgtcgcctagtaggaaacactgacgcatcgtcgatcttaacgcagactcgttcccacccgatccgcttcggcagttataccgggcgcaccccctacccgggagagcgctccaaagagcgtgacgagcgcttcatagagccgctgtttgaagagttttataacaaagtcgccgaaaagcctgccgtgaaaggtgagctcgtgaggattgggcgctggccaagcaaggatttggtaggtttctatggcgctgcagccatcgaaacgaagacctacggatcgggtaagaaaaaaggcgacaatttcaccaaaaaaaactggaccggtcggcttcaaacccagcctggcgaccgcgaaatgatgactcgccatgaaatgcaagcacgttgtcccgagttattgattactaactactccatgctcgaatacatgctcatgcggcctatcgagcgcgacatctttgatcagacgaaggcatggctcaaagcggactcgcgtaacgagtttatcctcgtgctggatgaggcacatatgtacaggggggccgggggggccgaggtggccctgctgatccgacgtctctgcgctcggctcgatattccacgagaacgcatgcgctgcattatgaccagtgcgagtctgggacctgctgaaactgcggcagtcgatggcgagcgctttgcgcgggacttgaccggtttggctgatacatcaccacggcgcgtcagggtaatccaggggacgccggaggaacgttccgcatcacaggcagcgccagcagaacaactcaatgcgctggcggatttcaatttggcggacttccagcgctcggccgatgacctcgtcgcggccaccgaggccgcagcgcaactggcacgacggttgggctggagccaaccgccgagtcaggaccatgccgcgtttcgcaactggttgtttgaacgtctcacggggttcgaaccgctggaaaacttgattaccgctgtatcgggtcgcgcagttcgcttagatgagttaagtgatctcctgtttggcaattacccagcggtcgacgcacaaaaagctaccgacacgcttttggcgctggggagttacgcacagcggagcacggatggccgggtcttgctgccgactcgcctgcacctcttccatcgggggttgccagggttgttcgcttgcgtgaaccctacttgctccaagcgcttaggtgatcacgacgggcccacgattctcggccgcctgtatacgaaaccctcgacccagtgcggttgtaagtccaatggacgtgtgtatgaactgcttacgcatcgtgattgcggggcagctttcttgcgtggttttgtgaacgaggagcagaacttcgtttggcaccagcccagcggtccattttcagatggtgcgatttctgcgctgatgccgatagagttgtgcgttgaggatgccactcatccccgcagtcgtcacatcgataaatggttacacatggccagcggcatcctcacggatgatcagccgagagacgaaaccgggttccgtagggtccgcgtaccggacaaggcggcagacgcaggtgatctgacttttgatcattgccctgtctgcacgcgtaagattagaaataccaaagatgatccatcgaaaatcatggatcaccttaccaaaggggaggctccgttcactgcgctcgttaggacgcaaatggcgaagcagcctgccagtcgagccaaagatgcccggcatcccaatgcagggcgaaaggttttgattttctcggatggtcgacaaaaggccgctcgactagcgcgtgacattccgcgcgacattgaacttgacgtgtttcggcaggctgtcgccttggcatgtcagaaactgaaggacttagacaaacccgccaaacccgccggcttgctttacttggcatttctttccgtgttgaccaagcatgacctccctatgttcgatggcggtgattcaagacgagttgagagcgcacgcaagttatttgatgacaattatgactctgacttggcggaagccattgaggcgaatttttcactacaagagattccggcgcgctaccaaattgcccttcttaaattgctttgtggcaactactactcactgtccggaaccatggtcggtttcgttgagccaacgcctctgaaacttagaaagttgaggcagcacctggtgaatgccgagcttgcgataagcgaagcgaacgtccgcgagttggccgtaggttggatagactcgatgctgcaagagtacgcattcgatagatcgattgagtcagcctaccgctacaaggctgcgggctactcgaaaccggcatggggcagcaacggtcaatttggtaaatcgctgaaagagagcctgatcaaccatttcggttggtcgagtgaggtggttcagcgcgttgaagcgatcttccgagatcagttggcagaggaggacgatggtcactggttcctggtgcctgactccctagccattgtcgtcgacttggcgcattgttgggcgcaatgcgctgactgcacagccctgatgcccttcgctttggcaggtaaggtttgcctggcgtgcggcagcgacgcggcgtcctccatcgatccgataaacagcgattacgtcacggctcgcaaagagttctggcgacttccggtggcgcgcgccctaacaccaggtgcagagctatccaacatgagcgtcgaggaacacacggcgcagttgtcgaaccgtgaccgcagtcgagtgcatgccaccaccgaactctacgaaatgcgattccaggacgtgcttattgaggatcgggaccgcccgattgacgtgctcagttgcacaacgacgatggaggtaggggtcgacattggctcgctggtagcggtggcgctgaggaacgttcctccgcagcgggaaaattaccagcaacgcgccggccgggcagggcggcgcggttcgtcggtatccaccgtcgtaacctattcacagaatggaccacatgacagccactacttcttgaacccagcgcgtatcgtggcgggccccccacgtacaccggaggtcaagatagacaatgcgaaaatcgcgcgccggcatcttcacgcgtacctgatccagactttcttccatgaaatcatggcgcaaggcactggcgcgtcgactgaaaaaacctcgtcgttgctcaaagcgcttggtccgaccgaggatttcttctgcagttccgaccaatccggcccgaacttgaagagctttgaggcttgggtgacacgtcgggtgctcgccagcgacggcgatctccgagagtcaattgtggcttggctaccgccggggttggatacccgcggcctttcgttgatggagtggttagccgcgaccagtcaacgcttactcgtggaacttaagaagcttggttcaaccatccaggtgaatgccacgcatgaggaaatcgctggacaagaagcccaggacattgaaaatccctcatcaagtatcgaacaggcggagcttctggagtttctgttctatcacggattgctccccagctacgcgtttccgaccagcttatgcagcttcctagtagaaaagctgactaaaaacgcgcgagatcgttgggacgtgcgcacggtgcaacgaccgcagcagtcgattatcaaagcgttaagcgagtatgccccggggcgcctcatcgttattgacaagaaaacctaccgttcgggaggcgtctttgcagatctaccgccgggagttgtgaatcgtgcgggcccgctcttcgagaacgccaaaccgcatacacactgtaaagcctgctcgtttgtgcgtgaccccaatcggtcagcgaaggaacaaacgggttgtcccgtctgcggccaacagttgataactgaactgatgattgtgccagaagttttcgggccggagagcgccgctgacttgccagataatgaccgtgagcaagaaatcacctacgcgacgatggcccagttgccacaacccgttgatccggagattttcagtttttccgcatgtggtccctacgcgagctttacccatgcggtagaccgcacgctcgtcaccgtcaaccgaggcaaggaaggcacaggcgagggtggcttttcagtctgcatggaatgcggcaatgcctcggtcttcgatcaggaggcaaacgcgggggcccatgaacgtccatacaaacaactcggtccaaaaggaacaccgccgaagtgctctggtaaattcgcacgcgtgttgctaggccatgacttcgatacggaccttctcctgttacgcctcaaaatcgcctcgccaattgttaccgatacggtcaacggggtggtgttgcgcattctcgaagatgccttgcattcgcttgcagaagcgctgcggctagcggccagtcggcatcggcaattagatctggaccctgccgaattcggctctggctttaggattgaacccgcgctgctggatgaggctcgcatcctggatgtatttttgtatgacacgttgtcagggggggcagggtacgcagagattgcagctcgacacatggaggaggttttggacgcgactcttgagctgttagagaactgtacatgtgagagctcctgcacagaatgcctcaatcacttccataaccaacatcttcaacaccgccttgatagacatttggcttcgatgctcttgcggtacgccatacgaggagaggagccggcatgtttgccggcgacggggcagatggtgaaactggcccagcttcgagccagccttgagttagcagggtatgcctgtagggttggctcgattccctctgctcccttgctggttgaccgagagggtaaaacggtagcggtgggctgctacccggggctcatcgatagtctggagcgccagcaacccattggcggcactgcaggagttcacgcagtgatcgggctcaacgagtacctgctacgctcggatctggcgaacgcccaattgaaggtacaatcgctgtttaaatcgtag

SEQ ID NO: 27600 - DNA, 1230 bp, Pseudomonas sp. PI1
atgccaaatggcgatacaacaagtattgatgtcgactctcgtgaggaggatctaaaggaaaagttacgggagcacctgcactctcttggctttactaaagctgaaaagggagtattgcaagctccgggaaacactaaggaggcgatccgctctctccacagtgcgcagcgagaggagaagctctcagctaatgagaaatttgtctcactaactggccgaaaactgatgaaattctttgcgtccggggcggacattgacccggaaaaaatttcaccggtccttgagcgtgtttcatcgggaacgcaacaaggtgagctctttcggcttgcatctttgttgtggtctgttcccgtttcaaacgggtttggtaggcgtctccgttaccttgtctgggatgaaaataatgggaagctaatagggctaattgccatcggtgaccctgtgtttaatcttgctgtgcgggataggtttattgattggaatattcatgatagaagtgcgcggctcgtaaatctaatggacgcctacgtgttaggggccctccccccgtacaatattctcctgggtggtaagcttatagcatgcttattgcgtagtcgtgaactttatgatgatttttccactgtatatggtggtatgacaggtatcatctccggggaggtaaagaaagctaggcttcttgcgataacgacgtcgtcgtcaatggggaggtcatcagtttacaatcgtcttaagcttgatggaataaagtacttagagtctattgggtataccgatggttgggggcattttcatatccccgatcaattgttttcggagcttcgtagttacttgcgtgatattgaccatacttacgcggatcagcatgccttcgggcaaggaccaaactggcgtttgcgaactatgaaagcagcgttgtctgcgcttggcttcaaacaaaatctaatgcggcacggtatccggcgcgaggtctttatatgccagctggccaataacgcgacagaaattctgcggaccggaagaggtcagcccgacttgacatcgctcctgtctgcaaaggatgttgccgagcaagcagtgagtcgctggatgatacctcgttcaaggcgtagacctgagtatcgagactggatgcctgggaatcttattgacatgtttggaaatcaggcgcgaaatctacgtgcccagatagaggaaatagaaaagcataggaatattgactggctgtag

SEQ ID NO: 27601 - DNA, 1062 bp, Pseudomonas sp. PI1
atggagtggcaggcggtttccttagagggcgcgcgtaggggcgtcgcggcggggataggctgtaggcgaggaggggaatgccttcggatatccgcagtgtcggaatgcttgcgagcggtatcgcatctttgctccgcccctaaaggtagtcagggagagtgggagcctgctgcctcggttcgtctctccggtatggtacgacgtaagttggtttcgttgtggccagatcttgctgccgatggagtggatactcaacctggagtaataggaatacttaatagtcttgccgatctgggagacatggtcagactcgagggcggcaggtggcttgcggcgccagctcacactgttcgagcaggagacgggttagctgtgctgctaggtggggggccaaaggaaatactcccacaagcggtgagggcatcggcaaagactgagggtagggttcggctggtggagaccgctgcttgcgaaggctgggcagatatgtgggaggcagaagaatggatcggagcccccgccgaagggcttgaagcatggtcagcgcggctgctggctgaggctacgactcgactgacggacgctcctgacgacatgggtgaggtctccgtttacttgacgcgtgaatgggtcagacttacggatctgccggccggcgagggaccgattttactctgcagagtgcgcagttcgggagcggccgggccgatgttttcctatttcattggtgaatttgtaaggagtcgcctgcggaggcttagtggcatagattcccaggatgccagacgctttcgctttcatctggatgcacgggcagggcgctctatccgcatcgtcgcttcagtgtctcagggctcggtgaaactcagactagggcgccgcttgccagagcgtgaggcaagggtactcctgcttggctggcaggtccccgcgcctgatgggggacatcctggtgtaacgcatcacatgtttcccgtagagactttaccgatcttgcgtaaggcatttgaggggcttcggatcgtactggacgagcgtttgggcgcagggagagaaaactga

SEQ ID NO: 27602 - DNA, 5535 bp, Pseudomonas sp. PI1
atgaccgttatgtcgaaaactgtcgaagcaacaggcgtccatgaggcagcgaggagtctggcagagagtctcaggcaatacattgaggctcaatatcacatccgtgatgaggggcttattaaagagcgccatgcgcttcttcgaagggatgcaaccgtcgcccaagtcccttatgtggaagccactccagtctataaggtgggtgatccctacgacagcctgccgatccctaatgctgccgtcgacgcactgacccaactggcggggatgggcgtcggcctttacccccatccctacgagcaccagtcggaagcactcgtgtctttcctcggcaatgaagcagccgacctagtagtggctactggtaccggttctggtaagaccgaaagcttccttatgcctgttattggtaagttggcaatcgaaggggaagaaaggccagcgtctgctgagcttccaggctgcagggcgatgttgttgtatccgatgaatgccttggtcaatgaccagcttgcacgtatccggcgaatgctcggcaaccccgaggctgcaaaggtcctctcaaagggacgagcgaggcccatacgtttcggcagctatacgggacgcaccccctatccaggacgccgatcctccgtgcgggatgaacgatttatcaaacctcttttcgaagagttttatcgcaaggtcgcagagaaatcggcagtccggatggagctggagcgcatcggccgctggcccagtaaagatctggatgccttctatgggcgagagctggctcagaccaaaacctacgtgtcgggtaagaaggctggcaagcaatatattgccaataactggggccatcggcttgttacgcagcccggtgaccgtgagctcatgacccggaacgagatgcagcagcgctgcccggaactgctcatcaccaactactccatgcttgaatatatgctcatgcgccccatcgagcggggcattttcgagcagactagggattggctcaaagctgatccccggaacgaattcatcctcgttctcgacgaggcgcatatgtacaggggggctggtggcgccgaggtcgctcttctcatccggcgcctctgcgcccgcctggagataccccgtgaacgcatgcgttgcattctaaccagcgcgagccttggttcaggcccgactgcagtcgaggacggtgagcgcttcgcccgggatctaactggcttgccagacggttcctctcgacgcatcagagtgatccaaggaacccctgagccgcgttctctccctcgtcccgccacgcgcgaagaggccgaggcgttggcggaattcgatcttggggcctttcagaatgccgccaacgacctcggcgccgcacagatggccgcgatggaactcgccgcacgtctgaactggcaggtgccaaccgcaggggatcatgcatcattccgtgactggctcttcgagaatatgaccgacttcggtccccttgagacactgatcgcgacggtgtcgggcaaggcggttaggctcgacactctcagcgaggcgctcttcggcgaatctccacctgacaccgcagcgcgggcggctgacgccttgcttgctttgggtagttatgcccggcggcgctcagatggtcgcgtattgataccgacccgcttgcatcttttccatagagggctgcctgggcttcacgcttgtgtggaccctgaatgttcgcaaagactcggcggccacgccggccccactatcctagggcgccttcatacgaagccgttggaccggtgctattgcacgtcgaagggaagggtctacgaattgctcacccaccgcgattgcggtgccgctttcgtccgcggctacgtgagttccgatatggattttgtatggcatcagccgagtggcccattgtccgaaggcggtactatcgaactcattccgattgagatattggtcgaggagaacgttcatccacgcagccgccacaaagacatgtggcttcacgttccaaccggaaaactcttcccaatctgcccctctgatacctcgggctaccgcaaggtaaaagtacccgacaaggtcgccgcaggccaggtcgagatcgccttcgacgaatgccctgtatgcatgcgcaggacccgaagctctaagagcgagccctccaaggtgatggaccatgtgacgaagggcgaggctccattcactgcgttggtccgcacgcagatggctcgccagccggcaagtcgcactatcgatgcaaagcatcccaatggcggtcgaaaggtactcatcttctccgacggccgccagaaggctgcccggttggcccgcgacatcccccgcgacatcgaactcgacgtgttccgacaggcagttgcgctcgcatgcgcgcgactggaggcaatttcccaggagccgcgacctaaccgtaatttctatctcgctttcttatccatcctctctgagcatgaccttctcatttttgatgggcaggatgcgaagaagatcgctgccgctcgtgccgaattcgagcgcgactgtgagggagacctgaggcaagctctcgacgatgatttcgaaccatcggaaacgccacccgcacggtatcggatagcgctgctgaagcttttttgcagcaactactactcgctgtcgggaacaaccgtcggcttcgtcgagcccgcacgagcaaaactcaggaagctcaaagacgatatcaaggcggcagggatcgctcttggggacgaggacgtccgggcactcgcagttgcctggatagatgcactgctcagggagttcgcattcgacccgtcgctggactcggtactccgctgtaaggcggccggttacttcaagccggattggggaagcaaagggcagttcgaccgggccttcgcggaggcccttgcccgtcgccccggttgggggaagctcgccgtcgaggctatcgaggcagcgttccgcagccagttggcgtccgagaaagacaaagtctggttccttactccgaacacactccgcctacgagtcgacctttcccacgtttgggctcagtgtccagattgcacagccctcatgcctctcgctttaggtgggacgatctgcctcgcttgcggaggcgaaggagtcagactagttgatcccctggtgagcaattacgtggccgcccgtaagggcttctggcgcctgccggtgcaagaagctctcgcttctggcgctcggctctccaacttgagcgtcgaagagcacacagcccaactctcaaatcgggaccgcagcagcgtccacgctaccaccgagctttatgagcttagatttcaagacgtccttatcgaggattccgacaggccgattgacgtgctcagttgtaccaccaccatggaagttggcgtcgacatcggttctctggtcgcggtagcactgaggaacgttcccccccaacgtgagaattaccagcaacgtgccggtcgtgctggccgtcgcggtgcttcggtctcgactgtcgtgacgtattcccagaccgggcctcacgacagccactatttcctgaaccccgagcacatcgtggctgggtcgccgcgtacacccgaggttaaggtggataaccccaagatcgctcgacgtcacgtgcacgcttatttggtccagaccttctttcacgaacttatggggcaaaggggctatggtcctgatgaaaaaacgtcaatgcttgaaaagtcgctcgggccgacacgacagtttttccatggggcacgggacactggtctaaacctagaaggatttggcgattgggtgtcacatcgcgtcctagccgccgagggtgatctgagggcatctatcgcagcatggcttccaccgtccctagataccggcggtcgaccgatcgaggagtggctcgcggaggtggcagaggagctcctgacgactttgcgtcggctcagcgcagatgttccatcacctgctgtttcggaggacgacggagagaataaggaagttgaggacaacgaaaacgcgggaccgaatctagagcaggaagaactcctggagtttcttttcttccatggcctcctaccgagctacgcgtttcccacaagcctctgcagtttcttggtggaaaagcgcgagaagaatctcaaaggcatttgggaagttcgcacggttcagcggccacagcagtcgatttctcaggcattaagcgagtatgcccccgggcggctgatcgttatcgataagaagacttaccgttccggaggcgtgttcgctgaccttccaactggggaggtgagtcgggccagaccgcttttcgcaactgcgaaaaagctcgtccattgcgaagcatgctcctttgtacgtgatccccatacggcccagggaaatgatagtacttgtcctgtttgtggcggagcgttgaaagaggagacgatgattcagccagaagtctttggtcccgaatgcgccaaagaacttcccgaggacgaccgcgagcaagatatcacgttcgcaacgatggcgcagttcccgcagcccgttgatccggaggtattcacctttaggccgtgtgggccaaatgctagtttcactcacgcgaccgaccgcaggctagtaaccgtcaaccgaggcaaagagggtggtcaggccaacgggttctcggtatgcgtcgaatgcggagctgcctccgtcttcgaccagttctcgccggctggtgggcctcacgaacgcccctaccgctacctcggcccgcaggggactccacagctatgctctggtgagttccgacgtgtgcttcttggtcatgacttcacaactgatttattgctggtaaggctgaaagtcgccgctccgctagtgaccgacaccagtgacatagtgacactacgaatgctggaggatgcgcttcacacgatcgcagaagccctccggctcgctgcgagccgccataggcaattggaccttgatcctgctgagtttggttccggtttccgtgttgtccccgttcttcaaaacgaggctcggatgttggacatattcctatacgatacactctcggggggcgcaggttatgctgaagtggcggcgagaaatcttccagagatcttggtggatactcttattctgttggagagttgcacctgcgacacttcatgcactgaatgcctagaccacttccacaaccagcacatccaagatcgactcgacaggaagctcggcgcggcgcttttacgctacggaatattcggtgaggagccgcgttgctcccctccaaatgtacaggaggtcactctgtcccagttgtgcgccagtcttgagttggacggcttccggtgcttgccaggtggtatgcctgaagcccccatgcttgtagagcatggagggcatcgaatggccttggggtccttccctggactaatcggtcggccggaattcgttcatgcggtcaataacgcacagaatgtccatggctacttagcattgaacgagtacctgctcagatccaacctgccggatgcccatcagcgggttcggagctttttccgttag

SEQ ID NO: 27603 - DNA, 1230 bp, Pseudomonas syringae
atgccaaaaggcgacgcggtgattattggcgtcaacctccgagaagcgaacctcaagcgaaagttacgagagcacttgcattccttgggtttcactaaaacagatggaggtgcgctgcgtccgccaggaaatggcaaggaggcgatccgcacgctgcatagtgcgcaacgtgaagagcgtcttatcgccagcgaaagctttgttctcagggcaggcggaaagctgatgcatcattttgcgtcaggatctgatgttaacccggagaaaatttcgcccgtgcttgaacgtgtgtcttccggtacctggcaaagcgatttattccgactggcgtcgctatcatggtcggtgccggtctccaatggctttgggcgtcgcctgcgttatctggtttgggatcaaagcaacggaaaactgatggggatcattgccatcggtgatcctgtattcaacctgggagtgcgagacaagtttatcggttggaactcccatgaccgcggcgccaggctggtcaacattatggatgcttatgtgctaggagcgatcccgccttataactctctgcttggcggtaaattggttgcctgtctgctacgtagtcgtgatctgtacgatgattttgccgcaacctatggctcctctaagggcatcatttctcagcaggaaaagaaagcgcgcctgctggcgatcgtaacgacctcgtcgatgggacgctcttcggtctataacaggttgaagcttcatgggacggagtacctgaaatcgatagggtataccggtggttgggggcattttcatatccctgactggctctttaccgaactgcgagactatttgcgctataaggatcacacctatgccgatcagcatgctttcgggcaagggcccaattggcgactgcgcaccactcgagcagcgctgaccgctctcggcttcaaagatgatctgatgcgccatggcatccaacgcgaggtctttatatcccagctcgcatccaatgcgaccaaaatcttgcatagcgggaaagggaagcccgacgtgagttctctgcaatccgtaaaccagatcgctgatatggcgctggagcgatgggtactgccccgcgctatccacatgacgaatttcaaatattggaaatcaggggacctgattgatttatttggcaatcatgcccagttactccgagcacaagtggagcaggagaagttgctcgacgcaacccaacggaattag

SEQ ID NO: 27604 - DNA, 1665 bp, Pseudomonas syringae
ttggactatgccattaacaaagtaacaaacaagatcgagtcggctgaaaaggcgtttggcggaggattttacgtctgtcccatttgccgggcgcgggtgagccactgcgcaggactcaaacggaaaaaatattttgcacactatccaggcaccggcacatttgaatgtgaaaactttgctctaggccagtatgggcagggtactttcagtgggcctcttgctggtctaaccaagcgacggatggaccttcggttaaaaatcgaaagggggcagaatcgggccgcgtggtatctagagttgaccttgccttccagtcgtgcgtgcaatgccactgtcactattgatgtggggggcaggctacagaatatcgatatgcgcggtatggtcaatggcttccgggtcatggccgaactctccactgacgacttccggatagtttcttttgaaggcactccggaccggtttttcgtcgagagtgtggagcgtgaatgccgaggacttccatcactgggcgctactgtgttcacagcctcggggcgcgggggcaatattggatttccgagagcgcacgagttgcgaggggcagagacctacgcggttctgtggaaggagcctgcgtttccaggcttccccaatgagcttgtcccagaaagatttcaaagccggcaaggttggacgcttgctctaatcactattcctgaggcgccctctgaagagtgcattgaatggctccaggctttcacaggattgatggtcaacccctccgttccaagcatctcaaccgtctggccatttctggcgagaaatgccagcgtgaacgctgttgaatgtaccaattcaagttcggtagttctggccgccagcatgatgcccgtaagcccgggggatgctggaccgaacatgctggtgttcggcggtgacaaccgaatatctgcgatgggggttgaacgatcacctgccctgtttgccttgacaccgggtgggcaaacacacttccgagtcgcgaagtccgagcggtcggaaaccgaaaagctctttcttcggacactcgcggttaggccggtatcggacctgcccggacttgagatgggattcagtacctcggaaggagtgcatctggtcgtacctttcggaacgtccaaatgcaaagcgcttgtcgactcggccagacaggggcaggcgacgcttgagtacctagcgatcccccccggcatcactggtcggttgcatgccgaaactcgctcaacgtttgtcaccgttcaattagcggcaagcgatatccctgctcaccattgtgcgcatcaaaggctcctttccccgcctatacagaccatcgtcatcgattatttgagtgactcgtcatcccatatcgatcttgagtttggagggttcgggcggatgcgtttgacgggcagtccgctggtggtacaagtcaaaagagctgacctagtcctagatcaccttgtgagatcgaggctgcgtagcttcctcgtccagttgcaagctgggtcaactgttgggctttttgcaagcgattcctcattggtccgagctttttgcgcactcaggcctccgccagagcttttaccaaactatcgcgttctcgcgagcgaactcctcgcctgcggatttgaaatcaaacattcaaaaggtgtctcgttatga

SEQ ID NO: 27605 - DNA, 1893 bp, Pseudomonas syringae
atgagttaccagtatggccaagaggcaagggagcgtatctctgcattcggacaacataaaattgccgagttcattgaggaggtcccccatgactaccgcaagggttactgcgaccgccaaccggccatctccggtttccgcagaggctcgcctcctgagttcaaggagaagcaaaggcgtctcatcggtcacattgtccacccccaaggaggtcagaaaggcgatgcggactggaaaacgtttgcaaacttctgggtcgcttgggctaaacataggctaggcgttgaatttccacccggtgatagttccactcctgaaaatgacgcgggaccgattttcctggaaatgatagccgggaaatttccagacgctcccagggaggttgtggagcggttgatcgcgttcagttgctttcctgaccattcggatacgcaaacggcactggaaagatttcgcccggcatcaacccttgctcgcgatcgaatgattgacgctttgccaggtcgtttggacaaaattgagggttacttcgagatcgccgaaacggcggcggaagaggtcgcagagcaatttgagttacttgagtcgaaagtgtcagtgctcgcagactctgttgatgatgttaaagcatggattcagcgctcgactagcgatgctgatgacctgcgatctagagtagacgaagcttacaaacgaacggaacagttaattcagaccgttcaggcgcttgatgaaatggggcgaaataccagtgaggctctggctgcatcggatgaaaagacggagctcattggacaaaaaatgagtgcgctttctgtcagagcggaggcttgggatcagacctcagatcaggtctctgaccttaaagcgctggtggagcagattaagtcacaggcacaggaatggggcaaaactgccgaggctgtcggtgttctctctgatcggattgaagatctacaagccaatttggaccaactgggcaccggtccagggctccgctcgccgcagtatcgactgttagaaattgatgcactagggccacttgtcgagatccattccgtcgaaaatgcacaggatcttatctcatgcaatcttcaagcgtgtgggatcgtaaaaggggctgcgatttccacagctcgtctgatcctggctgggctcgccgctggccagttagtccaattctcagggtctcttgccgatttcatagctgatgcagtggcagcagcaataggtggtccgacatttcacgagtggcgagttcccgtcggcctcatgtcagaagaggcggcgagcgactgccttgaggcggtagccgataactcgggttgtttggttctgaagggggcgaaccgatccgcatttgaaatttatggtaatgcgatccgagacattgtcatccgtcggcaattatcagttgccacccatcataaactggctctggtctgttcatgggtacagggacccgccgcatttcctgatggcggaaccttggccgagctcggccctgtttttgacaccgatagcctgccactacgaggagtgtcctcgagaacaccaattttgaaatatggccacttggcaaggaacacgtggcaacttatcgatgggtttgatgatgaaacgccaagtactctcatcaccgatttgagagagttgctcgccgagtcgggttttcgcccaggtaatctttggacccgaagtgccgatcgagcatatctgcaactcagggcaacgccaggtggaaacgaggacggcgatctgcacgcgattttgacgtactgggccggcccttgggcgagggcgtctgggggcccttttgacgcggtcgctacaatcgcagaacggattgtggtccagcggcaagcagagtcatcgcattttgagggagtttaa

SEQ ID NO: 27606 - DNA, 1035 bp, Pseudomonas syringae
atgaggtggcaggctgtctccggagatgaggctaagagggtcatcgccgccggcattggctgtaaagtgagtggtgagggtctgcgtatctcggccatatcggagtgtctgagggctgcgtcctatttgtgttctgtgccactgacaacggacggcccttgggagcctgccgtatcgctcagtttgactagcctcgtgcgcaaacgcctgtcaccgatttgggaaaaccttaccgaagacactgatgcccgaccaggcgtactgagtgttttagagagccttggtgagctaggggatttggtcaggggtgaacgtggttggttaactccgcggccgcgagcaatcagcgccgcttgcggtaacgcagtgatcataggtggcggtccttctcaagcgttcccccttggtgtccagactcgggcgtgtgggcgtgcccggctggtcaccatgtccatgtgcgacggatggcttgatatcgatgatccgcgtgattggattggtgcgcctatggaaggactggaaacatggtccaacaggctactccgtgaggcaagtcagcgcttcggaccgcctcctgataatttgggagacgtcatgatctatctcaatttgaaatgggttggacttactgacatgcccagcattgaaggaacccatctggcgaaataccaagctggcgcgatgacttgttactttttaggcgctttctatcgtggacgacttcagcggatgacctcgattccatctcaggatgctagacgtctgcgctttcattttgatcaacaaattggccgccccacgacggtggaggccgagacattccaaagatttgtgaagctacggctttaccggcgactacctgcagaggaagccaaaaccctgctcattggttgggaaatgagcgttcctccgggctcgcacccaggattgagacagtatgtactacctattgaggctctacccatcgtgcggagcgcgctaaatgggctgggcattgttttgtttgagcgtctaggcgcggaaggagggatctga

SEQ ID NO: 27607 - DNA, 5556 bp, Pseudomonas syringae
atgagcgggacgtccacaacggctgattcgactggtgtgcatgagacagccaagggattggcagacagtttaaggcaatatatcgaggctcaataccatatccgggatgagggcttggtcagagaacgccacgcactcttgcaggctgatgaaaccattgcacaaaagccttatgttgaagcgacccaggtctacaaggtcggcgattcgtacgaggctcttccgatccctcaggccgcttctgccgcgctgagcaagctctcggtcatgggactcggcttgtacccacgtccctatgaacatcaatcacaagcacttgccgcatttcttggcaaggaagctgcggatcttgtgatcgcaactggtaccggctcaggtaaaactgagagttttttgatgccggttatcggaacgctcgcggtagaaggagaggaacggccggagtctgctgccctcccaggttgcagagccatgttgctgtatccaatgaatgccctggttaatgatcaaatggcccgaattcgccggattttgggtaatccagatgcggcaaatcttttgaagcagagcaggaaaaccccgatccgtttcggtagctatacaggacgaactccttaccctggccgacgctcagccgagcgagatgagcgtttcataaagccgcttttcgaacagttttacaaaaaggttgcgggtgttcccgccgtccagcgtgatctagctcgtatcggacgttggcctagcaaggatttggttggcttctacggggatgatgccgtgcagaccaaaacctatgcgtccggaaaacgggcgggaaaggagtttgtttcgaaaaactggaaggggcgcctgaaaacccagcctggcgatcgtgagctgatgactcgtgatgagatgcagactcgatgtcccgagttactcgtcaccaactactcaatgctcgaatatatgctcatgcgacccattgagcgtgacatctttgagcaaaccaaggactggttgaagtgtgacgttcgaaatgaatttatcctggtgctcgacgaggctcacatgtatcggggcgctggtggggctgaggtagcgcttctgatccgtcgtctatgcgcgcgcttggatattccgcgagaacgaatgcgttgcatattgacgagtgctagtttgggcagcggtgaaaccgctgccttggacggtgagcggtttgccctcgatctcaccggcttgctcgaggagtcagagcgacgcttcaaagtaatcttgggaacacatgagcctagatcaagtgagcgctctgttaccgccgatcaaatcgacgctttggcgtcattcgatttggatgcgtttcagactatcaccaatgattttccaacagcagctaaggcggcgatggctttaggctcccaacttggttgggagacatttattgataatgatcatccggcgctgcgcaattggctgtacgaaaatcttagcggcttcggtccgctggaaaagctcatcgaattggtatcaggtaaggcggagcaacttagcaccctgagtcgtaagctcttcggcgaaacccctgtgcgacaggccgaaagagcgactgatacccttcttgctctggcgagtcatgcgcagagagtttcagatgggcgagtgctattgccgactcgtcttcatctatttttccgcggtttgcctgggctatatgcatgcgtggacccaaactgctcgcgtaggctggctgatcatcatgggccgacaacgctcggccgctttcagaccaaaccttcgactcaatgtgcctgtgaatcgaaatctagggtttttgagttccttacccatcgagactgcggcgctgcattcgttcgaggttacgtgagtgaggacatgaaattcgtgtggcatcagccaagcgggcctttgtcggacggcgggacgacggcgctgatgccaatcgatatatttgtcgaagagactgcgcatccccgtagtcgccataaagaaatgtggttgcacatggccaccggtaatttgacagacgtctgcccggtaccccaggtgggtttccgaaaagtccgcgtgccagataaacctgtggtcggcgatgacatcacattcgataattgtccggtgtgcacgcgcaggatcaggaacgctagaggcgagccttccaaaatcatggatcacgtcaccaaaggcgaggcaccgttcaccactttggttcgtactcagatggcgagacagccggctagtcgggtagccgatgcaaggcatccaaatgctggtcgcaaagtcctgattttttcggatggacgacagaaagcggcaaggcttgctcgagatattccgcgagacatcgaacttgacgtattccgtcaagcaatagcacttgcttgcagcaaactgagcaacctccctaaagagccgcggccctcttcggtattgtacatggcgttcttagcggttttgaccgaattcgatttgccgattttcgatggtgctgatgcgaggaaagtagaagacgccatcgcgctcttcaaacgcgattgcgattcagaattggcggaagcgtttgaacaaaactctttgccccaagaattaccatctcgatataaagttgctttgttgaagctcctgtgtagcagttactactccttcaccggcacgacagtgggatttgtcgagcccgcgactcagaaactcaaaaagatcagacaggaattaagtgccgcaggagtcttgctttcggataacgaccttcgtgctctgagtgttagttggattgagtccttgctgcaggagtttgcgttcgataagaccattgacccagcttatcgctacaaagcagccgggtacccgaagcaaccttggggtagtactgggaagtttgacaaaccgctccgagctccacttgtggcccatttaggtgttactgagacggtccttgattccatcgaagcgacatttcgcaagcacctcgcagaagaggaaagcggcgtatggttcttatcgccaaactccttaagtctggtcgtggatcttgatcacgtgtgggcgcaatgctcgcagtgcaccgcgctgacgccgttctcattggcaggtaaaatttgcctagcctgcggcagtgatagcgcactgccggtagatcccgcaacgagtgcctatgtgaacgctcgtaaaggtttctggcggcagccggtgtgggaggctcttcagcctggcgcccggctttccaatctcagtgtggaggagcacacggcgcagttgtcgaaccgtgaccggaacaaggtccatgcaacaacggagctctatgaactgagattccaagatgttctcatcgacgccaaagaccgtccaattgatgtgctcagttgtactactactatggaggtaggtgttgatatcggttcgttagtcgcggtggcgctgagaaacgtgccgccacagcgtgagaactaccaacagcgtgctggtcgtgctgggcgtcggggggcttcggtatcgactgttgtcacatattcacaaaatggaccgcacgatagccactattttttacatccgtcccgtattgtcgctggtccgccgcgtacgcctgagatcaaagtcgataacgcaaaaatcgctcgcagacatgttcacgcatatctgtttcagacgttcttccatgaaatcatggcgcaaacacccaatatttccgtcgaaaagacatcactgctgcagaaggcgcttggcaccacgcaggatttcttttttggaaatggtgatataggtctgaatctcgacagttttgaatcctgggtgtcgaggaaggttaccgacgaagaggcgcctctcaaatcctccattctcgcgtggctgccccctagcttagacacaaggggttttacctcgattgagtggctggttgacatcgctgtgacgctgatcaagcggttgcgggaattagcaggagaactcccgcgggagatgtctgcaacggttggcgttgagatagatgatgtggaggactcagacgaaaacgaaacggatggcgtaatgccggagcctgtaattgagcagaaggagttgctggagttcttgttctttcacgggttgttgccaagttatgcattcccgaccagtctgtgcagttttcttgtcgaaaagttatccaaggtaaacggaatgtgggaggttcaaacgctacagcggccgcagcaatccattgctaaagcattgagcgaatacgcaccgggacgtttgattgtcattgaccgcaaaacctacaggtcagggggggtgtttgctgatctgccggcgcatgcggtaaaccgtgcggcaccactgtttgaaagcgctaagcctcacgtccattgcaaatcttgctccttcgtccgaaaccccaataaaacaggtgcaggaggaaatggcggcatctgccctgtatgtaggggagagttgacggaggagaggatgattcttcctcaagtttttgggccagagcgggctgatgacttgccagaggatgatcgggagcaggaaattacgttcgcgacgatggctcaatttccccaagcagtggatccggagaacttctcctttctagatcttggccccaatgccagctatacccatgcaactgatcagaccctggtaacggtaaaccgcgggagagagggggcagagcagggagggttttcggtttgcgttgaatgcggacatgcttccgtttatgaccagcaatcctcggttggtatacatgatcgaccttataaacttctcgggcccaaaggcaccccactaacctgctctggacaatttgcgaaggtgcttctcggccatgattttaagactgacctcctgctcctgagattgagaatcggtgagccgctcgctacgaatacggtggatatcgtggtgttgcagatgcttgaagacgcgttgcatacaattgcagaggcccttcgactcgccgctagtcgtcacagacaacttgaccttgatcctgcggaatttggttcgggctttaggattgagcctgcactccaggatgaggctcgtatgttagaagttttcctatatgacacgctcgcaggaggtgctgggtatgccgaaattgcggcgagacacttgccggaaatcttagaagcaagcattgaactgctggagggatgcagttgcgaaacgtcttgcacggagtgtttaaaccattttcacaaccaacacctccaaaaacgccttgataggcatttgggggcaatgctgctgcgatacgccgtattaggtcaggaaccggtgtgctcatctcctggtaagcaggctgtgacgttgttccagttgcgcgcgagtctcgagctagacggatatcgatgcacagcgcttgatgatgactcaatgccattgcttgtagagcgagatggtcggcgtgtcgccgttggctgctttcctgggttgattaatacgccggagttccttcaccccgttgcgtcagccgttggggtgaatggacatgtagcattgaatgaatacttactccgatctgatttgccgggagcccacctgaaggtgagacagggatttttcggcagctag

SEQ ID NO: 27608 - DNA, 1242 bp, Ralstonia solanacearum
atgccaagcggcggcgccacggtcgtaggggttaacccacgagaggccaatttaaagcgaaaactgcgggcgcacctgcgctccctgggtttcactcgttccgaagcaggagtcctccaggcaccggacaccggcaagggtgcgattcgatccctgcatcgcgcacagcggcaggaacgactgtcggccaaccaagcgtttatcgcccgacggggcgcatcgttgatgcgctactttgcctcaggttcggaggtcgaaccccaaaggatttcccctgtgctcgagcgcgtatcgtcaggttcgcaacatggcgatcttttccggctcgcagccttgtcctggtcggtacccgtctccaacgggttcggcagacgcttgcgctacctggtttgggatcaacataacggaaagttgatcgggctcattgcaatcggcgatcctgtctttaatcttgccgtaagggacaagtttatcggttgggatacgcatgaccgcagtgcacgtcttgtgaatgtaatggatgcttacgtcctcggcgcgttgccaccctataacgcgttgcttggcggaaagcttgtggcgtgcctgcttcgcagccgtgatctctacgatgattttgcgcgcgtctatgggtccaccacgggtgttatctcccaggaagaaaagaaggcacggcttctcgccattacgaccacctcgtcaatgggaaggtcctccgtttacaaccgtctgaagctcgatgggattccatatctggagcccattggctatacgggtggatgggggcatttccacattcccgaccgactatttggcgagttgagggactatttgcgcgaaatcgatcacacctatgcggaccagcatgcattcgggcaaggccccaattggcgcttgcgcacgacgcgcgccgcgctggcagcccttgggttcaaggacgatttactcaagcacgggattcagcgcgaggtattcattagccgcctcgcccgcaacgctaccggaatcctgcagacgggaaaggggcgtcccgacgtggctggtttgctctctgccagggagatcgcagggttggccttagagcgctggatgatgccacgcgccacgcgcatgccggcgtaccgggactggaccacggagcatctgattgacctttttggcagccaggcgcgcctgctgcgtacgcaggtcaatgcatcgtatctggcatcaaggccactcaggagcgccgtcggattctaa

SEQ ID NO: 27609 - DNA, 1434 bp, Ralstonia solanacearum
atggagcttcgcctgtggattcctagagaagccgatcgtgccgcgtggcagctcgagttgattcttcccgccgcccgtgagtgccaagctacggtcacgctggacgtgggcggccgtttccagacgctcagcatgcgtggcatgggacaaccgcgtcgggtcggagccgagccttcagtggggccttaccgcatcgttgactttgagggcaagccagatcccgccttcctcaacggcgtggaaagagagtgccccgggttgcctgcaatgggtgccgcagccttcagtgcttcgggcaccggggagctcaagggattcccccgcaccaacgtcctgcggggcggcgagactttcgccttactatggcgcgcgccagagacccctgattttcccgatgaactcgtgatcgagaagctgcgcggcaggaaggaatggaacttggcgctggttggcatactggacgagccgaccgaaccgtgcatcgcctggctccagacctttactgggctaccgatggctgcccccgttccttccactcttcccgtctggccatttctgacacgacacgccagcatcaacggcatcgattgcatccgctccgaccgcctcttgctgtcagcggcgcggatgcctaccgcacgttgcggcctggggccgaccatgcaggctcagagcggggaggtgaaactggccgccgtgggtgtggagccatctccggcgcttttcgcattgcgacccggaggcgccgaccttgtcagggtaacagaagcaaccgatccggacagtgaggcatttttctccttttcgctgcacgtggaccgcgcggtgccgcctgccacggttgaactcgctttcaggaccgagcagggtgatcgtcaggtcgtcgcgctgcacgagacccgatgcgggggcgtcacaactgaattcaggcgtacgggcacgttccccgagtatctttcgatgcccgccggtaccacgggaaccttgcggatcgaggggagggatggctccagtatggttgcactacatagcggcagcgatgcggctccgcacaaccatcgtctttgcctggcgcagcccgatgcactagcggcactagtcgctgcctggggagatttcgcatgccaagtggaactggattttgcaggattcggtcgcctgcgcctagcgcgcttcgcaagtgtcccggccacgagtgccgcgccgcgtggtttgcctccagcgctgcgcgccaggatgcgtgcctttctcgctcaactgcaatcgccgacgtcgatggcggtcgacgatgtggcactgatcggagcaatgatcgcagcccagcggcggcagaccttccggccatcgctgattccccattatcgttcgctggtgaaggcgctacgcgcgagcggcttcgaaattgagcgcttggaaaaaggtgtcaaggtatga

SEQ ID NO: 27610 - DNA, 1872 bp, Ralstonia solanacearum
atgagttttcaatacagcaaggaggccagagaacgcatctgctcattgggtcctgcggtgattgccgaattcgtcgacgagatcccgcaaggggttcgcaagcctttgtacgaccggtacccgcgcgcgcagggatttcgaccaggtcgcgccgagttcaaggaaaggcaaaagcgcctgattgctctgctcacgcatccgcaggcaagtccaaaaggtgcccctgaatggaggcactttgcgtacctttgggaggcatgggggcgtcatcgactggggcagtcgttgccgcgtgaagatgacaccgcgcccgcggctgacgccggtgtgacgtttctgaaggcattggccgaacgttcgcccgacgtcgctcgcgaagacgtggagcgcctgttccagtttagcggctttcccgatcaccccgacgttggctccatgctcgcgcgctttcgcctgtcctcagtgctagcgcgcgaccggatgatcgatggaatgccggcccgccttgccaatattgaggctcgcctcaaggatatcgacagcgagacgaaagccactacgcgacgtgccatccaattggagacgacgtgtgcagggctcgccaggagtgcgccggagagcgataggggcgtggatgagcgtgcggccgaactgtccggactgcgtgaggcgttggaaaacgagtccttgcgcggtggcgagcgcgacaagaccatcgaggcgctgggtgcggcgggaggccagttgattgcagcggttaaggcgacgaacgatcgtctggccacgctcgagaagagcttgagcgcctccaaggcacggcatgatgaactggctggcatcttcgctgaagtcggcgagcttcgaaagattgtcgacggccttgcagtgcaaatcgacggctgggcggggtgggccaactccatggcggatgtgacgcgccgatttgaggcgcaggaagcgtctcccaccttccagcaaacggtttcggaaagcgggcttcgcgccaggctcgttgtgcgtcgaccgaacgaggcgttcatcgaccttcatcgtgtcgaggacgcttgcgagcttatcgcatcgaatcttcaggccactggtgtgacacggggcgcggcgataggaatggcccgtcagatggctgctgcgcttactgcgggccaactcatacagcttaccggctcgcttgcagacctgatggccgaaagcgtagcggcagcgatcggcgggccggttcatcacgaatggtgcgtgccagtcggactggttagtgatgatcctgctgccgattgtgttcgctcgctcacgggcaactccggatgtctgctgatgaagggcgcgaatcggtcggcgttcgaagtctacggcaatgcaatccgggatatcgtcgtacgccgtcagtttggcgcaaccgatcaagggagtcttgcgctgattgcgacctgggcccagggccccgcgacttttccagacggcggcacgctggccgaattgggacccgtgttcgacaccgatacgctggccatgcgcagcgcctttgccagattgccagagaagcgatatgggcgtctcgccgcggatgactgggcgcagcttgaggggctcgatgccgaactgcccgcgcccggcgaattggtcgagcttctggatgaggcaggctttgatggtggtgcactatgcaagcgtgtgatgcaccgcggctacgcgatgctccggtgcatgccgcagggcacgcaggacgctgatttgcatgcgctattgatgacctgggctgtaccctgggccaaggcaactggagggccggctgaaggcatccgccaactcgccgaacgccaattcgccgagcggcggaccgaagaagacgcggcttga

SEQ ID NO: 27611 - DNA, 1116 bp, Ralstonia solanacearum
atgggacgcgtgatgcaatggcaagccacttcgcgtgaccaggcgcgccagatcatcgcggcagggatgcgttgtgcgctgacgggagaagggctgcggttgtcggctatctcggagtgtctacgcgccatgtcctatctgtgcgcagcgccaacggactcggtcgggctctgggagcccgccgcatccgtgcgcctgaccggcatggttcggcgcaggctggtgcccctatggcccgagcttgctggggagggagaggagacgcagccgtcagtgatggcggttctgaacagcctcgcagcgttgggcgatatggttcggctcgacggcggccgttggctcgcctcgcccccacacgccgtccgcgcaggtgacgacgtggcggtattgctcgggggcggaccgctggaggctctgcccttgagcttgggtagccacgcgatggtggctgggcgcatccggttcacgaagctttcagcgcacgaaggcaaggacggggccgttccgttgtgggaggcaaaggaatggattggcgccccggccgacgggctgcaggtctggtgccagcgcctccttgccgagtctgccgcgcgcctgacagacgcaccaagcgacataggcgaggtgttcgtctaccggcgcacagaatggattccgctcgctgacccgtctttcgacagctcttcaagactatcgtccgattcgacttccctaccagaacggcgcgggctgatgctttgccgcacgcccatcggacaatccgtttcctacttcctcggccgattggcaaaagggcgtcttgtgcggcttgtcactgtcaccgcgccggatgcaagacgcctgcgctttggcctggatgccagcgattccttgcctttgcgcgtccaggccgtggccaggcagggactgatgcagttgcgtctcccgcgcagattacccgagcgcgaatcgaaggcgttgctgctgggctggagaatcccagccgaagcgcgcgagcggcccggcattgaacaccacgtgttcccagcgtcggtgttcccgatcgtgcgcaaggctttggaaggactccacatcgtggtggaggagcgtgtggacgaacgcaaaggacaagaatga

SEQ ID NO: 27612 - DNA, 5562 bp, Ralstonia solanacearum
atgagcatgacgacaaagccgatcgaggccgctggtgtacacgagactgccagaagcctggcggagagtctgcgccgatacatagaggcgcaatatcacatccgcgacgagggcctcattcgggaacgccacgcactgctcgcacaagacgcgacggtggcacaaatcccttacgtggaggcgacggcggtctacaaagtgggcgactcgtacgaccacttgccgataccaagagccgcgatcgatgtgctgaccgagctgtccggtatggacgtcgggctctatccccgtccttacgaacaccagtcccaggctctgacctcctttctaggtgaagaggcggctgatctggttgtggccactggcaccgggtccggcaagacagagagcttcctgatgccgatcattggccaactcgcgatcgaaggcgctcagaggcctgagtctgctgcgcttcacgggtgtcgtgcaatgttgctgtacccgatgaacgcccttgtgaacgaccagcttgcgcgcatccgccgcctgttgggtaacgcgcaggcagccgaggtgctcggtcgcggacggacgcgtccggtgcgatttggtagctacacgggacgcacaccctatccggggcgtcgttcagctacgcgcgacgagcgtttcatcaagccgctgttcgaagagttctattgcaaagtggcaggcaagccaaaaatccgcgaggaactggagcgcatcggcaggtggccgagcaaggacctagaagcgttctatggacaggaattggtcaagagccgaaccgtcgcttccggccgcaaggcaggccagacgcggactgccaaccactgggatagtcggcttgtcacgcagcatggcgatcgagaactgatgacgcgggatgagatgcaggagcgctgccctgaattgctcatcaccaactactcgatgctcgaatacatgctcatgcgcccgatagagcgcaacatcttcgcccagacacgggactggctgcgcgccgatcctcgcaatgagttcaccctggtcctggacgaggcgcacatgtaccgaggcgcgggcggtgccgaggtggcacttctggtccgccgcctgtgtgcgcgactgggaataccgcgtgaacgcatgcgttgcattctcaccagcgcaagtcttggcaatgggctcacggcgcaggccgacggcgaacggtttgcacgggatttgaccggattggctcccacttcctctcgtcgtgtcagggtcatccggggcacgcctgaaccgcgctctgcgtcgcgcgccgcgacggaggaggaagctcaggcgctcgccgcctttgatctccaagccttcgaaaatgccgccgccgaccttggcgccgccaggcaagcggcaaccgatcttgccgcgtgccttggctggcaggcaccagttgagggggatcacgcatcgtttcgggattggctattccacaccctgacggacttcgggccgcttgagagcctcatcgccgctgtctcgggcaacgccgtccggctggacgcgctcagccagacactttttcctggatgccccagcgcaaccgcggagcaggcggccgacgcactgctcgccctgggtagccatgcgcggcggcaagccgatggccgggtgctgattccaacccgcctgcacctcttccatcgaggattgccggggctttacgcctgcgtggacccccagtgttcggccaagcttgtcggaggcgacagtccgaccatcctgggccgcctgcatacaaagccgcttggccgatgttcctgcacctcgcaggggcgggtctatgagctctatacgcatcgggattgcggtgccgcattcgtacggggctatgtcacggcagagatggattttgtctggcatcagccgagcggcccgttgtcgggaggacaaactgtcgatctgatcccagtcgagatgctggtcgaggaacgtgtccacccacgcagccgctacaaggacatgtggctgcacgttccgaccggccggctttctgctctgtgtccgcccaatgcgacaggataccggtgtgtacgcgtaccagacatggccgccgcaccgggcgccgacatgctgtttgatgagtgtccggtgtgcatgcgtagcacgcgtgggggaagagacgagccttccaaggtaatggaccatgtgaccaagggcgaggcgccattcacaaccttggtgcgcactcagatggatcgccaacccgtgagccgccctatcgagaccgcccatcccaatggcgggcgcaaggttctgatattttccgatggccgccagaaagcggcacgacttgcgcgcgatattccacgtgacatcgagctcgatgtgttccggcgcgcaatcgcccgtgcctgccgccggctcgagaaatatcaggagcccaggccaacgcagaatctctatatcgcctttctatctgtcctttgcgaggatgatctgccgatgtttgacggagaggacgcgatgaaggtcgcggcttcccgcgcagaattcatgcgcgattgtgaaggcgacctgtcgcaagccttcgagggtttttcgctgacagagccggttccctcgcgatatcgcacggcgttgctcaagctgttgggtagcacctactattcgttgtcgggcacgacagtgggttttgttgaacccgcgaaggtgaagcttggcaagctccgggagagcattaagctcataggcctttctgagagcgatgaagatatgcgggcgctggcggtcgcgtggattgacggattgcttcaggagttcgcgtttgattcgtccctggatccgacgccgcgcagcaaggcggccggctactacaagcccatttggggaagtaagggacagttccgcctgattttgcgcgaggccctggcgcgccgcccgcagtggagcaagcagagcgtcgaggcggtcgaggcgacatttcgagagcaattggccacggaaaaggacggtgcctggttcctcgcacccaacgctttgcgtctgcgcatcgaccttgatcatgtctgggttcagtgccaggactgtaccgtgcttaccccgctagtcttcggccagtcaacgtgcctagcctgtggtggcgacagcgtccgtttggtcgaccccgcgaccagtgattacattgcagctcgcaagaacttttggcggcagcctgtgcgcgaaacgttggacggtggccggctcctgaacctgagtgtcgaggagcatacggcccagctttccaaccgggatcgcagcagcgttcatgcgactaccgagcgatatgaactacggtttcaggatgtgctcatcgaagaaaccgaccggccgatcgacgtgctcagttgcacgacaacaatggaggtgggtgtcgatatcggttcgctggttgcagtggcgctgcgcaacgtgccgccgcagcgcgaaaactatcagcaacgggccggccgtgcgggacgacgtggagcatcggtttcgaccgtagtcacatattcccagaccgggccgcacgacagccactacttcctgaacccggcgtacatcgtggccggcgagccgcgcacgcccgaagtcaagatcgacaacccaaagattgcgcggcggcatgtccatgcttacctgattcagacgttcttccacgagcggatggcgcagggtgacaacggtcccagtacgcatacctcgaggctggagaaggcgctgggtcctacgcgcgtatttttccacggcgcacacgacaccggactcacattgaaagagtttgacgcttgggtctctcgccgtgtactcgcgacagatggtgacctgagagcgtccgtcgcagcgtggttaccacccgcgctggacactggcggtgacccgatcgagcaatggcttgcgacaactgccgaggcgttccttgcgacgctgcgcacccttggaaaaaaagtgccacggcccgccgttgtgcaagatagcgctaccggtcaacagcctgatagcacggtcggcgaggagtccatggacgcgacggcaaacggcactatcgcgaattcccaactcgagcaggaggaactactggagttccttttcttccacggattgctgcccagttatgcgtttccgatcagcctgtgcagcttcctggtcgagcagatcggcaggaatggcaacggcatgcgcgaggtccgtacggtccaacgaccccagcagtcgatttcgcaggcgctcagcgagtacgcgcccggtcgcctcatcgttatcgataagaagacataccggtccgcaggggtatttgcggatgttccggtttcggaaatgagtcgggccaggcccctgttcgcgaaccccaaacgcctcgtgcattgcgaggcatgctccttcgtgcgcgacccgcatgcgacgcaggccggcggcgatgcctgtccggtgtgtgacgcgacgctcatggaagaaacgatgatcgaacccgaggtctttggcccggagaatgcgcgggagttacccgaggatgatcgcgagcaggagatcacctttgcgaccatggcgcaattcccgcagcccgtcgatccagaggcatttacctttgtaaagtgcggaccgaatgcgagctatacgcatgcgaccgatcgcagactcgtcgtggtcaatcggggcaaggagggcagtcaggtcggtgggttttccgtgtgtgtcgagtgcggcaaagcatcggtatttgacgcgtatcatcccgccggcggaccccatgagcgtccttataagatgctggacgcgcggggaactgatcagcagtgtaaaggcgaattccggcgagtgtttctggggcacgacttcagcactgacctgatgcttctgcggttgaggctggcggcgcctctcgtgacagataccgccgacatagtggtactacgcatgctggaaggcgcgctccacacgattgccgaggcgctgcggctagcggcaagccgccaccggcaactcgacattgatccggcagaatttggctcggggttccgcatcgtgccggcattgcaagagggagcccgtatggtggacatgttcctgtatgacacgttgtcgggaggtgcaggctatgcggaggtggcagcccgtaacctgcccgatattctcgatgccacgctgacgctgttggaaggctgttcgtgtgacacgtcttgcacggagtgtctcaaccatttccacaatcagcatattcaggagcggcttgaccgcaagctcggtgcatccctgctgcgctacgcgatacggggtgaggagccgcactgtgggtctcccgcagcgcaggcggccacgctgtctcagttgcgcgcgagcttggaactggacgggtattgctgcaccgaaggcggagcgccaaatatgcctcttgttgtggaacgggaaggccggcgtctcgcgcttggttgctatccagggcttctagggcgccccgatttcgttcacgctgtcaaggtggcaggcggggtgcatgaacacctggcgttgaacgagttcctcctgcgctccaacttgccggatgcacaccaaatggtgcgcaacaagttccggtag

SEQ ID NO: 27613 - DNA, 1959 bp, Rathayibacter sp. Leaf296
atgaccgagtcgaagtatctgccgctcagccttcctgccgggtccagtcgcgccgagcgggcgaagtatctccggctctgtcgcctgctcgccgagtcacccgcgccgggatcgacgcatgctcagtggctggagcgcgcaggactaggagacacatacgctcagccggctctcgcggccgccgcacacactgcgattgatctagtagaccagggatgggctgtccaggtggaccgacttggcccgcttttttcgccgcctgctgcccatggagaccgtgacgccgagaagtcgcgcatccgcgcccaagagcatctcaggcgcgacgaacaactccagcgaccaagcgtgcgacgcttcgtgcaaggcatggagaaaccgcacgagttccgcgattcactggtctcgattttcgatctgatgcgcgatgggcgagaccttgtggacgcacttgaccgcgacccaacagggcgcagcgcgattcggccttacgtgcaggtggttgacgactccatctgtagcttgactggtttcagacttcacgatatatggcggtactttcgccatacgtggtcgaacgcctacgcgacggtgccaggtcgctcgatgccgatcctcgttcgcgacgcggccacccctcatcactccgtgatcggactcgccgccatctcgagccctgtcgtccagattgccgaacgcgacagttggatgggctgggagacagacgagttcctccactcgatccagaacgagcccaccgacgagcttgcgatttgggtaagccggcggatcgcatcccaaatcgacgcaatctatgtcgaggacctactccgtggcggcgtgctgcagcccacggacatcgtgaagccaactcaggaactcgtcgcgcgcctcaaggcggacgcggaacgatatcggcagcgtcatcatcggtcgacgacgattcgcgaagtccgcaacatccagcgcgacgcttgggtcgctcgcgccgagacagacctctttcggagcaagcggtcggcggccctggctgaagcgctcgacattcacatggcactgggctcgtaccttcgccctcacccgtccgccgaggggcttgtcgcggcattggcggatcgcagagcctacgcgcaactccgccggctgatccgccgcgctcgcggcgaacgggtcggaaccgtcatcgcggacctcaccgtatgcggtgcggtcgccccctacaacggactcacggcgggcaagctcgtcggggcgctcgcagtatcacagaccgtgttggccgcatacaaagagaagtacaaccggccaagtgagatcgcatccgccatggcgggccgacccatcgtgcgcgaggcccgcctctctcttatcagcaccacatcgctgtacggaacggggtcgagccagtacaaccggctgttctggtcagccgacgtcgtcggtggtgacgagggcacgcgcatgggcttccatgagctgggacggtcgcggtcgttcggcacgtcgcacttcacagacgagacggtcgaagctctgcttcgtctttcatcgctgcgcgattcgtccgtacgtgtgaacagcctgttcggtgagggcgtgagcccgcggctccgcaaagtacgtctcggttttgccgcgcttggctggccgtcgaacgaacttctgaagcacggacgtcagcggattctttatggcgtgcctctagtgcgaaacctccgggactactcgctcgggatcgatgacgatcctgagtacctccttagtcccttccttcctgacggcgatcagcgaatcgcagaatggtggctggaccgttgggcgctgcggcgggccgagcggccagagattcgcgacgccatggttcgacaccgtctgactcgtcccgtaacgcacggcgctcgagtacagcttccttccgaggatggcgactggccgaagttggccgcaaacgcgcattga

SEQ ID NO: 27614 - DNA, 1086 bp, Rathayibacter sp. Leaf296
atgagcatgcagcgactgactcagacggacctcgaggcaacggcggtcaagttgctcggtctcgaccacgaagcgatcgggttgctctcgatagagggattgtgcacgtccatccgccgtgcagcgtcgttgctgtgtcccgcgacgccgcgtcaactcgtcgacgcggtgctcgaagtgctacgtccgctctcaccggacctgaagcgcgacctagtcgccgaagcactcgatcttgtcgtcagcgttggcgatcttctcgaactgcgatcagtggaatcaggtgtgcgccagctctacctcgccccaccctcgtatgtgacagttcgaccaagccggcacctgctgctcggcgtcaggccaaacgcaagtccgattgtcgacgagtccatcgtcggagccccggtggagtacgaagcccacacgcggttcctgatgctcgagacggacaacgccgcggcttcgttggtggccgccgggcttcatcgtctgaccaccgagcaatgggcacgcgtccctcgcgaagagcctgcttcatcgctcattgagcgaactgcccgcctgcttggccagcaccagatgcccggcgagatacaggggcttgagatcatcgatccaacgacacaggtgcagtactacgtcggtcgctggcgggaactcacctctcacgatgaaggcatgctcgttggccgacgcccgcaggcatatggcgcaccggtgtggtgtgtcctttatgtcgcgggcgggattccgcgcgctgttctcgacttcccggtcgactcctcagttatgccggggtgggacgaggcccgccatctccaagcggccatcgatcatcatcgaggccaaccacaggtcttcaggatccgctcggccggactgcccgacggcagtcgactgctcgacctcttcgctccgctaccctcatgggcagagcgatacatcacgcttgtcggaattccgatgagccgatcaaagggtgcgctcctcacgtatcgggttccgctcgatgctgaggattcactcacggggcttctctcgaaatcgctgtggatgacgagaatcaaggaagtgcagggacgatga

SEQ ID NO: 27615 - DNA, 5583 bp, Rathayibacter sp. Leaf296
atgacaggacgatcactcacgattgctcagacggcggacgaaatcaggaacgccctccgcgagtacatcgaagcgacatatcacgtcggccatccgtcattgatccgtcagcggcgggtgctcctcgatcagcacggcaacaccttccaaaccccgttccttgagagcaccccccgctacaccccgggcaggcagttcgccgacctcacgctcgacaaggcagtactggatttactagctcgactgacgtcgacggagcacaaccacgcgccgctgcttttcgatcctccgtacacacaccaggcgtccgcgctcgaggctgcggcgtccgggaggagtctcgtggtcacgaccggtaccggctccggcaagacagagaccttcttgctcccgatgctggcgaagcttgccaaggaagccgccaatcggccgaagtcgttcgcggcgcccggagtccgcgccctcgtgctctatcccatgaacgcgctcgtaaacgaccagcttggccgccttcgactgcttctcggcgatgggcgggtgacgagccagttcacaacgtgggctgatcgacccgcacgcttcgcgcgctacacgagtagaaccctgtatcccggtgtgcgaactgctgcgaaagacagaaccagactcaagtcgctggagaagtactacatcgctctcctcgacgaagcagcgaagccggcttcgcccaggcagaagcgcgcagcgcagctcgtcggcgagctgaaggcgcgcggcaagtggccggcgaagccggacttgaaggcttggtacgggtcgagtggacaacattgggtggactcgaagaccggtgccttccagcgcgcggtcatgctcccgggcgacgccgagctcctcacgcgccacgaggtgctggcctggccgcccgatgtgctcattaccaactattcaatgctcgagtacatgctgatgcggcccctcgagcgtcccatcttcgatgcgacgcggcagtggctacgggacaacccggaggagaagttcctcctaatcgtcgatgaggcacacctttaccgcggcgcggcaggcgccgaggttgcgctcctgatgcgacgtctgcgagcgaggctcgatatccccgccgatcgccttcaggtcatcgccaccagtgcgagcttctcgggagccgagaaggcccaggcgttcgccgcgcagctgaccggcaaggacgtgagcgactttgacgcggtcaccggcacgctcgacctgcggaactcagcggaacctgggtcgcttgaagatgctgaagtgctggcctcagttcccatggacgcctactacaacgcggagacggacgaggcgcgaacgcaggcgctggctccgctgctgaagtaccgggaagtcgctcacgacgccgaaacctcttcaagcgccctcctgttccgcgcactgaatggatacgccccactcagccttctgatcaacaagacgatgaagcaggcgctgcctgtccacacgctgggcgcgcacgcgttcccgggaatcgacccaacgcaggcggagcgcgccgcctccactttgatcgcgctcgcgagcgccgctcgccttaagtctgacgatgcggggctgctcccgtgccgcgtgcacgccttcttccggggccttcctggcatctgggtgtgcctcgatgaggactgctctgtggaccgcggcggaatcccgaaggggcccgtcggtgcgatgtatggccagccccgaagcacctgcgactgcggtgcgcgtgtctttgcgttattcacttgtcgcgaatgcggcgctacgtatgcacgggcgtacacggacgacgtcgccaatccttcgttcttgtggcaggagcctggcagtgccttccagacagcgtcggggcctatcgcagcgctcgaaccgatcgatctgcttcttgaagagccgtccgacgatgtcggcaacgccgtcctcaaggaactcgacctcgttaccggtcgcctcaacccgcacgatctcggtgatcgctggcgcagggtctgggtgcgactccagcaagacgacgggcaccaaccagatgccgaccctgcgggcgggcagaagcaacccggagagttcaacccatgtggcgtgtgcggcgaccacgcactgtttggtcgcaccagcgttcaagaccatcaaaccaagggtgacgagcccttccgagcactcgtgagtcgtcagatcgaggtgcagcctcccgggccgaagccagccgacgacttcgctccgctccgaggccgcaaggtgctcgccttctccgactcgcgacaggttgccgctcgccttgcaccaaatgtccaggagtactcactccgcgacgccgtgcggccgattatcctcaagggctggagcgagctatcgaagcaccctgtcgcgccgaccataagccttgaggatctctacctggtcgcgatggtgggggcgaagctgctgggggttcgcctccgccctgagctcacaggtacggagaacttcgaggccttcacgcaggtctcggagtcgctcgagcgcggcgctctgagcgatcctgcggagttcatgcagttgtacgccatcaaggatccgccaccgcagtcgcttctgcgaagcctggtccccgcgctcacgagccgctactacggattcacgtcgctcggccttgcctccctccgcgagcggggcaatctgaagaactccgtgctcgccgaactggtcgacattcctggtgtcgcgacgaccgaggatgagaagctcgcgctggtccggatgtggctgtcgctctggattcgccccggtatctggttctccgcgatgagtgcggattggaagggcaccaaggtgcaggccgtgagcggtaagttcacgaagttgacgacctggctcggcacgcgtgaggctcggcgcatcttcgatgccgagtggctgcccgtgctgcagagcaagttctgtcaaaaggtcggcgacaagtatcagctcgccgcccgcacggtcgcgctcgacctcgataccgtctggggctactgcgagcggtgccgctccacccagcgccacttccccggccggatcacctgcatctcctgcggcgccgacaaggtgaggtcactcgatgcagagacggacgaagtcttccaagctcgcaagggctactaccgcgcaagttcgcgccgcgcccttgcgatgccacctggcgaggtcatgagcgtcgttgcagctgagcacaccgcccagctgaactcttctcagagcgacgacgtgttctcgaaggcagagatgtacgagcttctgttccaggacgtgaacatcgtggtgcccgcaccaggagagcaaccagaagtcgcgatcgacctcctgtcttgcacgaccacgatggaggtcggcatcgatatcgggtcgctgagcggggtcgcactgcgcaacatgcctccatcacgagccaactatcagcagcgtgccggtcgggcggggcgccgcggcaacgcggtggcaacggtgattgcgttcggtagcgccgacacgcacgacgaccactacttccgtgagccagccgagatggtgagcggagaagtcgccgaccccgtccttactatcgacaacgtggagatcgccaagcggcacatcaccgcctttctgctgcagcgatatcatcaagaccgagtcccgcacatcgacccgaccacgatgcccgccaacctcttcgaagtgcttggctcggttggcgacttcctgtcgagttcagcgacgctcaaccggacagatttcgagagttggctcgtgagcaacgcagccacgcttcgcgccgaagtcgacgactggcttccaagcgagatcagcggtgaccatcgagacgaagtactggccagcctggtcaccacaacgcttcacggcatcgatgatgcgctcgacatccgaaccgcgccgacaatcgccgagccggcacccgaccagactcccccagccgatgacaaaacttcggacgagggcacaggagcggcaggagcagactcagcggatgaagctgatgttgctgaggacagtggcgaggagctgagctcccagcgcgcgcgagacaagcttctcgatcgtctgctctataagggcgtgctcccgcgctacgccttcccgaccgacgtcgtcagcttccacgtattcgacgaggatcggtctaccccataccgtccagcattccagtacgcgccaagtcagggccttaccgtcgccctgagtcagtacgcgcccggcaaagtcgtttgggtcgataagcgcgagtggacatctggcgccctctactccccgatgcgcaaggagctctcagaggcctggaacgatcgtcgcatctacttcgagtgccaggactgccactacgcgatccacaccccgtgggagcaggcggatcgtgggcgcacggacgtctgccctgcctgcatgggcgaccgcttcggtcccggcatgaattggcttcgtccgccaggattcgcgcatcgaattggccaaccgcctggcacgagccctgacgacgcaccagccgtgagctacgcgacccgcgccaaactcatcgccgacggccccgggaatgcccaactctgggagcaggtgaacgatcgcattcaactcaacttcgatcaccagaagcttctggtgtccaacaccggcccgaacaacgagggctacactttttgcacatggtgcggcctcattgaaccgaccgcgatgccaacaccactgctcgcgggaacgcatgccaagccgttccctgacaaggatccgatgtgtccaggcggtcgagcctcccgaggtctggtgctcggcacggacttcttctcggatgtcttgctgatccgactgacggtctccgacccggtgacactccgaccgtcatatctgtcctctcaagtcgcactgcgtaccgccgcggaggcaatcaccattgcggcggcgaagcacctccagatcgaggccagcgaactgcaagcggagttccggccggcactcacccaatggggcgggcacggacgtgaagccgaaatctacctctacgacaccctgtccggcggcgctggcttcactcagcaggtgagccagctgggacggaagatcttcgagctcgcacttgagcgactagtcgagtgcccggctgagtgcgaagaatcctgctacaggtgccttcggagcttccgcaaccgattcgagcacacccaactcgaccgccatgtcggcgccagtctgctgcgctacctgctcgaaggcacgctccccgagctttcgcccgcacgtgtcgaccgctccgtacagcgtcttttcgaggacctcgatcggtccggcgcggatgacgttcatttcgaacgcgacgcccagatccacgtcaccggcatcggtcaagtggtcgttcccatccttgcgaccaagtcgagcggggagcgagcgctgatcggtgtccatggccccctgacacccaaagtggctcccacgcccgaactgcatcgcgtggccgaggagacttccgaacgcgtcaagttcgtcgacgacctgatcatcgcgcgcagtctcccgaacgcatctcgtgaggtgctggaattcctgaagtga

SEQ ID NO: 27616 - DNA, 2040 bp, Rhizobium sp. Leaf383
atgacgagtgtaaaacccgatgaactggctcaaaaatctcgcgatccgggtccagttcgctcgttctcaccttttctagcaccggatgagaagaagcagcttcattccctcttgctggtcagcgacagagaacctccaacgttcgctgaggcacttcgcgatctcgcgcggcaatatatcgatgatggttcaagccagaaactgagaacgatttgcctccttgttgcggatctcgtcgaacagggttggcgggttaccatccaagacagtgatatcctttttgaacctcccggtatcgctcggtcgaccacgcaaacggtcgatgacgtcaaggcgcgagtgcgtcttgcacttcagaccgcacgtcagcgccagctcaaggagccatccgtcgtggagttcatacgacgtatggaaagtcgactttctagatctcgcggcgctaaaagttcggttctggacctgattgataacgggatggagctctcaaaggcgctcgcggacctgcaggagagtgaggtcagttcgcgccaggaagtgctcgccacgatcatcgatcctgtgatcgagatttgtgaaccaggcgcgcgctgccagcacacaggcatcaagctgatcgatatctggcgatatttccgacacacctgggctcatgaatatcgaccgataccgggtcgccagttgcttattttgatccgcaatgcggctcgccctaggcacccggtgatgggaatcgcgatgctcgccagtcccgtcatgcgcgtcaatgttcgcgatcgatggatagggtggcttcgagacgaagcaaagctgcgtctcgataaaggcaacttcgatccagttcaacttgctcgatcacttcaggctcaactggagcagtcaatttcctccattcgctgggacgatctcgtacgagaagaggaaatagccgagccgacagaggcggcggtactgcgcctggagcaaaaagcggcaggcgcggcctatgcacgagagattgaactccgcgcacacttcgacgcgcaacaagaccaggatcagccggttacgccctttcgtgggggcgtgaaaagtagcactgtcctggacgcggactggctggcgctctcagaggacttgctttttgtccgcaagagagcagaagtcttggcccagctattgttcgcaaggcagatgttccgggccgcgcgtcttgaccaagagcccgccgccgctcttgagcaattgcttgccggcagaagcggtcagcgcgcaatcgacatcgtcctcaccgaatgccgaaaggcagggttatcaagccggatcgctgatgtcagcgtttgtggtgccgtcgcaccctacaatgaacttctcggtggcaagcttgtcgcattgctgcttgcgtcggaggaagtgcgtagcgcctacgagcgccgatacagcaaccaggtcagcgtcatcgcgtctcagatggccgggaggccaatctcgaaaccggccgaccttcgaattctcacgacgactagcctttatgggatcggctcaagccagtacaacaggctttcagtccaaacaaaacacagtccgcatttgaaggccgatatcgcctggaagccgatcggaagcagcctgactggcggatatggcacccttcatcttggagccgatacggcaaatgcactccgctctgtcgcacagtccaggcacttttcgcgtcggatcaataaccgtttcggcgaaggcaccagcccgaggttgcgacagatgagagagggcctgaacgcgctcggcctggatagcgacacgatcctccatcatgcgacaccgcgtctcttttacgcttgtgagcttggtgcaggcgccagagaagcccttctgggactgtcgactttacacgtagaaagcgaacctgctgctgccatcgctgatgcctggcgtcgccgctggctggatcagagaagccgaagaccggaaaccctcgacaagttgcgagagcttggaccacaaagcgttcatgcaagcctgcgtcccgttgactcctttgacctactcgatcgatga

SEQ ID NO: 27617 - DNA, 1071 bp, Rhizobium sp. Leaf383
atgatttcgtttgtatcatcggctgacattttgacgttgtctcaccggttcttgagtgtagccgacgatggcacgatcagcaccgaatatcttgccgctgcggtgaggcggcttgccggtgccacctgcccatgctcgcctaagaccctgatgaaggtgatggtcgattctcaccgaggtctctttagtgaaatggacgtgtttgcagatcgggtggagtcggtaatcgatgacctggtctcggttggtgacctgcttgagctcagtgacgtttccactgtcgacgaacggatcatgggcacatggctgtttgcggcgccgcctggtttcgtcattcatcacggcggggtcgcgcacataatcggtatatcctccgatgagcaaaccccattgccggccgccatacgggagcgcgtcattgtggaaggcgtgacgagacgtatcgcgccaaacccgccagaggatctcggctcgctcttaagcgcacttggcctgcgcgagataccaagcgcggtttggttgagccatccgcggcggtgctcagcccgtgacctcatcgtccgtgcagatggacgcttgtcctcctcgactcgaatgggcgaggagaatggcgtccgagtgttcgaccaccggatgaacagtcgaagctatcggcgttgctgggagccacttgcgagtcagcatggcaagttcataatcagacggccgcaggcctacggtgctgaccggtggggttacgccgaaattgccgatggtggagttgcaaatgtgttcgagtttccagaccctggagatcgcgcgcgcggttgcgacatcgcctggcgaatgatggcagccttaaagacactccagggggagccgatccgctatcgatctatggaaagcggcgacatgagtgcattcgactttttcttcccggtccctgattgggccagacgcacgctcaggttctctggccgggaggtcgtttcccgagactgccttttgtcatttgatgtacccgttggcagcgccaacgcaattcatcgttttctcaacgacatgcttttttttgagcagcagtctgactga

SEQ ID NO: 27618 - DNA, 5550 bp, Rhizobium sp. Leaf383
atgtccaagaccatacaagaaaccatcgactctctccatcagtcgctcaaggactacatcgaggcgacttatcacatcagcaacgttcaactgatcgcgcagcggcgcaacctgctcgataaggtcggcgtaacccaccaggtcccctatcttgaatcgacgccgcgatatcagacgggaaagcgtttcgaggacattgaggatctgccgaaggcagccttggcagtctataccgcgctttcgtcgaagaagggcatcctgccgatcctcctccacaatccggcttatacgcatcaggcggatgcaataagacatgcacttgtcgagaagaaaaacctcctgatcatgacgggaacggggtcgggcaaaaccgaatccttcttgatgccgattttgggaaaacttgcccaagaagcatctgaacgacccgaaagcttcaaaaatcgccgtgcgatgcgagcgctcctgctttacccgatgaacgcccttgtgaacgaccaacttgggcgtatgcgcgcaatcttcggtgattccaggttaactgatctcttcaggtccatggcgggccgcccggcaacattcgcgcgttacacgagccgaacaccttatgctggaatgcgcagccggaaaaaggatccgggaaagctcggttcgttcgagcagttcttcgtcgaaatcgagcggcaagctgcagatccggatgcggaaaactacgagcaggctcgcattttgaagggccagttgaaacagcggggaaaatggccggcaaagcccgatctcgctgcttggtttggcgagaaaggcgatgactggatcgatcgcaagacccgggaatttctacgggctgtcacacttgccgacgatgcggaattgatcacacggcatgaggtccaagagaattgccccgacctgctggtcaccaactattcgatgctcgaatacatgctcatgcgaccgattgagcgttcgatcttcgatgataccaaggcttggcttgcggaaaatcccgatgagaagctgactgtcgtgctggacgaagcgcatctttaccggggtgctgcaggtgctgaagttggtctcttgcttcgcagacttcgtgaccgtctcggtattagtcctgaacgttttcaggtcatcgcagcgactgcgagtttcagcgacgagactagagcggacgagtttggtgctgcactcgcgggcgtccccaaggaattgttcgctgttgtgacgggccagcacaagaagaagccgaacgaacaggtggccactcccgcagagtgcgaggtcttggcatctctggatctggtaagcttctacgatgctgatccagccaagcgggctgccgcgattaaaccgttcctcacctctcgcggcattgagccgaccggcgttgtggaaaaagacttgttcgatgcgctcgatgaatttccgccgatcgcgctgctgatcaacaatacgatgaaggccgcccaaccgctggcagcactgggaccgcgtctttttcccggtcagcatgatgcagacagggctttgacatcgcttctggcgcttggcagcgtcgcacgcgagacccctgacgccgctgggctgctcccatgccgcgttcataatttctatcgcggtttgccgggtctttgggtgtgtatggatgccgcttgcccagaggtcgacgaagcagatcggtcgggaatttgcggcaagatgtatggccaacctaacgagcaatgtggctgcggggctcgggtgctgcagttttatacctgccgcaattgcggtgcggctcatgccagagctcatacagacgatgtcgataatccaaaatctctgtggtcggagcccggccagaacctcaaaatgcaaggcggtgaagcgcgagaattgcttgatctggatttgctcctcgaggagccccggcatcacggtatggcagaggttgcagattacgatctattgaccgggcaactcaatccggacatcctcggctcgaagacgcgctctgtctatattcgaaaagaccgaactactccagcaaccgatgacgatggacatgtggacacgcgatttgaagttcgcggtcaattcacgccatgtgccgtatgcggggagggggcaagctttggaagaacttctgtccaagaccaccaaacaaagggtgaccaaccgttccaggcgctggtctccaggcagatccaggtccagcctcctggtgtgatggagccgaccgggtttgcaccgctacgcggacgaaaggtcctggtattctcagactctcgtcaggtcgctgcccgattggcgcccaaccttcagatgtattcaacgcgtgacgcgctgcggtcgttgattgtctggggatttggccgccttcatgaagcagcagtgcttcgccagaaccttagtttggaagacctttaccttgccgtgatgcttgcgtcgcgggcgctcggcgttcgcctccggccagagatgggaaatggcgagaccttcgcagaaaatgaagtcgatgacgcaattgccgacggcgcattcggtgacgacatgcgcctggcgcaattgaggatggatttcgcgtatcaggcgccgccgctctcgctcttggacgatattgtcaagacggtccgggacaagcatctcggtctcgaagctctagctctggcgtccgttcgcgaaactgtccagaagcagaaagatattcttgccttgccggtgatccctggttttgcggagaccggcgaggagaagatcgcgctcgcccgtgcctggcttcggtgctggcagcgcgaaggcttctggctcagcaaaatgccgatgagttggtataaccgacgaagcagagggaccagcattcgcagtcggaaatcgcctttcgaggcgatgaaacggcttatcaatgacaaaaatgcagccaaaatctggacaaaggattgggagccgagacttcggcaagcattcacggaagatattgataacggatttcggcgacttctgggtcggacaattgccctcgaacttgagggcgactgggtgcgctgcgaggcctgccgttcggtacatcggccggtcccccgcattccgcgctgccttgactgcggctcttcagaaatcaaagcccttgatccggaaaccgatccggtttttgttgcccgcaaaggttactaccgggcgccagtcgcgacggttttgcgggacccgaccgacccccccatggcgatcatcgctgcggaacacaccgctcaattgaatgcaccacaaagcgaggacgtgttttccaaggctgaagaaaacgaactgctctttcaagatgtcgaactaacttggatagatcggccgaagaaagtcacggcaatcgatgtattgtcaagcacgacgacgatggaggtcgggatcgatatcggggccctttcgggggtcgcgctgcgcaatatgcctccgggacgtgcaaattaccaacagcgtgcaggccgtgcaggccgtcgagggaatgcggtcgccacggtggttgctttcggcagcgccgatagtcatgacgagcattattttacagaaccgagtgcgatgatcgccggtcccgtggtcgatccgaagctgaccttgaacaatacggatattgtcaaacgtcacattcgggcattcatcattcagtcctatctccaggatcgcatcccgacggtcgacccaacagcaaaccccgacctgttttcggtgctcggctcggtgcaagctttccaatcgggggcgggaacattgaaccgtctcgactttggaaattggcttgcaggcaacatcgtagctttacgcttaagggcagagagctggatcccggccgaactcgatacttcaagtcgcgagcgcttgctctcccagatggacgtcgattgtttgtccgcgatcgacgatgccgtttcatattctcccgaggcggggcaagaaacaacggtcggcgatgacgaggtcgacgaggtaccagaggtcgcgtctgaggagggagaggaaacctcgccccagatgagaccagacggaaaattacttgaccgactgctctacaagggcgttttgcctcgctacgccttcccgaccgacgttgcgactttcaacgtttttgatcgtgagcggtcgaagtcctatcggccaatcatgaagtttgccccgtctcaaggcctccctgtcgcattgtcgcaatatgcaccgggcaagcaggtgtggatctcgggcaagtgctacacgtctggagctgtctactcacccatggcgcaagatcgcttcgacgcttggagcaatagacgcctctatctcgagtgctcggaatgcagctttgccgaaaccaggccactcgatagcggcctaaagcctggagtgaagctcgattgtgaggcctgcggctgcgacgagacattcggccccgcacacttttggctgcgcccgcccggctttgcgcatccctacgattccgatgaagttacgtctcccgacgacatgcccgaaacagcttatgcgaccagggcgaaactgacgatggcattcgccggccacgatgaacgctggcaaaaggtcaatgaccgtgtccgggtcatgccggacaggacacaccttcttgtctcgaatacgggtcccaagagccaaggctacgattattgcacgctttgcggccgcatcgaaagccacctggaggccacggggctcctccgagcaccgcatcttaagccatttccagatgagaaagaccaaacatgcgcgggcgcgggaacctctaccggacttgtgctcggtacggatttcatcaccgacatcgctctcttttcattgagggtcgttgctccactcaagctaaagccggcccggttcgagaccgatgtcgcccttcggacggtgagtgaagcactcgcgaaagcggcttgcaacatgctggagatcgagaccggtgaactcatggcggaatatcgaccggccctcacaccaggggggcgcagcgggttggaggcggaaattttcctctacgacacgctgcccggaggggcgggttttgcggcccagatcgccggccggagcgttgaattgttcgaacgcgccttgtctttgatgcgcggatgccctgagggttgcgacgcgtcctgttaccgctgcctgcgtagctttaagaacaagttcgaacatagatatctcgatcgtcatgtggggatcgagctcttggaatacttggttcaaggggtttgcaagcctttcgataccacccgtgtgcgaaactcaacgaaagtccttgcagacgatctggcgcgccactgccccgaatatgatgtcgacttgttcgaaatcattgaggttcccggacatggccaagtcgaaatcccagttcttgtttccgacaagaatggaaggcgatgggcggttgcactctctggtcccttaacggagcgacgcgccgccgacccattgatcgcacaaatgcaggtcgatcccgacgcgatggcagttgaggtcgtcaatgaattgcttgtgcgcggtaatatcgcagacgcgacacgccggcttagggcgcagcttgagggtgcccagtga

SEQ ID NO: 27619 - DNA, 2040 bp, Rhizobium sp. Leaf384; identical to SEQ ID NO: 27616

SEQ ID NO: 27620 - DNA, 1071 bp, Rhizobium sp. Leaf384; identical to SEQ ID NO: 27617

SEQ ID NO: 27621 - DNA, 5550 bp, Rhizobium sp. Leaf384; identical to SEQ ID NO: 27618

SEQ ID NO: 27622 - DNA, 2139 bp, Rhodococcus aetherivorans
atggcaataattccggggacatgggtaatcggcaaagtcgatttcaggaccgagcagttcgcagtggtggcacccgtctacgagaacgacggcacgggctggcgtccggcggacccgaacgactacccgactcgcggtcgcatcttctggtggaatccgcgcatcgacgtccgttccggatcggtgatcggtttcgaactcgccgaaggcaggggtgagccagataggttccaggtcaccaacgccgactatctttgccccgtcttcgactatcgagctctaccgtacgacgaggccctcgaacggctgaccacggggaacctgcgcgtcagcgatgagatagctgcgggtaaagacgtcttcgtacgctgcaaggacgaccttctcctcggtccgctcgctccgaaagtcggaagggaacacttcttcgtcccgcccgactctctccgactcgaacgtgtcccgtatcgagagaacgaggacgccgtattcagcttgtccgacggacggtgctactgcgcaccgacgtctcccgtcaccggccacctcgactgtcgacccgacgcagccgtcttgcggactgccatccgtgatgcggtcacgattgcggagaagtcctcgaccggcatccccgacttcttcgcaaccaaagccctgatgcagagtgcagccgaccttctgcgggaaggggaaagactcgacgaccggcaatacaagtacgatcggatcgtccgcgcattgaaaatctgtaccgatagcgacgaggtacggaccctggcagaggaagtcgcagaactgctgctggaccatccttccatcaaggcgagaatcgacagcgtcagtgccaagcggatcgacaatgcggtcgctgctgcaagaacgcaggtcgccaaggacatcgagaaggagcgagcagatctcgccctgctccgggaccaacactcgacgatcgaggcggagattgccgagaaacgggccgaactggatcgcgccaagcgtgaactcgggaaagcgaccgccagcctgtctcaacagctcgagtcgctggagaactcggtgaccgacagggtcgccggtctcgtcgacgacgccaccgacctgttgaccgagtccgtgttgctgcgtgcactcggtgtcggttctgcgccctccgacggtccggtccgccccccgtactcgacggccgatcccttttccggtaggcgtgctcgatcggcccccgaggaagttccaccgacgcaggtactccatgccgccgcagagtccgtcggtgtcaatccgaccgttctcgttcgggtgcacgccgcttttcgcgccgggctcatcccgatcatgacgggaaacggtgggctggcggcgctttccgcgtatgcgactttcgcgtgcggactgcgactcgcacggctgcccatcgcccacgacttcctccatccggtggacctgctcggcatccgggcatccaatccaggcaccacacgcatgcatacgggcttgctactcggcgccgacgccggcgtgcgagagggtggggcgggtgtactcgtcctcgaatcgttcaaccaggctccgaccgagtcctatctgatgccgtggctccaggcaccggaccggacgatcgctgtcccggatgttgcgcaatcacttctgggcgtattgcatgtcacgcccgatccagatctcctcgtggcggcgacggcaacggccgggaccacgactgcacccctgagccccgacatctgggggtttgccgtagcgatcgacgtcccgtcggccgttcccggctcctctccccgggtgcgaccgactgttctcgaacgaacgccactgccctcctcccctcggatcgaaaaaatgatcgccgagatggagacagctcttagcagctactgcgaagtggacgatggggtggtcggttccgctcgtaggcttgcatccgggctcgccggattccagagcgatggcggcactctgtcgtcgatcgtggaatgcgtattaattccggcgctggcgtcgagcctgtccggctccgacctggcggcgggcgtcgatactgcggcgaagttcgacggttcgaaatccccggaccgacgacgcgcactgcatcacctcgctcgacgtctgcagcggcggttcgcatga

SEQ ID NO: 27623 - DNA, 1038 bp, Rhodococcus aetherivorans
gtgcgcaccgcgctcggccttgcgcctggcacgccgtccgccgagctcagctacgaattgctgcgtgccgtggcgtgggcgtcgaccggcggtcgcgccccggtctcgacgcggacattgctcgaccgggcggtcgggctcgacgcggcgcttcacgacggcgacgtcgacgcgacggctcggaggcacctgctgcgggaccggctagaggatctcgccgcggtcggggatctcgccccgcttccccgtggtcagtggttggccgttcccggctgcatcgtgcaactcgatgcggccgacccggacggtcgcttgctggtgagcggtatgcccgtacgtcacctcgacaccaggctgcgaaacgccgtcgctcccgacggtgcgagacgagtattgaacaggcgcatcagcgcggcagacgtaggcatgcccgtcgtcggcttcgaggactgggcgcgccgaccacgccggtcgctgagggactggaccgagagtgttctcgccgacggtctcggtgcgatcccggaagacgtcgaggtttccgcgctccgcttctacgttccggcacatgcacatccccgcgctcgccagtccgagcgttggttcggggccgaccctcgcctcgagggtcggtatctcgcgcgggccgacgcgctcggtggctggactcagttcttcgtcgccgaactccgtgcgggcaccgtcggcggcgtgcgtgagcaggatccgcacgacgtccgccggctcatgtacgggatggatatccgcgcagggaatccgacggcagctcgttgggtggaggcgaagcatgaggttcagctgcgaccgacgagtccgctgccgtacgccgagacacgggtgctgacggcgctcgctgattcacggaccgacagggggtgggtgttgacccgccatgtcggcactgtccgccgagtcctgacggagctgggcgtgacgctgcaaaccggtcccgtccagggcgccggctcggcacggagaccgcggcctaccactcgcgccaccccccgacggagctga

SEQ ID NO: 27624 - DNA, 6450 bp, Rhodococcus aetherivorans
atgggggcattgctgccgacattgcaggccgagcacctgcgcgaagggctgaccgactatctcgccacgacgttcgcgctgacggatccggatgctcgaggcgccctgaccgacttcatcggcgatcccgacaacggcatgttcaagggcccctacgtgcggctgcgccttccgttcgcgccggccggtggcaactggggcatgcacctcgactggtggccgaccggattcaccccgtacggacatcaggcccgcgcgttcgaacggctctcgaccaagttccaggatcgcccgcagccgacgatggtcaccacgggcaccggctccggcaagaccgaggcattcctgctcccgatcctcgaccacgtgctgcgcgccaagcgcgccggcgtcaccgggatgaaggcgctgatcctgtatccgatgaacgcgctcgccaacgaccaggccgagcgcctcgcccggctcatcaccacgaactccgaactcggcggtgtcaccgccggcctctacaccggcgagcactcgacgggcggacgcacccgcgtgtcggaagacggtctgatcaccgaccgcgccctgatgcgcgacgcgccgcccgacattctgctcaccaactacaagatgctcgaccaactgctgctgcggccggccgatgctcggctgtgggcactgtccgccgactccctgcagtatctggtcctcgacgagttccacacctacgacggcgcgcagggcaccgacgtcgcgatgctgctgcggcgtctcgggctcgccctcaagagctactggacgaactcgtcgaaggtcaccgattccgaccgtgcccgccccctcggcaagctcacccccgtcgcgacgtccgcgacgctcggatccagaaccgatcccaccgccatgctcggcttcgcgcacaccgtcttcggcgagagattcgacgaggccgcggtgatcggtgagacccgcgtcggcgtcgaacaatggctcgccgaccggcgcaccgacccgctctaccggccgatcgacccggtgatcgccgacgccgtcgaccggatccacgccgcggccgcggccgaccacgccggaagggacgcgaacgccgtcctcgcgcgcgccgtgcttgccgagttgttcgagcggacggacgacatcgcgaccgaccggtccctcaccgaggcggacctcaagattgtcagtgctccctcggaggtgctcgacctacttaaagggcacccgctcgtggctgccgtcctcacccactccaccgacgccacctccctcgccgacctcgccgcgcgagtgttccccgctgcaccactcgagcgggacgcccgccggacgaccgcgctgcgacagaggttcctcgatcacctgctggcgctgctgtcccacgtgcgggccgaggtcggccgcgccgcactcgacgtgcacgtgcatctgtggatccgcgaactgagccggatcgaccgcgcggtgagccccaccacctcctatgcgtggtccgacgacggcgacaccgagggtggtcgcgagctgtatctgccggcgatcttctgccgacactgcggccgctcggggtggggcgcccggctgggccccaccggcaactccctcgacgtgaccgacgacgcgatccgcgccgaccacgccgccggcctcgcccgcttccgtgcgctgatctccgcacccaccgaggcacagctcgatcgggacgtcgagggtctgcgctggttccacatcgaccagcgcgacatcctcgcggccgcccccgatcccgacagcgacgagatgctcgagggccgggtgctgccgatcctgacgctcaccggccccgactcggacgagaagtcgaccaaggacgtgtgcccggcctgcggcgccgacgacggcatccgcttcctgggcagcgccgtcgccacccaactgtcggtgaccctgtcgaacctcttcggggacaggaacctcgacgccggcgagaagaaggcgctgatgttcaccgacagcgtgcaggatgccgcccaccgggcggggttcatccaggcgcgttcgcacagcctgagtctgcgctcggcgctgcgtggcgctgtcgcggcgggaccgctcgacctgaccgagctgtgccagtcggtcgtctcccgggccggcgacgatcccgtgcgccggtaccagttgctggcccccgacgtcgtcgaccgcgacgagttcagcccgttctggaagcccggcgcccatcacagctcccgccgggcggccgaacgaaaggccaagcgccgcctgcagttcgacatcgacctcgagttcggtctgcagtcccgcacgggccgcaccctcgagctcaccggcagcgtcgtcgccgaggtctacctcggtccccccggacgcgccgccaccctgggccggcttgccgccgcgcagaccgagcagctgcagttgaggctcaccgacggtttcggcgcaccggcgcagtccgcgatgttcgacgacccacggggaggggaccagctcagcttcgccgacgacccggacctgccggcggccgacagccgggcgctggcccggtgggtgcgcggcacggtcgaacggatccgcacccagggcggcatccaccacgagtggctgcggcgctacctcgagaagaacgccaaccgctaccacgtctggggtggccggccgcgcggcgagggcatgcccgccttcccgaaaggccgctccgcgccggcgtttcccgcgtcgggctccggatcccgttcgctgccggagggcttcgacaccgtcacgtcaccgtcgtcctggtacgcgcggtgggcgtcgcgctgcctcgacgtctcgccctacgacggggcgttcctcgccaaggcgctgttcgcggtgctgaccgaacagcgggtgctcgagaccgtcaccacggacaccggaaccacggtctacggcctgcagcccaccaccgtgcaggtctccgccccgaacctcgaagacctcgaggcgcggcggcatctgctggtgtgcgaggtgtgccagacgccggccccgggcagcgccacggtcgtcggagagatggagggcgcgccgtgcctgctggtgcgctgccccggcacgctgcgccgcgcgccgcgccacgagaacttctaccgtcgcctgtacgactcgtcggagatgaagcgcgtggtggcgcgcgagcacacgtcgctgctgccgaccgcgacccgactggagtacgagacggccttcaagaccgccggcaccgatccgcaggcaccgaacgtgctggtggcgaccccgaccctggagatgggcatcgacatcggcgacctgtcgaccgtcatgctcggctccctcccccgctcggtggcgtcgtacctgcagcgcgtcggccgcgccggacgcctcaccggcaactcgctggtcctcgcctacgtgcgcggtcgcggcgagcacctgcccaagctgttcgatccgctgtcggtgatccagggtgacgtgcgaccgccggcgaccttcctcaacgccgaggagatcctgcagcgacagtacgtcgcgcacatcgtggaccggttcgcccgcgatccggagcgcaccgcgccgagggacgcgcgcgccgcgctcgccggcttcgacgacggcacctggatggcggacctcatcgcctacgccgaggcccacgccaccgcactgagcagcgcattcctggaccagttcggcgggctgctcagcaaggacgccgaggcggcgctcaccgggtggatctccccgggtgaggacgagcagccgagcgggctcgcccgacacctgcgcgacactgtgcatcggtggaaccgtgacctcgcggaactcacgtcccggcgcagcgccgtcgaggatcggattcccgagttggagcagaaggcgtcgtccccggcggccaccgacgacgaccggcgggcgctgcgcaccgctcacggttcccggaaactcctcggcgcacagatccgttcgatcacggactcgtactggatctcggtcctcgaggcctacggggtgctgcccaactacaccctgctcgacgactcggtgaccctcgacgtcggtgtgtcgtggatcgaccccgacagctccgcctacatgggcgagtcgatgagctatcagcgcggctcgcgcgtcgccctcaccgaactcgcgccgggcgccaccttctacgcgcagggcctggcggtgaagatcgacgccgtcgacctgggcaccggggagtcgaacgttcagacgtggcaggtgtgcccccagtgcggctgggtcgccgtcactccggcgggtgcccagccgaagccggtctcgacctgccttcgctgccacaacgcggcgatcgccgacgtcagtcagctactgcacgtcgtcgagatgcagcgtgtgtcggcggaggtccgccgggacgaggccaccatcaacgacagccgcgacgaccggcaccgggaacagttcaccgtcgcggtcgccgcggacgtcgaccccgcccatgtcggccgggcgtggttcgcgcagggacgggatttcggggtggagtacctgcgacggctcgacatccgctggctcaacctcggcaaacgcgcctcgcagggccgcaagcgggtcgtcgcgggccaggaatcggccaccgggctcttccgggtctgcgcgtcgtgcggtcaactcgacaccgctgcggggcgcaacaacgcccacgagcaccgcacgtggtgccggctgcgcactgccgataccgaggacgtgcgggagatcgccctcgcccgcaccctgcgcacccagggcgtcctgctgcatctgccgccggccctcgagtacgacaacttcgcccaccccagtctcagcgccgcgattctgctcggactgcggcacgtgatcggtggttcgcccgagcacctcgacgtcgccaccatcagcgacgccctgcacgccccggaccgtcgggcactgctgatccacgacaccgtgcccggcggcaccggctacctcgccgagttcgccgacccgggcaaggtgtgggagatgctcgccgcggcccgcaaggtggtgcgcgaatgcccgtgccgcgaggaggagcggctggcctgccaccgctgtctgctgccgttcgcgccgccgcacgagctggacaaggtctcccgcacgaccgcgctgaagattctcaacgacatcctcgacgccggcgcgcactccgagcccgacctcgacgactggacggccgcgatcgtcgaggacgccccgccgacccctccgggcagcgacgagtcgttcctcgagaaggacttctacaccgcgttcgtcggacggttgcgcgggatgggcgcggcggtggtggagaagccggggacgtacgggccgtccgcgacgatcaccctgccgggcaagaaggtccgccggtggtcgttgctcccccaggtgctggtgaacaacgtcaagcccgacttcgtcgtccagaccacggacagtgcgattccaccgatcgccgtcttcgccgacggccgcgccttccacgcctcaccggagtgcaaccgggtggccgacgacgcccgcaaacgcgagggtctccgcgaatccggatacctggtgtggtcgttcgggcacgaggacctccaacggttcaagaacggcgacgagcagaacccaccctggttcgacgagtccgcgtcgcgggtggtgaccaccaacttccacgtccggcccggactgctgaagttgctcgtcaaggacccggtgacgcagctgctcgagttcatggtcgaacccgacgtcgacgggtgggaggcgttcagccgggccatgccgtacctgttcgtccgccgcgacaatcgggccaagtccgtcgccgagaccgtgctcgaatccgcgctggccgcgctcgacggctcgccgccgttcgcccgcgccggctcggacgtctgctggagcctggtcgacggacccctcgtggtgacggcggcagtgacgtcgcctgcggaccggtccgtcaccgccgtcctcgccgtcgacgaccgcgacgaagcactcgacagcacggacgggcgtgcctggaaggagtggttgcgtctgtcgaactggctcggaatcgcggggcgccatcggatcaccacccgcacgttgctcgcggaggcggcgaccgcaccggcgggtccggccgccccgacgggcgggcagccgctggctccgcaatggcaggcgctgctcgacgacaccgtctccgaggccgagcggacgttggtgcaggcgctcgccgccgagccgaacctgcctgttccccgactcggttacgagaccgacgacggcgacgtgctcgacttcgcgtgggagagtgcgcgcgtcggagtggttctggatgtaaccgaaaccgagacacatacgatggccgacacggggtggacattgtgctcgcccgacgtgacggagattgtcgcggcgttgaggaagaacggggtgctgtaa

SEQ ID NO: 27625 - DNA, 1827 bp, Rhodococcus qingshengii BKS 20-40
gtgattttaggtccgttccacgtcaagattcacggagatcagtccacgctcgaagcaactcagcccgaacgggtgcgctactggcctgcagagagcaatgtcgttgccctgcccgatggcactgtttacgtggacaacctgcttcagtccgcgagcatcggtcacgctgactgtcgttcagatcacgatgtgctccgccaggccctgcgagaggcagtaggccttgtcggcgacgccattgaggaccggcaatacgccacgtccaagaaggcgctcgaagaagccgcgcgcaggctccgttccggcgagaacaccgctgaacgtgagttagtggttcagcgactgaccagggccttggatatttgcgaggacagtgccacccttcgcgcactagcacagcagctcgccgaacaattactgatccacccccagatagccgaggaactcgcagtgaggaaggcacaggtagaagcagaagtccgaaccaaagcaaaggaagaagcatcggcagccgcgcgtcatgagatcgacttagcgttcgcatcccagcgcgctgtactcgaagaggcacaaacacaggcaacgcgcactcgagcagaactcgaacaagtgcgggtcgaagtccagaaggcagaaagtaggcgcgccgagctgcagacggaaatcgacgcagccgagcttgaactcaccgaagcaaaagctagcgcccacgggcagctccacgaactcgaggattccgtgcggcaccaggtggacgagatcctggagggcacctcgagcgccttggcacagtcggttgtgctgcgcgcgctcggcgcaggagaatggcacacgaagaaacagctttctggcactactactgtgcgcctgccgcaatccgcagccgaaaatccatattctgaaacagtttccgagtattcgaccgtggcggatgagtcactcggccgccatctcagtagggctgcgcggagctggggcttgagtcgtctggtactggaacgcatacacgcgtcggttcgggccggccttgttccagtactgactggaaatggaggcatgaccgccctacgcgcctatgcagcagcagtattcgctggccgcatcgcagtcctgccggttgcccacgacttcctgcaccccgttgatctcctcggcgtccaggcgtcggaaccatccatctttcgcccacacagtggtttgctcgaggccgcgatcgaagccaccagtggaaagagcggaatgctggtgctggagtcacttaaccgagcgcctaccgaatcgtacctattgccgtggctgcagaatcaaccacagcagatcaacgggccgttcggaagctccgtagaactacatcgaggactggctgtggctgctaccgccgcatcgggggcgacgactgcgccgttgagcccggatatctgggggcatgccgtggccatcgacgtgcccaactatccacgcactggtgtggtttcgaacatcgccggactagctgagcccactgcactgccccgcgatgctgttcgtgaggcaaagacacagttgacggaccttgtagacgggttggatgagaattggccgatcgacccaggtgtctttgacactgcgaaccgattcgcagccggattggccgagatgcagagcacagacgaaattgccatctcggtagtggcatgcgtgctcctgcccgcgttgtctacggtactgagcggcgacgacctcgacgcggcggcagagcagatcatcgaacgactcgataacctcgaggacggtcatgcccggaagctgcgcactctaactcttcgtttacatggcaggtttgcatga

SEQ ID NO: 27626 - DNA, 1044 bp, Rhodococcus qingshengii BKS 20-40
atgagcggcattccgctgcatgtgcactctgcggatcctgcatctgcaagagcagcgatctacgcaagtctgtcacttccgttgtcgatcggcgacgcagaattgggttatgagacgctacgtgccgtcgcctggtccagcacccaagggcgcacgccagtacacgtacgcactctgctcgaccgagcgatggatgcccacatggcgctcacactcggcatccaaggcagagaagatgagacagtgcgtgaggatctgcgcagcaagctcgtagaactctccaggctcggtgacattgcagagctcgacaacgggcgatggatcagcgttcccggggttctcgtacacgtccccggtaacgagccagacctcctcatcagcggaattccactgtgccgtctggctccgcacacgcggcgtgccgtcgagtgtcaaggagcagcgcgattcgtacaggacgcggccgcagaggatgcaccgaatctgccacgcgtccgccttgaggactggtcacgccgcccgttaggaaaactggaggattggacccgcgccatgcttgccacaccagcactgccaactggcaccattctgaaggccggcatggaactgtacgtgccctcccaagctcgacccggcgcataccaggctgaacgttgggctgccccggggcgtgtgccggacggaacttatctggcacggagaacattggccaaacattggcgctcgtattcgctggccggagtcgaatccgagaatattaccggggtgtgggaaatcgatccgttactggcacggcgattgatgtacggcatcgaccagctcgatcacaatccgaccgttgcgcaatgggatgaaaacgaccaaggggtagcactacgcctacgcaaccccctgccagccccggaagctcgtgcgctgctagcactagcccgcccccactcggccgatcagcccggcagttggcagatcgacgtacatcgcagtgccgtgcggcaactgcttgacgacctagcaatcactctgacatctgggagacggaagtga

SEQ ID NO: 27627 - DNA, 5418 bp, Rhodococcus qingshengii BKS 20-40
gtgaccgacatcgatcttggagcctcccacaaagcacggagcatccgcgacagtttccaacgcgctctcgaagcgacatatcccattcgtgacgagttgatcgcggcccagcggcgcgaactgctcgagcaacccggtgtgatggcgcaaaacccctatctggagatcacccctacctatcgagtcggcactccgtttgcagatttaaagatcccgccggtggcacgcgagattctcggccgcgtgcagggactctccggtggggtcggagtttaccccccttacctgcatcaaagtgacgcactcgagcggttcttcgcccccggcggcggtgacgatctgatcgtggcgaccggcacaggatcaggcaagaccgagacgttcctgtatacgattttgagttccctcgccatcgaagcagccgaacggccgcagagcatcgcccagaacgcggtccgcgccgtattgctctatccgctcaacgctctcgtcagcgatcagacagcccggctgcggaaactattcggcgatccgagggttgctcagatgttcaccgaactcggtggtcgaaacccgttgttcggcatgtacaccagccgcgcaccctatcctggaccgcgtaccgcaaaacgcgacgccaaccaaatccagctgctagtaagctactacgaacagctacagcgctctggttccacactcatggacgagttgcgcgagcgaggtcgattcccggccaaagacatcgccggattcgccgcaccgggcccaggccaatacacgacacaacccggcgatagggaactgctcacacgccacgagatgcagacaatcgcaccggacctgctggtgacgaactactcgatgctcgagtacatgctgctgcgccccatcgagagctccatctttgacagcaccagccaatggctcgccagtgacgaacgcaacgagcttttgctcgtgcttgacgaggcgcacatgtaccgtggcgccgcaggcgccgaggtcggcttactcctccggcgccttgctgcacgcctgggtatcggccgcgaccgtgtgcgctgtgtactgaccagtgccagcctcggctctggcaacggcgacgaggaaaccgtcgcgtttgcgcaggcgttgaccggcacggctacgcgccgccgattcacagttgtacgaggtgcccgtgaagaaatatccggtactcgccccgccacccgtgacgaagctgaaaccctcgcgaacgtggacacagcggccctcgccgccgcccatgacacacccactgcgctgaaggcactcgatcgtgcaacgcacatagtttgtcccaacgctcatgcggatatgacggcagccgagctgcgctgcttgatgggggcgggtctggcgaatttcggtcctgcgatgttgctcgtcgacacctgctccggtaacgccaccgagctcgcagccttggccgccgaactgttcccgcagaccgatgtcactactgcagagcgggcactcgacggactgctcgccttgggcgcattcgcacgacgtcccgagcccggacgttctcagcaaccaatgctgcctgcgcgcgtccacgcgatgttccgcggattgcctccggtctacgcctgcattgacccacaatgcacgaatcgcgttttccctgatccgtcacaatcttccggtcgatccgacagcgagccgatcttaggaaccctttacgacagtcctcggacccaatgtgattgtggtgccagggtttttgaacttattacccaccgagagtgtggtgcagcctatctgcgcgcctacagtatcgatcgcaacgaaccgcgtttcctctggcatgaacccggtgggcttatcggcctgactgccccgctcgccgaaatcgtcgtattcatcgacaagcctcaccccaaacgtatgcaccacatgcaacccctacatctggatatcgccaccggacgcgtcctgcctggagaattagccgatagtcagaccacacgagttgtgtggcgccccaagcccggaaaatctcaagatcgagacgacgcgagattcaccaagtgcccagcgtgcctgggtgccgcggagcgtaagaactactctcttatctccggactggctaccaccggagagaaaccgttcgctgagctggtgcgccatcaattcgtctcccagcacgccacccttacccccagcgacgaaaatccgaacggaggccgcaaggtcctcgtcttctccgacggcaggcagaaggcagctcgtctggcacgggatcttccccgcgaggttgccgacgccaccatgcgcgacgcgcttgtgctcgccacacacctggcaagcagcatcaactccggtaaaccttcctcgttacgtcgtctctacaaggcattcgtagcagtctgcgcccaacaccatctgaccttcttcgacgggaaagatcaggaaaacctgatcgaccagtgcaaaaaataccttgaccggtacgaaggagacttcgaatacgcatgcgacgaggactggagcccggttccgctcatcagctatcgcgctgcgctgcaccgccaactctgtgacccagctagctctctgaccgcggcagctgcagtcgtcctcgcccccacccccgcggcgagaaagcagcttgtcaaaaagctctcccaggccaatatcggaattcccgatgaggaactcgatggcatcgcttctgcgtggctcacactcatgctcgccgacggggccatcgacccccagctttccaacgaagtacggcggaaaacactgccatactttgcggccgtcaatcacaccgaggcgcatcccaccttcttcacggaacttgccacgcgcctccagatcccccagtccgaaacattggagttacgcgcagccctatttgatgccctcgccgggcccgtcacagccgacgggacgcccgggcaggtcctcgaccttgcacatttgtcaatccggttggcgatggaggactactggtggcactgccaggactgtggccggcttactctgctcaagctcgcaggaggatgccccaacctcgcctgcggtgggaaacagctcgaactgcgcgcccctgaccaccccaccttccgatcgatgaaagaccacttacgcgcacccctgcgtgaagtcctgtctgggcaccgcaaaccgatgcacattaacgccgaggaacacacggcacagctgtcccagcgcgacaaccgagacgtgcacgcaacaaccgagaaattcgagctgcggtttcaaaatgtacgcatcgacgacgcacctgttgtcgacgtactcagctgtaccaccactatggaagtcggaatcgatattggatcattgacggcagtggcgctgcgaaccatgccgccgatgcgggagaactaccagcagcgagctggacgcgcaggacgacgcggcagtgccgtgtccaccgtgctcacctactccgacggcggaccccacgacagctactactttcacaacccccacccgatgatcagcgggccgacatcgaagctccgcgttaaggacgacaaccccaagcttgcccgccgtcacatacatgcatttctgctgcagacctacttccacacctacatcggatcgctcatgcccggagcagtcagtggggggatcatgtcttcgctcggcgcggccgacgacttcttctccgatcagtcgcaggcgccgaccttccgaagcttcacatcctgggtgagcacccagtacggaagctccaccgcgcccggcgttgtctcagtcgcagcctggctaccaagccgattgttcggtgattgcaccagcacagagcagctcgaaggctacgtcgctgaggtcgctgccaacttctgtgatcggctcgaggacttgtccaaacccgatcgtcggcgcggtgatcagactgcgttgggtgaactgcaactgcttgatctgctcttcgatgaaggtctgctgccctcctacgcattccccaccaacgtgtgctcgttcttcattcaggacaacaccgggggaaaagtcgtatcggtcgaacgcccacaactgtctaaacagcaggcgctcagcgagtttgcgccgggccgcaccctcgtcgtgaacaagaagacctaccgcagcggcggtatcttcttcccttccgacaaacccggatcgaaccgcacgcccgcagccgagcacttcactaagccgttgtccgtctataccggatgcacccgatgcccctacgtgcgtatggacgactcgttgccaccggagggaaccagccaggattgtccggtgtgtaccgcgcctctggtggcgcaagaatttattgatccgcccggcttctatccgcaaggagccaccgacttatctgaggacgatgtcgagcaggtttacacgcaagccgggacagcccaaatgcctgaatttgccgaccgcggcgcactcgaatggttcgatggccccggagtcagcatgcgccacgcattccatcaggactgtcggctcgtcgttgtcaacaggggaaagaacgccgctggctttggcgtgtgtgaacagtgcggcgccgcatggccggatgacgatatacccggacggcacgaccgaccatttcgtctcgacaacttccaacgtcgcggaagtacggggtgcagtgggcacgttcgcggaagtctgttcctcgcccacgaattccttaccgacgtgctgctgctacagctgcacgttgtaccaccaatggggctagacccacgtatgccatggacgaacgacgcactgactacgctggccgaggctatagcccttggagcgagtatccatctcgacatcgaccacaacgagatctccgcaggctatcgacttaccacgcccgatacacccggagccgcggccacggttgagatattcctctacgacacagcctccggcggcgccggattttccgccgacaccggacgagacctgcgcgctgtgctccagcgggtacgcgacctactcgcgcactgcccgtcaaattgttcccgttcctgcactcgatgcctccgccactaccgaaaccgctttctccatacactcctcgaccgtcaccttgccctcgtcctgctcgaccacgccctagaaggcgccgtacccgctatgcctgatcaggctccactgttacgccccttggcgcgttatcttgaattggaggggtggcagctccgccacgactcattccccgaccaggcactcatggtgcaaaaagagaacgtccgccgcactgtcgttgtctacccagcgctgcttgacgaatctcatgtccgcacgatttcacacatagacacacgatctgacgagcgaatcaccttcatcccggactacgctgccgctcgggacctgccagccgtttaccggaatgtagcccacggcactccctggggggtgctccactga

SEQ ID NO: 27628 - DNA, 1548 bp, Rhodococcus ruber
gtgaaacacgctttcgacctggccttggaacgcctggtgtccgccgccgatgccggccgccgccgggcctacgtgtgcccgtgctgctgcggccaggtgcacctgcgcagcggaaccacgaagatcgcccacttcgcgcacaatccgggagaaggcacgccgctgtgcgagcagtaccatcctggatccggcaattacgggtcgcccggtggtttctacggtgaggcaggtacgcccctgtttctgcacctgcacgaggacggcaccgggtggaccctgttcttcgacctcgagccactatccttagcggagagtcgccgctctttgccgtcggttctcgcattcgagggactcgaattgcaccggcccggttcgcgtcctcggaagctgcgggcagaatcgctgtggcccggcgccggtcgcacgacagtgaaggtagaaccgtcacggcagcacaccactgtcaacacagtgggccagtggccatcgggcatccgacccaaccggtggcgaagcaccctgaccgggctttcaccgaacggggtactgttcgtcccctaccgcggcggaaccttccgtcgatacgactgggcgacaccggttcattggggtgacagagtggtgctcgtcggcccggcacattgtgctccacccggcgcgctcgacgtcgtttccctgtcgacgacctccactgccgaaggcacgtggcacgcgtggctggttcgactgcctcgatcgttcgacctcaccgcctaccggtggctgagcaagttcgggatcaccatcgggcagcgccgggagaagacacgaatcgtgtcgccgcccatcgagtacggcgccggtggtgtgcctcgctttcttctcggcgatccgatcgtcgtcgcgccgtcacctccggcgggcgttctggccgcggaatcgtacgcaaccatgaatgcgaaaagcctgggacgcaggcgggtggcgggatcagcgcccgcctatgcagtcaccgctgtcgaatcaggcgcgttgcgcattcggaccgatgcggaacgggatgtcgcccgggtggacatcgtcaccgaaggcgacatcgaactcgatatttcggctgccgtctggtgcgtgcgacatgccgacggtgttctgctcccctacacgtcgcaccgattcgcaacccgcgacgtggcaccagttctccattccgacatcccggccctccgatataccgtcacagcaaaactccctgacgatcgcaccgaatctgttcggtcggtcggttcctctgcggcgacggactggatccggcaacgagtcgccacggcgacgggcatcgagatcgaggcgggaaatctggggttcctccgcctcgagcttccgcggtccgggcgctcccgccccgctgagcccccgccggtgcatgctcgtcgatccaactggcctgccgcatacgccctctcgttggacaccgagtcgaatccagttgtcccccattggcagatcggcacgggcagggcagctgcgacccggatacgccgattgcctaatgtgggtccatggcagtga

SEQ ID NO: 27629 - DNA, 2142 bp, Rhodococcus ruber
atggcagtgatctccggtacgcgcgtcgtcggccaggtcgacttcagaaatgaccgcttcgccgtcgtgacacccgtccacgacgacaacggcaccggttggaaggccgcggacccggatcactacccgactcggggcaaggtcttctggcggcaaccgtggcccgacattcacaccggtgcggtggtgttgttcgaacttgccgagggaaaaggcgagccggaccacttcgcagtatccagggcggaattcctgtgtccggttctggactacggactcttctcgtacgacgaggcgatcgagcgtctgacaagcgatcgccaagaagtcagcgaggaaatcagggcgggcaaggacgtctatgcgtggtgccgggacgaactcctcgtagggccgcttactccgagaatcgacggggcgcggttcttcgttcctccggattccgtgcgactcgagcgtgtcccgtaccgcgaggaggaaagcgcgatattctcgatgcccaacgggcggtactactgcgcccccacctcgccggtgaccgggcacctcgattgccgatccgatgccgagatcctgaggacggctgtgcgcgatgccgtcgccgtcgccgagaagtcctcgatcggaattcccggattcctggcaaccaaagccctgatgcagaaggcagccgatgcgctgcgcgaaggtgaccgtctcgacgatcggcagtacaagctcgaccgcatcacgagggcactgaagatctgcagggaaagcgatgtggtgcgatcgaaggcaaaggacatcgccgcgaccctacgagagcaccccgaggtcaaaccggagctcgaccggcagattgccgaagtgcgggagaaggccatcgaggccgcccagcatgagatcggcaaggagctggaagccgaacggcaggcgctgaaccagctccgcgaagaggtctcggctcttcataagcagcggaccgagctgcggtcggaggtggagcagacgaaacggcagttggcggagtccgaggacgccgtgtcccggcagctcgagtcactcgaggactcggtgaccgatcggatcgccgtactggtcgacggtgccaccgacctcctcagcgattccatcctgttccgtgcgctcggcgtcggttcttccggtggcggcaaggacgagaagccgacttactcgacagcgaacccgttcgccggtcgccgggcccgcccagtgccgcacggtaaaccggtgacaccggtgtttcaggccgccgccgacgccgccggcgtcggcctgagcgccctgatccgcctccatgccgcaatgagggcggggctgatgcccatcgcgacaggcaacggaggcccggccgcgctctcggcatacgcaaccgcagcgttcggcgctcgggtagcaactcttcccgttgcgcacgacttcctccatcccgtcgacctcgtcggtgtccgggcatcgaatcccgccgtgacacggatgcatactggcctgctggtcggcgccgacgcgggtgtgcgcgacgaaggtgccggtgtgctcgtgctcgagtcgttcaaccaggccccgaccgagtcctacctgctgccgtggctgcaaacccccgaccgggcgatcgtcgttccggaagccgcgcggcggattgtcggtacgtcccgcgtgacgccgcattcggatctgttcgtggcagcgacggcggccgcaggaacgacgactgcgccactgagccccgacatctggggtttcgccgtggcaatcgacgtcccgcgggcggtgcccgactcgtcgcgccgcgtggcgccgacggtcatcgaacgcatgcctcttccctccctgtcgtctcgggtcgcatcgacgatttccaagatggaagctgcgctcggtgactactgcgagatcgacgagggagtgctcggcacggcccgaaaattcgccgccgggctcgcggagttccagaacgacggtggcgttgtctcgtcgctcgtggaatgcgtgatgattccggcactggcctcgagcctgtccggccccgaactgaccgaggccgtcgacatcgcgctcgagttcgatggttcgaaggatccgaagcggcgccgagcagttcatcacctcgctcagcgtttccagcggcggttcgcatga

SEQ ID NO: 27630 - DNA, 1095 bp, Rhodococcus ruber
atgatcaccggcgcgcctcggatcgaggagcttcctcccgggtccgctgcacagcacgtacgcaccgcgctcggactcccgcctgtcacgccttcggccgagctcagctacgaattgctgcgtgccgtggcgtgggcgtcgaccggcggtcgcgtcccggtctcgacgcggacattgctcgaccgcgcggtcgggctcgacgcggcgcttcacgacggcgacgtcgacgcgacggctcgcaggcacctgctgcgggaccggctcgaggatctcgccgcggtcggggatctcgccccgctgccccgtggtcagtggttggccgttcccgggtgcatcgtgcaactcgatgcggccgacccggacggtcgcctgctggtgagcggtgtgcctgtacgtcacctcgacaccagactgcggaacgccgtcgcgctggacggtgcgagacgagtcttgaacaggcgcatcagggcggcagacgtaggcatgcccgtcctcggcttcgaggactgggcgcgccgaccacgccggtcgctgagggactggaccgagagtcttctcgccgacagtctcggtgcgatcccggaagacgtcgaggtttccgcacttcgcttctacgttccggcacacgcacatcccggcgctcgccagtccgagcgttggttcggtaccgaccctcgcctcgagggtcggtacctcgcgcgggccgacgcgctcggtggctggacgcagttcttcgtcgtcgaactccgtgcgggcaccgtcgccggcatgcgtgagcaggatccgcacgacgtccgccggctcatgtacgggctggaccgcaacgccgggaatccgacggtggtccgctgggtggaagcgaagcacgaggtccacctgcgaccgacgagcccgctgccgtacgccgagacccgggtgctgacggcgctcgccgattcacggaccgacagggggtgggtgttgacccgtcatgccggcacgatccgccgagtcctgacggagctgggcgtcacgctgcagaccggtcccgtccagggcgccggctcggcacggagaccgcggcacaccactcgcgccaccccccgacggagctga

SEQ ID NO: 27631 - DNA, 6450 bp, Rhodococcus ruber
atgggggcattgctgccgacactgcaggccgagcacctgcgcgaagggctgaccgactatctcgccacgacgttcgcgctgacggatccggatgctcagggcgccctgaccgacttcatcggcgatcccgacaacggcatgttcaaaggcccctacgtgcggctgcgtcttccgttcgcaccggccggtggcaactggggcatgcacctcgactggtggccgaccggattcaccccttacgggcatcaggcccgcgcgttcgaacggttgtcgaccaagttccaggatcgcccgcagccgacgatggtcaccacgggcaccggctccggcaagaccgaggcattcctcgtcccgatcctcgaccatgtgctgcgcgccaagaaggccggcgtcaccgggatgaaagcgctgatcctgtatccgatgaacgcgctcgccaacgaccaggccgagcgcctcgcccggctcatcaccacgaactccgaactcggcggtgtcaccgccggcctctacaccggggagcactcgacaagcggacgcacccgtgtgtcggaagatgggctgatcaccgaccgcgccctgatgcgcgacgcgccgcccgacattctgctcaccaattacaagatgctcgaccaactgctgctgcggccggccgatgcgccgctgtgggagctgtccgccgactccctgcagtatctggtcctcgacgagttccacacctacgacggcgcccaaggcaccgacgtcgcgatgctgctgcggcgtctcgggctggccgtcaagagctactggacggcctcgtcgaagatcaccgattccgaccgtgcccgccccctcggcaagctcacccccgtcgcgacgtccgcgacgctcggatccaagaccgatcccaccgccatgctcggtttcgcgcacaccgtgttcggcgagagattcgacgaggccgcggtgatcggtgagacccgtgtcggcgtcgagcagtggctcgccgaccggcgcaccgaccggctctaccggccgatcgacccggtgatcgccgacgccgtcgaccggatccacgccgcggccgcggccgaccactccgcacgggacgcgaacatcgtcctcgcgcgcgccgtacttgccgagttgttcgagcggacggacgacatcgcgaccgaccggtccctcaccgaggcggacctcaaggtcgtcagtgctccctcggaggtgctcgacctgctcaaagggcatccgctcgtggctgccgtcctcacccacgcgaccgacgccacctccctcgccgacctcgccgcgcgagtgttccccgctgcaccggtcgagcgggacgcccgccggacgaccgcgctgcaccagcgattcctcgaccacctattggcgctgctgtcccacgtgcgggccgaggtcggccgcgccgcgctcgacgtgcacgtgcatctgtggatccgcgaactgagccggatcgaccgcgcggtgagccccaccacctgctatgcgtggtccgacgacggcgacaccgagggcgatcacgagctgtatctgccggcgatcttctgccggcactgcggccgctcggggtggggcgcccggctgggccccaccggcaacgccctcgacgtgaccgacgacgcgatccgcgccgaccacgccgcgggcctcgcccgcttccgtgcactgatctccgcacccaccgaggcacagctcgatcgggacgtcgagggtctgcgctggttccacatcgaccagcgcgacatcctcgcggccgcccccgatcccgacagcgacgagatgctcgagggccgggtgctgccgatcctgacgctcaccggccccgactcggacgagaagtcgaccaaggacgtgtgcccggcctgcggcgccgacgacggcatccgcttcctgggcagcgccgtcgccacccaactgtcggtgaccctgtcgaacctcttcggggacaagaacctcgacgccggcgagaagaaggcgctgatgttcaccgacagcgtgcaggacgccgcccaccgggcggggttcgtccaggcgcgttcgcacagcctgagtctgcgctcggccctgcgtggcgctgtcgcggcgggaccgctcgacctgaccgagctgtgccaggcggtcgtctcccgagccggcgacgatcccgtgcgccggtaccagttgctggcccccgatgtcgtcgaccgcgacgagttcagcccgttctggaagcccggtgcccatcacagctcccgccgggcggccgaacgaaaggccaagcgccgcctgcagttcgacatcgacctcgagttcggtctgcagtcccgcacgggccgcaccctcgagctcaccggcagcgtcgtcgccgaggtctacctcggtccccccggacgcgccgccaccctgggccggcttgccgccgcgcagaccgagcacctgcagttgcggctcaccgacagtttcggcgcaccggcgcagtccgcgatgttcgacgacccacggggaggggaccagctcagcttcgccgacgacccggacctgccggcggtcgacagccgggcgctcgcccggtgggtgcgcggcacggtcgaacggatccgcacccagggcggcatccaccacgagtggctgcggcgctacctcgagaagaacgccaaccgctaccacgtctggggtggccggccgcgcggcgagggcatgcccgccttcccgaaaggccgatccgcgcctgcgtttcccgcgtcgggctccggatcccggtcactgccggaggggttcgacaccgtcacgtcgccgtcgtcctggtacgcgcggtgggcgtcgcgctgcctggacgtctcaccctacgacggggcgtttctcaccaaggcgctgttcgcggtgttgaccgaacagcgggtgctcgagaccgtcaccacggaaaccggaaccacggtctacgggctgcagcccaccaccgtgcaggtctccgccccgaacctcgaggacctcgaggcgcggcggcatctgctggtgtgcgaggtgtgccagacgccggtcccgggcagcgccaccgtcgtcggagagatggagggcgcgccgtgcctgctggtgcggtgccccggcacgctgcgccgcgcgccacgccacgagaacttctaccgtcgcctgtacgactcgtcggagatgaaacgcgtggtggcgcgcgagcacacgtcgctgctgccgaccgagacccggctgaagtacgagacggccttcaagaccgccggcaccgatccgcaggcaccgaacgtgctggtggcgaccccgaccctggagatgggcatcgacatcggcgatctgtcgaccgtcatgctcggctccctcccccgttcggtggcgtcgtacctgcagcgggtcggccgcgccggacgcctcaccggcaactcgctggtcctcgcctatgtgcgcggtcgcggcgagcacctacccaagctgttcgatccgctgtctgttatccagggtgacatgcgacccccggcgaccttcctcaatgccgaggagatcctgcagcgacagtacgtcgcgcacatcgtggaccggttcgcccgcgacccggagcgcaccgcgccgagggacgcgcgcgccgcgctcgccggcttcgacgacggcacctggatggcggacctcatcgcctacgccgatgcccacgccaccgccctgagcagcgcattcctggaccagttcggcgggctgctcagcaaggacgccgaggcggcgctcaccgggtgggtctccccgggtgaggacgagcagccgagcgggctcgcccgacacctgcgcgacaccgtgcatcggtggaaccgtgatctcgcggaactcacatcccggcgcagcgccgtcgaggatcggattcccgagttggagcagaaggcgtcgtccccggcggccaccgacgacgaccggcgggcgctgcgcaccgctcacggttcccggaaactcctcggcgcacagatccgttcgatcacggactcgtactggatttcggtcctcgaggcctacggggtgctgcccaactacaccctgctcgacgactcggtgaccctcgacgtcggtgtgtcgtggatcgatcccgacagctccgcctacatgggcgagtcgatgagctatcagcgtggctcgcgcgtcgccctcaccgaactcgcgccgggcgccaccttctacgcgcagggcctggcggtgaagatcgacgccgtcgacctgggcaccggagagtcgaacgttcagacgtggcaggtgtgcccccagtgcggctgggtcgccgtcactccggcgggtgcccagccgaagccggtctcgacctgccttcgctgccacaacgcggccatcgccgacgtcagtcagctactgcacgtcgtcgagatgcagcgtgtgtcggcggaggtccgccgggacgaggccaccatcaacgacagccgcgacgaccggcaccgggaacagttcaccgtcgcggtcgccgcggacgtcgaccccgcccatgtcggccgggcatggttcgcgcagggacgggatttcggggtggagtacctccgacgcctcgacattcgctggctcaacctcggcaaacgtgcctcgcagggccgcaagcgggtcgtcgcgggccaggaatcggccaccgggctcttccgggtctgcgcgtcgtgcggtcagctcgacaccgctgcggggcacaacaacgcccacgagcaccgcacgtggtgccggctgcgcactgccgacgccgaggacgtgcgggagatcgccctcgcccgcaccctgcgcacccagggcgtcctgctgcatctgccgccggccctcgagtacgacaacttcgcccaccccagcctcagcgccgcgatcctgctcggattgcggcaggtgatcgggggttcgcccgagcacctcgacgtcgccaccatcagtgacgccctgcacgccccggaccgtcgggccctgctgatccacgacaccgtgcccggcggcaccggctacctcgccgagttcgccgacccgggcaaggtgtgggagatgctcgccgcagcccgcaaggtggtgcgcgaatgcccgtgccgcgaggaggagcggctggcctgccaccgctgtctgctgccgttcgcgccgccgcacgagctggacaaggtctcccgcacgaccgcgctgaagattctcaacgacatcctcgacgccggcgcgcactccgagcccgacctcgacgactggacggccgcgatcgtcgaggacgccccgccgccccctccgggcagcgacgagtcgtttctcgagaaggacttctacaccgcgttcgtcggacggctgcgcgggatgggcgcggcggtggtggagaagccggggacgtacggcccgtccgcgacgatcaccctgccgggcaagaaggtccgccggtggtcgttgctcccccaggtgctggtgaacaacgtcaagcccgacttcgtcgtccaaaccacggacagtgcgattccaccgatcgccgtcttcgccgacggccgcgccttccacgcctcaccggagtgcaaccgggtggccgacgacgcccgcaaacgcgagggtctccgcgaatccgggtacctggtgtggtcgttcgggcacgaggacctccaacggttcaagaacggcgacgagcagaacccaccctggttcgacgagtccgcgtcgcgggtggtgaccaccaacttccacgtccggcccggactgctgaagttgctcgtcaaggacccggtgacgcagctgctcgagttcatggtcgaacccgatgtcgacgggtgggaggcgttcagccgggccatgccgtacctgttcgtccgccgcgacaatcgggccaagtccgtcgccgagaccgtgctcgaatccgcgctggcggcgctcgacggctccccgccgttcgcccgcgccggctcggacgtctgctggagcctggtcgacggacccctcgtggtgaccgcggcggtgacgtcgcctgcggaccggtccgccaccgccgtcctcgccgtcgacgaccgggacgaagcactcgacagcccggacgggcgtgcctggaaggagtggttgcgtctgtcgaactggctcggaatcgcggggcgccatcggatcaccacccgcacgttgctcgcggaggcggcgaccgcaccggcgggtccgatcgccccgaaggccgagcagccgctggctccgcaatggcaggcggtgctcgacgacaccgtctccgatgccgagcggacgctggtgcaggcgctcgccgccgagccgaacctgcccgttccccgactcggttacgaaaccgacgacggcgacgtgctcgacttcgcatgggagagtgcgcgcgtcggagtggttctggatgtaaccgaaaccgaggcacatacgatggccgacagggggtggacattgtgcccgcccgacgtgacggagattgtcgcggcgttgaggaagaacggggtgctgtag

SEQ ID NO: 27632 - DNA, 1986 bp, Sphingobium sp. C100
gtgcgaaccgtatcccctttcttgcgcatcgatcagaagcgggagtttcgcagcctcctaacgttcgaaggcgcaccccaaccttctttcgccgaggaactgcgcacgctggcgcgtcgctatattgatgatggcgagagccggaagctccgcaccgtctgtcttctcgtcgccgatctcttcgagcaaggctggcgcgttgccgtcgaggacgatcacattctcttcgaggcgccaggcatcacgcggcaatcggagcagtcggtcgacgacgtgaagcgccgcgttcgcgacgcactgcaggccgcccgccaacggcaactacgggaaccgtccgtcgaagccttcctccggcgcatggagcgccgcacgctccgcgcgcccggggtgcggagttgcgtcctcgatctggtcgacaacgggtccgacctcgccaccgagttccgacggatcgcgtcccttcccaccgatcagcaggaggcggcgttggccgacgtcgtcgatcccgtcgtcgagatctgcagggcacgtgaccgctgctcggcgaccggcttgccgctcaacgacatatggcgctacttccgccacacttgggcgcacgaatatcgccccatccccggccgccagttgctggtgttgatccggaacgctgctcgcccaaaccgccccgtcatgggcatcgccatgctcgcgagccctgtcatgcgggtcacagcccgcgaccgctggatcggttggctccgggaatcgatggaggcgcgcttcctcgccggtgaatgggcacccgaagatatcgccaaggcattcctggaccggatcgatgcgtcgatcgccaatctgcggtgggacgacctcgcgtcaaaaagcgagattcgctcgccagtagaaacgacgatcctgcggttggagcagaaggcctcgggcgcggcctactcgcgcgaactccagctacgcgcccattatgaggacaaccgggccgccgacggtagcgtccggccgatgcgcggcaacgtgaaggacgcgcaaggagataccgactggcgcgcggcgtccgaggatctactcttcgtgcgcaagcgagccgagcttctggcgcaactcctgtttgccaagcagacgtttcgtgcggccggcctcgcaaagaaaccgcgcgccgcgatcgagcagcttctcgccgccaagacaggccagcgcgcgatcgacatcaccctgaccgaattccgcaaggccggcctgtcgagccaggtcgccgacgtcagcatttgcggcgcgatccatccctacaacgaactgctcggcgggaaactcgtcgcgttgctcctcgcctcgcgcgagatccacgattactacgccgaacgatacggttcgcagatcagcgtcatcgcttcacagatggcggggcgggcaatctccaagcccgccgacctccgaatcctcacgacgaccagcctctacggcgtgggctcaagccaatataaccggcttgtactgcgcgcgagcgatcaccccgatctaggccatgatgtccactgggacgccatcggcaagagcctgaccggcggttacggcacgcttcacctcggcaaagagacggcgcatgcgctgcgacaaatggcgcaggcccgccacgactcccggcgtgtgaacaaccgcttcggtgagggaaccagcccccgacttcggcaaatcagggaaggcctcgatgcgctcggcatcgacagcgacgccatcctgcatcacgctaacccacgcctcttctacgcttgcgaactcggctcggcatcgcgcgatacactactcgggatgcacaccgaaccgccatcgctgtctagcgctgcgtcgatcagcgcggcgtggcgccgacgctggttgctggcgcgatccaggcggtcgcaaaccctggccgccatcgagaagctcggcccgcaaagcgtgcacgcggcgttgatctcgccggcgtctgatccgtcactgctcccgatctga

SEQ ID NO: 27633 - DNA, 1068 bp, Sphingobium sp. C100
atgatcgagatcgtgaagaaaggcgagatcatcgcctccgctcggcatgatctcggtcttcccgagggggccgagatggacagcgcctattggttcgccggcttgcggcgcctcgcggggcagttgtgcccgtgttcgccacggacgctggtgtcgtcgatggcgggcagtcaccgcgcgcttgcgctcgacggggtcgacttggccgatcaactcgaggattgcgtggatgcgctcgtagccgtgggcgatctgctggaattccatgacgtgaccacgctggacgaaaaggtgaaggcgacttgggtcttcgccgcgccgccctccttcgtcatgcatccatcgggtgcggcctacatattgggtatggcaccggatgacgcccttcctctcccgatcacgtggaggacgcgcgtggtcacgaggggccctgcccgggtgctcgaaccgctgccaggagaggatctcgagggatcgctcaagaccagcggctttcggcccttgtccctgaacgcctggatgcgcagccccaagccggagagcgcggcctcgatcatcgccgggctcgataccaagctcgcggcgctggggccggcgggccatgttcccgacctaaagatattcgactggacgaaggacacgcgaagctatcgggcgcgctgggtggccccatcggggcatgacggcagttacatcgtccgtcgcccgcaggcctatggagcggacctttggggctatgcgagcctcgaacggggtgaactgaggaagctcgtcgactttcctgtccccggatcccggtatcggggctgcgacgtggcatggcgagcccaactcgcgatcgacgcccttttgaacaggccacagcgataccgcgtccttgctttggacggcggcaagcgcttcgacatgtttttcccgttgccagactgggcacgccggcgcctctcgacgatcgggcacgagattgcttcggacaaatgcctgatgtcgttcagcattccactcaacgctgtcctggcagaacaggctttcctcaaagaatatctttttctcgagtgtgaagagtaa

SEQ ID NO: 27634 - DNA, 5544 bp, Sphingobium sp. C100
atggccgccacgatccaagagacgatcgaacaactgcacacctcgctcagggattatatcgaggcaacgtaccatatcggcgatgcgacgctcatcggccagcgccagactttgctgaagcggaccggcgttacccaccagatcccttatctcgaatcgacgcccaaatatcagctcggccagaatttcgggaagctcgagggcctgcctccggccgcgctcgccgtctactcggcgttggcgaaagccgatggcaagcagccaaggctgctcttcgacccgccgtatcggcaccaggcagacgccatcaggcactcgctcatcgacgggcggaacctcgtgattatgacgggcactggctcgggtaagacggaatcgttcctgctgccaatccttgggaaattcgctcgggaggcagcgaccaagcccaaggccttcgggagccagcacggtgtgagggcgctgttgctctatcccatgaacgcgctcgtgaacgaccagcttggccgtttgagggctattttcggcgatccgcgccttgcatcgatgttcaccgaatgggcgggcaggccgccgacgttcgcgcgctataccagccgcacgccctatgccggcattcgctccagcaagcgcgacagcaagaaattcgcgtcgttcgagagtttctacgtcgagatcgagcggcaggccgcgggtccgcaatcggaggatcagcagcgcgcgtcgaagcttcgcagcgagttgaaggcgcgcggaaagtggccggccaagcccaacctcgaagagtggtttggggcgaagggatcgcgatgggccgacccaaagaccggcgaaccgctaagggcggtcaccctgcccgaggattccgaactgatcactcgccacgaggcgcaggatgccgcgcccgatttgctggtcaccaactattcgatgctcgaatatatgctgatgcgcccgatcgaacggaccatcttcgatcagacggccgcctggctcgccgcaaacccggacgagaaattcaccgtcgtcctcgacgaggcccacctctatcgcggcgctgccggtgcggaagtcggcttgctgatgcggcggcttcgcgcgcggctcggtatcccggtcaagcgcttccaggtgatctgcgccacggccagcttcaacgagaaggagcatgcgggcgactttggatcgcagttgaccggggtcgatgccgacagcttcgtcgcggtcacaggcgacctcgatctgcggccgcacgccgccacggggagtagtgcggacgccgacctgctggctgggatagatctgtcgggcttctacgattcggacgaggacaagcggcgagccgcgatcgctcccgtccttcatcatcgtgccatcgcgccgacaggagatatcggccgcgatctctatgcggctctcgagaccttcccaccgctcggcctgctggtgaacacgacaatgaaggccgcccgcccggtggcgagcctcggctcagagcttttcccggacacgcccgatcaggcggaccacgcggtgacagcgctcctcgcgctcggcagtgtcgcccgtgagaatccggaggctgccggtctgctgccttgccgtattcacaatttttaccggggcctaccgggcctctggatatgcatggatcccgattgcactgaactcggcgccgacgagcattcgggcatctgcggaaagatgtatagccagccccgcgagatatgcggttgcggtgcccgcgtgctcgaattctacacctgccggaattgcggcgcggcccatgtgcgcgcccattccgacgatgtcgacacgccgaacgccctgtggtcggagccgggccggcgcctaaagatgccggggatggagaccgccccgctcctcgatctcgatctcctgctggaggagccccgccatccggacctcgccgagatcgcggaatatgatcttgagacgggacggattaacccgcttaatcagagtccgcgaacccgcaccgtctacttgcgcaaggaccgcgtcactccgcccgccgacgatgagggcaatcaggacagtcgattggaggtgcgcggccagtttacgccctgcgcggtctgcggggatacggcggcctttgggcggacctcggttcaagatcaccagaccaagggggaccagcctttccaggccctcgtcgcgcggcagatccaggttcagcctcccgggccgcaggcggcatcgagctttgccccgctccgggggcgcaaggtgctggtgttcagcgattcccgtcaggtggcggccaggctcgcaccaaacctccagctatattcggtgcgcgatgcgcttcgaacgctgatcgtctggggcttcgaccggcttcgtcagcacccgatgatcacatcgatgctcagcctcgacgatctctacttcgccgcgctccttgcttccaagggtctcggcgtccgcctccgacccgaactcaaggtgggggagaactttgccgccgacgccgcgatcgaactcggtgttcaagccggagcgctcgacgatccgacgcagttcatgatgctctggatgaaaaccaggggcgatcgtccgccggagggcctgctcgacgatatcgtcaagaccgtcagggaccggcatctcgggctggaagcgctcgcgctcgcctcgctgtgcgagagtgctgacaaggcggcggcggttcatgggctgccggcgatcccgggaatcgccgacaccaacgaggacaagatcgcattggcccgcgcttggctgcgatgctggaggccgaaggccttctggctgaacgccatgccgagcacctggtacaagcggggcggcggaagcgggacaagcgttcgatcgcaaaagggctcgttcaaggcgatgcgtcgcgtgctccccgacaagaccgctcactcgcttttcgacaagcaatggcagcctgccctgatgcagatcttcgctgaggagatggaaagcgggttcaagcgcctcgcaggcaagaacctatcgctgctcatggatggcgagtgggtgcgctgcggcgcgtgccgttcggttcaccggcccgtgccgaagctcccgcattgcctcgattgcggcagtggcgagatcgtcccgctcgatcccgccacggacgctgtcttcgtcgcccgcaagggctattatcgggcacccgtcgtagcggcgctccacgatcccgagcacaggccaatggcgttgatcgcggccgaacatacggcgcagctcaatgcgccgcagagcgaggatgtcttttcgcgcgcggaggagaatgagcttctcttccaggacgtggcgctcgattggggcgcggcagcgaaccgctcgacggcgatcgatatcctctcgagcacgaccacgatggaggtcggcatcgacatcggcgcgctgtccggcgtggcacttcgaaacatgccgccgggtcgcgcgaactaccagcagcgggcgggccgtgccggacgccggggtaacgcagtcgcgaccgtggtggccttcggaagtgccgatagccatgacgagcattatttcagcgaccccgaggcgatgatcgcggggccagtcgtcgatcccaagctcacgctcaataatcccgacatagtgcgccgccacgtccgcgcctatctgctccaacgctatcatcaggatcggattccggggtttgatcccgacgccgatccgaacctgttttcggtgctgggcaccgtccccggattccagtcgggcgcagaagtcctcaaccgcgccgatttcgaagcgtggctgaagaagaatgccaagtcgctccgggactccgtcgccgactggattccgagccagttatcgccggaggaccggcaagaattgctcgatgacatggcggccgattgcctgaaggcgatcgacgacgccctcaagggcaaggtgctgggcggtgagaaggtcttcgaggagcctgacggcgagggtgtcgaggttcaggaagaggaaggcgaggaggttccgcccgagaaggcgcagaccggcaaattgctggaccggctgctgtatagtggcgtgttgccgcgctacgcgtttccgacagatgtggcgccgttcaatgtgttcgacatcgaccgatcgacggacttccgcccggtgatgaaatttgcgccgtcgcagtctctgccagtcgcgctgtcgcaatatgcgccgggcaaaacggtctggatctcgggcaagtgctacacgtcgggagcgatctattcgccgatgtgggaggaccgtgtcgaggcatggcagaaccgacgcctctatcgcgaatgctccgactgccacttcgctcagacggtgccgctcgacgagggcctcaagcccggcgtgatcgacgactgccacgcttgcggcggcgagagcacgttcggaccgactcactattggctgcgtccgccgggcttcgcgcatcccgtctatgtggacgagatgacctcgcccgacgacatgcccgaaacggcttacgcgacgcgggcgaagctgacgatgccgaccccggccgacactgagaagtggatcgcgatcaacgaccggatccgcggcatgcccgatcgcaagcatctgttagtgtccaacaccgggccgaagcaggagggctataattactgcacgaagtgcggggtgatcgaggccagcgccgagagcacggcgatgctcggcgggcctcacaagaagccctttcccgatgagaaggaaccgatgtgcgagggcgcgggcacgacacggcatcttgtcctgggcacggacttcatcaccgacatcgcgttgttctcgctgcgcgtggcagcaccgctcaagctgaagcctggcttctatccgacggatgtcgcactgcgaacggtgagcgaggcaatcgccaaggccgcctcgtcgatgctcgagatcgagcccggcgaactcatggcggaatatcgcccggcggtgacgccggcggggattagcgggctcgaggcggagattttcctctacgacaccctccccggcggcgcgggcttctccggccagttggcccaccgcggcgaagaactgttccagcgcgcgctcacgctgatgaagacctgcccggagaattgcgacgcctcgtgctatcgctgcctgcgcagcttcaagaacaagttcgagcatgggttgctcgatcggcatgtcggcgcggaactgctcgcatatctgatcagcggcgagatgcagcccttcgaccctctccgtatcaaggcctcaacgctcctgctccaccaggatctcgagcgccagactgacggcgtccagttcggtctcgatgtcgacgtggatgtcccggggatggggtcggtaacgatcccgatcctcgccacgcgatcggacggccagcggttcgcgatcgcgctcgccggcggattgaccggggaccatccggccgaccctaggattgtcgagatgcgcgagaactggccggatctcctcgtgatcccggtgaacgaactgctggtcaggggtaacctgccggcggcatccctctccgttctttccgagatcgcttga

SEQ ID NO: 27635 - DNA, 2034 bp, Streptomyces himastatinicus ATCC 53653
ctgcgacgatctcctgcgagtatggagcaaaacctacggacggatgctccagaagtcatgaatgaagaggccaagccagttgtcctcagcctacccgccgacgcctctcgccaggaacggcaagcgttcaaccgcctctgcgccctgcttgctgagggccctgccggctccgcggacgtcaacggtcacgatcagtggatcaacgcagccaagatcaagaagctgtacgagcagccgcttctcgcagcagctgctcacacagccatcgacctggtagatcaaggctggacgatccagacccaaaagtccgggcacatcttcaccccgccattggcgagccatgaccgtgaggaggagaaggctcggatccgacgtcaggagcatctgcgtcgcgatgagcagctcaggcagagcagcgtccgacgttttgtcgaaagcatggagcgcacgcaccagcatggcgaccagttggtctccatctttaacttgatgcgcgatggccgagagctggcggacgcgctacagcgcacaggggcgtgcacagatgtcatcaacccgtacgttcaggtcgtcgactcctcaacttgcgagctgaccggcttcaagcttcacgacatctggcgttactttcgccacacttggtctaacgcgtacgcgaccgtacccggtcgctcgatgccgatcttgatccgcgatgcagccaccgagttccatgccgtgatcggactggcggctatctccagcccagtggtccagattgccgagcgtgaccactggatgggctgggataccgatcagttccttgagcaggtacgagcggatcccaccgctgacatcgcctcttggctggcccagcggatcaacactcagcaggaagagatctatgtcgatgatcttctgcgggatggaatccttcaaccgactgacctgacatcacccacaccagaggtcatctcccggctacgggctgatgctgaacggcatcgtcagcgccaccaccaggccagcaccatcggcgaagtccgcaacattgaccgcgatgcctgggtgaatcgggctacgacagatctatttagaagcaagcgctccttggcgctctccgagaccttggagatcgccactttgctgggcgcctatctctccccgcccacggcagaaggactcgccaaagccttctcggactcgaaggcgcgaacgcagatgcgtcgcgtggtacgccgcgcacgaggggagagggtcggcaccgtcatcgccgacctcaccgtctgcggcgccgtggcgccctacaacacactcacggcagggaagcttgtgggggcgctggccgtctcgccccgggtactgactgcttaccgccagaagtacgcacgtccgagcgagatcgcctccgcgatggccggccgcccaatcctccgggaaccccgcctctcattcatcggaaccacgtcgctctacggcactggctcaagccaatacaaccggctgttctggcctgcagaggtcatggggggcaagagcgacgcccggatggggttccatgaacttggacggtcgcgctccttcggaacctcccacttctccagcgagaccgtcgacactctcgtccggctttccacgctgcgcgggtcgcgcgttcgggtcaacaacctgttcggtgagggagtaagcccccgtctacgcaaagtgaggctaggaatcgccgcactcggatggcccgccaacgaactcctcaggcacgggcgtgaacgcatcctctacggtgttccgctggtcgaaaatctgcggaactactccctcggtatcgacgaggaaccggagtacttgctcgaccccgacctgccagaggcagacgcaagggtcggcaactggtggctcgagcgctggtgtcgaccgagagcggcacgccaagatgtccttgaatccatgcgtgtccatcggctcgtccgtccagtccagcacggcgcccgggtaccgctacccgttggagacggaatgccacccatcggcgaggaaatgctgcccatcaatacgtaa

SEQ ID NO: 27636 - DNA, 1092 bp, Streptomyces himastatinicus ATCC 53653
gtgaaagtgacagcactcagcatccaggaggtcgcagaacgcgctgttcacgcgctttgcttggacgagacaaccactgatttattctctgcagaggcgctctccgcttcgctccgccgctccgcctctttcctgtgtccggcaagtccgcgccggctagtggacgcagtgcttgaggccctctgtccactagatgagctatccctgatggctcgtcaccacatttcagcacagttggaccttctgctgtcggtcggtgacctgatcgaacttcctagccatggtgatggcaagggtcggcagatctacctggccccaccctcgtatgtagagaaggcgcccgggcggtacttgttgctcggtgtgcggcccaacggtgcaccgctcgtagacgaggcactaggagcggaggtgcatcacgagggccatacacggttcctcgaactcgatgtcgaggacgcccccacccgcctacaggccgcccacctgcataagattcctcgcgaccactggctccagcgacctggggagcagcatgcgaccgcagtcgtcgctctaatgcgtcagcgcttggatggagcgggagagtctggccaggtcgatggcctgaagatcatcgatcctgaggcgtctgttctctactaccgaggtcgctggcggccgatcgtaagcggggactccggagacttcgttgcccgccgcccgcaggcctacggtgctgacttgtggtgctttgtccgcgttgaacatggcgtccctcgcgcattggtggacctgcctattgatgacctcgctacagctggctgcgacgaggcgtggcgcacgcaggcagccatagatgcctcgaggggcacaccgcaggccatgcacgtacacctcactccgggaagagccgacgatctacgtctagacctgttcagccctgtccctgggtgggcgcagcgctacctcgagctcgtagggacccccgtctcgcgggcacggggggccttggtctcgtaccgggtaccgatgtcggcgatcggtcagttgtcggtgttcttcactgacatgctatggatgcacgtcagcgaagagggaggggtggcgtga

SEQ ID NO: 27637 - DNA, 5583 bp, Streptomyces himastatinicus ATCC 53653
atggatgcacgtcagcgaagagggaggggtggcgtgacattggaagcgccgacgatcgcgggaacgatcagcaagattcaggcagccctacgggactacatcgaggcgacctatcacgtcgggcatcccactgtggtcgatcagcgtcgcgcggtgctggagcaggagggtgtgctgtttcaggcccccttcatcgaaagcactcctcgctaccagccgggccagcgcttcggtgaccttgaactcgacgacgccgtccaagacctcttcgggagcctgtcaactcaaaccggcggcctgaagcccctgttgtacgacccgccctacacccatcaggctgaggctctggagtggactgctcgggacggccgcagtttggcggtcacaaccgggacgggctccggcaagaccgagtcgtttctcctgccgatgctggcgaagcttgcgacagaggccgcgcacagacccacctcgttcacagttccggctgtgcgatctttgatcctctatccgatgaacgcgctggtgaacgaccagttgggccggcttcggctcctgctcagcgatccacgcgttaccgccaagttcagcgagtgggccggccgcccggcacgcttcgcccggtacaccagccgaacgctgtatccaggcgtgcgccaggtcaagaaggatcagacccgcctgcgctcgatcgaagacttctacatcaatctgatcgacctcaagaacgaatcctctacgcctggccatgacgaagcgtcagctctcatcaaggagttggaagcgcgaggcaagtggccagcaaagccagatctcaaggcgtggtatggcaagagtggcgctcggtggaagaacaacgccgatgagttcgtgcgcgccgtcctccgccccgaagatccagaacttctgacacgccacgaagtactggaggaacccccggacgctctgatcaccaactactcgatgctcgagtacatgctcatgcgtccgctcgagcggcccgtgttcgatgcgacgcgagcctggttggcagacaaccccgatgagaagttccttctgatcattgatgaggctcacatgtaccgcggtgccgctggcgccgaggtcgcactcctgctgcgccgccttcgcgccaggcttgggatccctgccgagcgactccaggtgatctgcacgagtgccagcttcaagagccccgagtatgcccgtcagttcgccgcgcagttgagcggcaagtccgaagctgacttcaagagtgtgcagggcaagctccagctacgggaatctgccagcgcggggagcctgcatgatgctcacgctctagccgcagtgcccttgcatgacttctatgagggcgaaagtgatggagcccgcatcgctgccgtacgaggccttctgaactactgcgccgtggacggggctgggagcacaacggccggcgagctgttgcacgatgccctcaatgccttcggtccgatgaatctcctcatcaacgagaccatgaagcaggcacagccagtcaatgagctgggcgcgctcattttcccaacagcaccaacggaactcgctgatagagccgtttcggccctcgtcgccttgggcagcgcagcacggcgatcggcagacagtgcgggactcttgccttgccgtgttcatgcgttcttccgcggccttcccggtctctgggcttgccttgatccggaatgttctgaagtcgatcgagaagcctatccgcagccaggtccagtgggtcagctgtatgcacagcccagagcagcttgtacctgtggcaccagagtcttcgaactgtacacctgtcgacactgcggctcctcctacgcgcgggcttacaccgacgacctcgcttccccgtcctatctgtggcacgaacctgggggagccttccagtcagcgtacggttccattccggaacttcacgcactcgacctgctactagaggatcgctacgaggacaacgttgaaatcgctgacctcgatctggtcaccggcagactcaatccggaaaaaatcggtcctcgcatccgcagcgtcttcatcccgcgctttcgaagcggagaggcggtaaagggtgatgatgaccacgaggccgaggcaaacggggagttcaagccctgcggtgtctgtggaaagaccgcgaacttcggacggtcgtctgtacaggatcaccaaaccaagggagaccagccgttccaggctttggtgacgcgtcagatcgaggtccagccgcccagcagtaagccgaacaccgacttcgcaccgttgcgtggacgcaaagtgctcgtgttctccgactctcggcaggttgccgcccggattgcgcccaatctgcaaaattactcaatgcgcgacgtaatgcgacctctgatcttgcgcgggtggcaggagctggataaaccgccccttaatcgccagcttagtttgggccgactttatctggcagcaatggttggcgcacgcctgctgtcggtcaggcttcgcccggagctgcggccggcggagtcgctcgaggctttggacaacgtcacaaaagccatcgacaatggtgcactcgacggaaattacggcgagttgatggacctattcggcatcacggatccgccaccacactcgctcatgcggacgatgtacgcaacgctgacagataaatatcgcggattgacgcctctagggttggcctccctacgcgagcctccggccaaatcggcagagttgctcgcagcgcttcccgacatcgaaggcattgcaaccggcgaatcgtccaaactggccctcgtacgactgtggcttatgcaatggatgaaccccgggatctggttctcgtcgatggccgacggagagtggctgcagacagagggcggcatccacccgcattcaggaaaattccaaccattcgatcgatggcttcattcgagagaatcgaagaagaagttcaacgatagctggctgcccaccttgcttcggcacttctgcgagagagttggcggaaagtttcgactgtcagcttcgaagatctatctggatcttagtgaagagtgggggtactgcgaacgctgtcgcttcactcagcgacccattcccggcaccactcggtgtgtcagctgccgagctccgcgggtccgcgtactcgaccccaaaacggactcggtctttcaagcgcgtatgggctactaccgtgccagcgccgccagagcactgcgtgacccggccgagttgccgatgagcatcatcgccgcagagcacacggcacagctcaatgccgcacagtcagatgcggtcttctccaaagcggaagagcacgagctgttgttccaggatgtcaaccttggcttgcctggatcaggggatcagcagaaacgcgctgccatcgatgttctgtcctgcacgaccactatggaagtgggcatcgacattggcaacctttctggtgtagcgctgcgtaatatgccgccttcgcgcgcgaactaccagcagcgtgccggtcgggcgggacgtcggggtaacgctgtcgccacagtgctggcttttggaagcgccgacactcacgatgaccactacttccgtcaaccggatctgatgatccggggggatgttgatgacccagtactgacgatgaacaatgacgaaatcacgcggcgtcatgtcatcgcgtacctgctgcagcgctaccatcaagaccgcctgccgcaaatcaagcccgaggatcaaccgcaacttttcgcggtcctaggacgcgttagtgatttcacgggaacaacctctccgctaaaccgaactgacctggaagagtggctgaaggccaacgaagattctctccgggatgaagtttcagggtggctcccggaagagctgagccaggagagccgaggggctctccttcaaggaatcgtgaccaggaccctcgctgagatcgacgaggctctcgacatcgatctagacgaggaaaccgcgacgtcctccgaagtggacgcctcgactgagaccgaagaggatgatgtcgaggagatttctgatgccgcggaggagccaaacgtccgacgaggtcagaagaatcttcttgatcggctactttacaagggagtgctgcctcgctacgcctttcccacggatgtcgtcgcattctacgtattcgatctgcaccgatcgacgccgttcagaccagcgtttgactatgcgcccagccaggggcttgctgccgcgctcagccaatacgcgccgggaaaggtggtgtggatagacagcaaagaatggacttccggagccatttacgcgccggtccaggaaacacgccaccaagcttggcgggacagggttctctacttcgagtgcaaggtctgccgttacgccaattacttctcttaccaagaagccaaacgcggcgaaacgcgcgattgtccggcctgtcgcaccgagaattcttttggcgaggcaaagaactggatgcgccctccagggtttgcgcatccggccaggaaagatcccggcaccagccctgacaagccaccagcccgcagttacgccacacgcgccaaactcatggcacctgggccgactgaggagagcgcctggcagcaagttacggagcggctggcacagcactaccgccgcgagacactgcttgtaaccaacactggcccccgtagcgagggatacacgtattgtgtaagttgcggtctcattgagccgacagcgactccctcaggtgtggtggggggaacacacaagaagccctaccccgatgagaaggagccggattgtcccggtggtcgttcgacccgcggcctagttctgggaaccgacttcatctctgacgttctcttggtccgtctgaaggtggaatcacccgtcacgctcaagcccgcgtacctatctacgcatatcgcactgcgcacaatcgctgaggcgctgactattgccgcaaccaggaagcttggcatcgaggcagcagagctacaagcggagtatcgtccggcgctcaacacccgcggcggcgaaggtcttgaggccgagatctacctgtacgacacactcgctggcggcgccggcttcacccgccgggtccatgaccacgggatggagatctttgagcagacgctggaactgctcgagaactgtccggaggactgcgacgagtcctgctaccgctgcctgcgcagcttccgcaatcgcttcgagcacaacctactagaccgtcgtgtcggtgccggcctgctgcgttacctgatcaatgaaacgccgccaactctggactcggagcggctcgcacgatcggccgacaaactctatgaagacctcgccagccgagacatcgacggtgtctcattcgagccgcacaaagaggtcgacgttgcaggtgtcggtgtggttactgcccccatccttgcaacgcgaggcgaccagcagtggctcttcggcgtgcatagtcctctcactcctgacgtcgcgtccaccgagaggctgcaggatgccaaagatagtggcggagcagttcgcctaatcgacgacctggtcatttctcgcaatctgccattcgcgacacagctcgtccttcaagcgctgcagtga

SEQ ID NO: 27638 - DNA, 1461 bp, Thermobacillus composti KWC4
atgcgaaagggcacgcaaaatacaatacgtaaagcttatgatagaaaacttcaaatggttgttactgcaaaagaagcagcaataaatcaaggatttgagccaaatcggtatgtgtgcgttgtttgtgaagaagaggtctatgttgcggctgcttatagcacagaaagatcagttcattttagacatcatagaggaaacaataatgtcgaatgtgaatactatttaggtcaattaactggaaatacagatagattgtctttcaagagagaaagccgtgaagttggagagatatactttgacaataaaaatagaaatttttgcttaggtttgcgatttagtgtggatgagatagaagattgcgagaaaaataacgtctttatagaactcaataccgaggataagaacagaacattattaaaaatcaaaattaaccgagaaaattttgcaccagatactgttacactattccctcttgcgagattttcatcatcttattatctatccttttcaagcgaagaggaaacgagcaagcgtctgttttttagtcggagtaacactccaatctttttcagaatgatgggacatgaccaagcaggtagatgtaaatatgtgagaggaggtgtgctttatacaaatataaaatacgttgttgtttttccgctaaagaaatcgagcttaaagaatcagtttcttttgaatgaatttgatgtagaagatactttcgaatttaaaacaatggatatgagatttatagggatggtattgagtattaaatatttatcaaaaaatttggtttcattactaaaatcatggaattataaagcggagacaagtgaggcattaacgattctttggcctcctacttatcttacggacaataaatgcaatgtgaacgctgattatatttacgtatattccagctttaacttgattccaaaaggaaatactaatgtccccagagagaatatccgacttgtaacatcaaatgtttcaagaataaatctgttaccgcagtcaattatattcaagaaaaacgctgagataataatagaaaaaaaagattctataacattcaataaaaaacatattcaaagttacgcgagaaaagcgaatgtgttcaaagttcctgaggatggattatcgtactttatgttcaactgttatggagtatctcaattgacggttaatcaaacggtatatatgacccctgattctttaattattggttataaacataactatcctgtcacttacattgttcaggatgaacatcacgttaagtgcggaaatgagttactcaacgacattctcgctcattataaaaaaacagagaattttgatgaatcaaaaatcgatcaaaatagactaagtacactcgcacttcagtatattaaaaaatgtgagattgatggaaaaataaatacagtggtaagacattatattgaggaggggctattatga

SEQ ID NO: 27639 - DNA, 999 bp, Thermobacillus composti KWC4
atgaatgaattattaatatcgatgtccaatgatatgagaataaatcggtattttggtgaatcggagaattcatttacgtacagattgctttactcttcattagggctttggtgcttatggacagcaaataatggagagtatgggtcaacaaaacacaatcaaactctagttatcaatgaactgatgcaaagatacaacgaactttttccaggtattattgataaatttatcgattcaaataaccctaacctcagatttccagtccatatgcgtagagtctatgaagaaacaggttatcttatcactaatgaaaacaatcgcaatcaaacggcttattttgggcgatccttgaatattggcaacacatctttatactttgggattcctaacaaattatatacagttaatggacttggattatttacttcaccaacagaatactcagtaactaccagagaactcttaattagagatgagttatcagtaacagattatgttcatgcaaaatataacattgctgaattttatgaagcggatatcagaatagaggaactgcagtttttcaatccattatcgaaaaaagccatttcacattcttggtctggaaatatagtaactgattattcagttgctcgaactgttgaacataattcctattacagagtcgttagagaacccactggtgccatcttattcgcaaatgaagttggagaaatgaaaggtgattcactgtcctcatttgagtatagacgattatattacgccttaaaagcttactatagcaatccatcaattgccaaattgattgataaggacgacagttatgtggttttaaagttgaacggacacttgcctaatagagagtatttttttcttttattgatgtcatggccgtataataatgctttcaacaaaaccaattttttgttcaagaaagagtttatcgccgatataacagcattactaagtaaccttggtataaaagtaataggaggttag

SEQ ID NO: 27640 - DNA, 5208 bp, Thermobacillus composti KWC4
atgcacaattcaaacggtgttcaattctattatcaggctattagagatcggttgagaaactatataaagtcagactatcttgccaacagtgaaaccttactgttatatgaaaacgatcttttaggcgagaagtgtaacaattattccaatattgcacgcgagccttttattgaaacatcagcatcttacaagaaactcccggatggtattaaaaattcacattccattgaaccgggtgttaaagaggcatttataaaacttgcggatgcaaacttaggagtatatcctgatccctttgtacatcaagtaaaggcattggaatctttcttgtctggaaaagatttgtttgtttcaacggggacgggttctggtaaaacagagtgtttcctttggccgatacttgctaaagcatttgaagaagcaaaaaaacgcccgaatacgtttaagatggatgcggtacggacgctagtcatttatcctatgaacgcgcttgtatcagatcaactctcaagaattagaaaaatactgggtaatgagaaatttaaagatatttttactaccgaaacaaatgctgaacgtatccctcattttggaatgtacacaggcagaaccccttactctggtgagtccaagacatctagtaaccgtgaactcgcacaaacttttcgtgcaaattacttagtggataagtcagctgatgaagcaatccaggaaaagcaacgaaacaatattaaagggcttcaaagtatacacaaataccctgctagatatggtggagaaaaaggggtagaaaaatttatcaacaatttggaaaataatattcaaaatcctgatccctttgatgctgaacttatcacaaggtttgaaatgcaggtatttcctccggatattttaattaccaactactctatgttggaatttatgctgatgcgccagcgggaatcgaatatatgggagaaaactagacaatggcttgaagcatcaagagaaaataagcttcttgtagtcttggatgaagcacatatgtatcgcggatcaagtggtggagaaatcgccttgttactggagcgattattcaatcgcttgaatataactattgagagagttcagtttattttgaccacggctagcatgcctgagaatgaccatgatgctataaatgcattttacacggggctaactggaaaagagcataccggttgtatgtttttattcggagaaaaggaagatatcccagataaatacgaagtaatcacagatgtcgaacttcttgcctcgatcggatcagaacaagcttatggggaaggtatcgcgaaaaaaattaaaacattcgcaaaaactgtatttaatcaaactttgccagaaaacattgataatgagcaagcacaagcttggctctatgagaatctgccgaaatatgaagccttcgtaaaactgaaaaagctttgtcgagatggtgcgaattcatatagttttctaagagaacaactatttggtgatcatagacatgcaggaaatgcactggatgcgttacttgccttagttcctcttgctcagaaaaacgataacattttatttcctgttcgtttgcacatgtttttgcgtggcttacagggaatttatgcgtgttcaaatccaaaatgcaagaatgcgtattattctgaaagtgagaaacttcctttgggaaaagttatatcaataccaaaagaaaaatgcgaatgtggtgggcgagtttatgaactcgtcaaccatattaagtgtggggctttatattttcgtgtatttttcaaaaaagaagatggtcaaccatattggtatgtatttcctcggcctggcttggtcggtgatgaggattcccttaatgcaatgctgttgtatattgttccatccaaccataagagaagaaaagatgaaaagttgggatatcttgacccattaacaggaaaattgtacttaacgcctcaaaatgatgatagtcttctaaaggtaatttacaacgataccgaagataaaaaaaccaaagcttatacttttaataaatgtcccaagtgctgtaagaatatgactttaaagaaaccaatcgaccttgccacaaaaggaaatattcctttttacaatttgactaaagtccagttcgaactgcaaccgcctcaaaagaggaacttgataaatcaaggaaaaaaggtccttttgttttccgattccagacagaatgctgccaaacttgcccgtgatttgtcaaagtcatctgatgcagatgctttccgacaggcagttattcttgcatctcagttgatgcaaaacagcgaaaaggaatactcgctcagtgagctatacccggcatttttggagatttgcaattatcatagactttctttctttaatgccggagacaagcaaatatttgaagaacataaacagaaattcgaaaaaaggaaaaatcgaattttagggcgaggcggtaaaattgattttgaagaaatggctagggaatttcagtcgttgccagaagaatactacgaacatttgctgatgttctttacagaaagtccgcgttcttttaaagatattgggcttggatttcttgcgcccacgaacaaacaattcaactacttaatagaagatattgaagatgaaggaattgaaattgataaagaacttctgtatcagacgatggtgttgttgttctgggacgtaatggatgaagcagctgcgattggagaaatgataccagatgaagttcgtaaacagttaccaggacgtagcaagtctcgagaatttggattgaactcggcttttatttctgacatagatggagaattattaagtcgaattcaagaggttcttgacattgatttgcccaaaatgaaaaaaaccatagaactaataagggataacttctttgcaaggtcatcaagaaataataggtactatatcaaactttcatcggtaaagatagtatctacagatgagaatttctcatggtatcgatgcataaagtgcggtaagatttcaccgtttaaaattggggagtattgtggtgcttgctttgtttcaacggaggttgtagctattactgcagaagatttgtctcgttttgatttttggagaattccaatactaaatgctctaagtgaagggtttcagattcaaaaaatcagaacagaagaacatactgctcaattgacgcataaagaaacaagaagtgacacttggagcagaacggaaaagtatgagatgcagttccaagatatatgtgcaggagagtctggagaggattcaattgatgtattaagttgtacaacaacgatggaagttgggattgatattggtgctttgacttctgtaggccttcggaacatccctccgatgagggaaaactatcagcagagagctggccgagcaggacgaagaaatgcgggggtttccacagtggtcacatatgctttaggtggaccacatgaccatcattatttcattcacccaaatgaaatgatatctggtcctccacgaaaaccatggattgatcgcaacaatccaaagataaagcaacgacattacaacatgatggctctaaatggattcatgtccacagaagagatgaggacacaattcgacagcatagctgatattggaataatcagtttttgtaaggattatggcgaaaaatacattcagtatgtcaaatctactagtgcaacacagccttacatggatgaatctataagaaaatttaaagagattaaagaaaatgtgttggatgaaaataaaatcagtgagtatgaagaagcatctgcttttgatgtgttttatcgtgaggggtatattccgtcctactcatttccaaagaatgtcgtaaagttttacgtagagaaaggttcgagtcacggaaggaataatcgtgaaattcaatatgcccctgaaagggatattgcattagcgcttagtgaatatgctccgggaaggtttgtaactattgataaaaaaatatataaaagtggtggcatctatgccaatccaagaccgcgaggatatgaaacaaatcaagctgagttttactttacgaatagtgactattatcacgatattattatttgctcagaatgcaattggtttggtgtagataaagaagattatgcacgatcaagttgtccttattgtcatgcgtcgattgaacgaaagaaaatgttgcgtccctggggatttgcgcctgaaagaggtgatgcggttagatatgaagatgagagcgaagaatactcttttacagaaatgccctattatgcctatgtaccagaggacgaaaaacttgaacagtttggagaaagcaagattagctatgcaaaattgtccaatagaaaagtactaactgttaatatggggaataacaagcacggttttaatatatgcaagaaatgtggcggagcagaaatatcagatccaagcaatcctggacgtactttggtatctcagccgtatcatgatagccgtgtgtgtaatcatgatgaggtagcaaataatgtattcttagggtttgaatttttgacagatatgtttatgttggatatttcatatgacacaaaaaagctagttagcaacagtagtgcagaggagaaaagcattttttcgtctgcagtaacaacgctgcatgaggctctaaaaaaagcagtgtctatagtccttgacattgattataacgagattagtggtggttggcgtccgagaataaaagatgatgggaattcacatattgagatgtacttctatgataatctatctagtggtgcaggctattcatctatgattggacaacatcttggagatatactagagactgcacaaaatatcctctctaaatgtgattgttcccgttcatgtaagaactgccttgataacttttggaatcaaagaagtcatcgttattttaatagagaacttgggctgcaattgttgaattatgccaagaatgggactttaccttatggctattcaataaaagagcaaaaggaatggcttgtcccgcttgagaagcttatctcagaagatccggatttatctcagatgggaaaaattgaatttgaggttattccgccaatcctaaaaaaaccaattagcagtactaataaaatgtacttaaaccctattgatttgtcagattggttgcctaacactttcttggattacagaaacttgattatgagaggtaaatga

SEQ ID NO: 27641 - DNA, 1194 bp, Vibrio cholerae CT 5369-93
atgtctaacaacgttgtgagcgtcaacttaaaggaagctcaactaaaacgaaaacttcgagagcacctacattcacttggttttaccaaatctgaaaatggctccctcttggccccagggaatagtaaggaagttattcgctcactgcatcaagcccaaagaaaggaaaggcttgcagcaagtgatcattttattggaaaaaaccatgacaagttgtttaagtattttgcgtcaggtagtgagattattcctgagcgaatatccccagtattggaacgagttgattctcggacatggtcaggagacttgtttcgtttagcatctctaacatggtcagtgccagtttccagcggctttggaagacggctacgttacttagtttgggatgaaagtaacggcaaactgatgggacttattgcgattggtgatcctgtttttaacttagctgttcgtgataattatattggttggaatgcatcagaccgtagtgatcggctagtcaatgtaatggatgcctatgtattaggagcaattccaccatacaactcattactatgcggtaagctcatagctagccttttgagaacccaagaaatttatgacgattttagtcgtaagtatggttctaccactggattaatctctaaatcagagaaaaaagccagtttacttgctgtcacgacttcttcctctatgggacgttcttcagtctacaatcgagtaaggctgaacaatatggattatctcaaatctctaggttatacaggaggatgggggcattttcatatacctgaatggttgttcaaagagttgagagaatatttacgtgcaaaggatcatagatacgcggatcaatattcttttggtcaggggccaaattggcgattgagaacaacaaaggctgcattatctgcattggggttcaaagctgatttgctcaaacatggaatacaacgcgaagtcttcatatctctattagctcagaatagtgtagatatcctccaaacaggacaaggagtacctgatatatccaatctgaaatcttcgaaagcagttgctgatttagctcttcaaagatgggttatcccaagatctgaatgggacaatagttaccttaattggagggccagctctgttacagagttactgggatttaaatgtaaccaactgatagttaataagaatatggcgtaa

SEQ ID NO: 27642 - DNA, 1671 bp, Vibrio cholerae CT 5369-93
atggaatatgcggtaaataagcatactggaaaggtcgagttcgcggaacgggcaaatgtttttggtaaatacatttgccatgaatgcagaaaaccagtgaatttgagatctggaagaaagagaaaagcctattttgctcattggccgggttatggaacccttgaatgtgaaaaatttgtgccaggaggtgtatctctcagtgttgcagaggacgaattttgcgctatatctaccatggctcgaatggaactgcgactaaagataccaagcgaaaaacattcttcttggtatctagaactgactgttcccccatgcagagagtcacatgccacagttataatagatgttgggggcaggtttcaaacactggacatgagaggcatgtccaaaccgagaaagttaacagccgagccaacaactgaaaattaccgaatagtaagctttacgggaagaccagatcctcaattcgttaacggtgttgtgcgagagtgtaatgctcttcgaccttccggagctacagtgtttagttcaacgctcagtagtgaaagacaaggcttctctgtttcaaaagagatccgattaaatagttcatttgcaatgctttggacatcgcctagttccgtaatttttccagaggagattatagttgactctttgactactagagggcagtggcatttagctatgataactgtcccaagtcatctatcaattgaggcaactctttggtttgaaaattttacaggactagaagtttctcgcccaactccttcaattaacgtaatttggccatttgtaacaagaagatctaatcttgacgaagtcgtcgtagagcgagcaaaagaagtattgcttggtatagatcatcttcctgacgaccatcagtgtgctagaacgaaactcaaggcaactggtgaagaggaagagctatctgtcccaagcttaataggttccgagaaattctttcttttagaatcatatcattcgaaattcattgcgctgttttttgacgatgattcgaatacacatagatatttatcaatagagaaaaataacaacttagcagtgcaatatcagcatcagccaacagttgatattgcacttacaaatgatgagcaagatatacaaatattttctcttcacattgcagagtgtgaaagtttaatttctaacctcttgaagcacgggtatcgattttcttacatctcgatgcctaaaggtgttgaaggtctagttaaagtatatccatcagagaagactgagaaaattcttgtagctggaagtgagccagctccccatgatcataaagcgctgctacttgaagccgatgtaaacaaccacatttctagcttgatttctgaccaatttgtatctattgaggtagattttggtggttatggcaatctgtatttaaccagttctagagattgtgataatgaatgcagaggggatgagactatagatttacctccatgtctgagaggtaggttattgtttttcctatcacaaatgtcttcagcgcccgtaaataactttcttacagatgaagagctaattcgagtgttcgaaagtacaaagccgaaacttggtttggtacctcattatcgttcgataaaaaatgagattcttcgttgtgggagtaacgtaacaataggcaataattcaaaatga

SEQ ID NO: 27643 - DNA, 1890 bp, Vibrio cholerae CT 5369-93
atgaactacgagtttagtaatgcagctaaagaaagaataggatcgattgctcaagcagagattactagtttcattgaagagttaccccaaagcattttaagaactgtttttaaagcattacctaaggtggatggttttcgtcgcaatagcatagcggaattcaaagagaagcaaaaacggctgatcatgcacttgagtctaaatgggcgttcaaaggttaacccagaatggactgtttttagtaaaatatgggagttatgggcaaaagaaaacctaggtatagatttacctgaagtggatgaaaaacttgatgattatcagaaggctttgtctttttttaataagttgagcgagagttatccaaatctttcacaagaagatgctgacaagttgtacaagtttagtggatttgttacacatgagcaggtaaacagtctgattactagttttaagaaaaaagctgatattaaacgtgaccagatggtcatggagttaccgcagcgtctacaagaactagaaaataaagttaagaaaatagaaagtagttgccgtgagtttgaagctctttacttggaatcagaagtagaatttgactctgttgagaacaagctaaaccaagtaaaagctttatcagagcaaacaacggaggggttaagcgttgtttctcttatgctctcagaacatgaacggagtttgcgagaagttgaaggtcgtttaggttctgtaggaacattgcaaagtacgttagaaaaggacgtatctgtactttcagaaatgaatacaaggttagagcagtggttaaaaaatatagacggtgagttaaaaagacaatcacaaaatatccctgagatggataccctgtttgggattattcagaaccttgaatctcgtatcgataatttagttcaaacagacgaattagttagtagtcgtcttgatgaaatatccagtaaaattagctatatagactcactttgtgacggtgagtactctcctgacgcatcaagaaaaaccatcatttctggcatgaagttgaaagagccagaagatgaaactgtatacttaagctctatatcagaagccagtgaagctttggccacaaatcttcaagttattggtttcactaaatcggaaacaaattcactatctcgtaaaattctagcaggagtactttccggtcaagttcttcagttttctggctctctagctgatttagcttgtgatgcagtttccgcagctataggcggctctagagtgttggaatggactattcctgtaggtttgatagatagcattagctctgaggaatttatctctagtagcgcctctaataaaacatgttgcgctgtgatgaaaggtgtaaatttgtcagcttttgaggtttatggcgctcctattcgagaagaggtgattcgtagacaatgttttttaccatgtttctcacaagcaatttttctagcaactatcaaacaaggtcctgctgtttttccgaatgggggctctatagccgaaattgggcctttatttgatacagacgagcttcgcatgcgacttagtccccctaagagcaataaatttgtgtttgggaaacttgattatgaatcgatgctaaatgaaatagataggaatgtgtcggcaaatcaagaggatttggatgaagtattagaagatgcttgctttcatggcgggaacttatggtcccgctgtgtttcaagagcttacaaagctttacgcagtgtgccaggaggcgacgaagtaacagacttacatgccattttgtcaaattgggcattgccatgggctattgttagtggaactaaaacagatggcatagaacgagttctggaaaaagaaagttcaactaaaggccacgagtcaatggttcgatag

SEQ ID NO: 27644 - DNA, 1032 bp, Vibrio cholerae CT 5369-93
atgaagttatcttcgttatcaaaaaatgccacactagactttctagctcgccagattaattgtccgttggatgatagaggcagagatatatccatagtttcagaatgcttaagaaccatgctctttctccattctcttggatctgaggatgattattataaaggacctatatctacaatacagttgacaagagcagtcaaagagaagttacaagtcctttttgagtatggacaggcaaacaataacaatcaaatagatgtgtttaagctagcgaattgtctacaccgcttaggtgattttcataagtctagcggtgggcaatggacaattccccccatacatgcaattcgttgtggtgacgaatgtgctttgctcttaggtggtggaccaacctcgattttacctgagtccttgagttcacttgtatctacggtcggtaacttaagacttattgatcaacgagagtgtgaaaatctgattgaactctgggatatcgataaatggattcagtttaaacaccaaaacctaaatgattgggcaaattcgctgaagcacaaggcatcaaaaaatttggtggaatctgtatttgatttagggcaagtgcaagtttatctgaaaggaaggtggattaaatttgatgacttacccacggggattaatgatttccctatatgcagatttcacggttctgctcaattctcatacttctttggtgagttgatttctagtcgtttagagagaatttgctcaataacgagccaagaggctaggagataccgtttttatcgtgatgctgaggatggtaggccagtttgtgtcaatgcgaaatatatttcgaaaaatttaattcgtatgcagatagttaggccattacctatcgaagagtcaataattcaaaatcttggttggcaagttccggtagaagagggagagtacaacaaagctacttactacgagtttccaatagaagtagttccgattctcagagaagtactcgatagacttcgtatagtgttggcattggtagaataa

SEQ ID NO: 27645 - DNA, 5496 bp, Vibrio cholerae CT 5369-93
atggatagttcgacaaatcaaaaagtagctagtggtgttcatgaaactgtggctaatttgaaacgcagcctaaaacagtacattgaggcgcaatatcatattcgtaatgaatcacttgttgaagagcgaagtttattactagataaagagccaactattgttcaatcaccttacgtggaagctactcaggtttataaagttggaaagtcgtactcagaactggatatcccatttgctgtttccgagacgctaataaagttatctcaaataggcgttggtctgtatcctcagccatatgaacatcaatcacaagcgcttacatcttttttcagaaaagatggagcagacatagttgtagcaactggtaccggttctggcaaaacagaaagtttcttgatgccagttataggtaatttagctcttgagggagaggaaaggcctgaatcagccaacctacctggttgtagggcgatgctgctataccctatgaatgctctcgttaatgatcagttatcgcgcatacgcaggatgtttggtgatccccgtgcctccgaaatattgaaaaataagagaacaaagcctattcggtttggtagttatactgggagaactccatatcccggtagccgtactgcagctaaagacgagcaattcatcaagccactctttgagaacttttacaataaaataggtggggagtcgactataagagctcagctagagaaaattggccgctggcctagtaaggatttgagtggcttttatggtgctgaacttattgaacagaaaacttatgagagtggagccaagcaaggtaagctgtattcgaaaaaaaattggaatgaacgtctaattacgcagtcttctgatagagaactcatgactcgtcatgaaattcagactgagtgtcctgaactactcattactaactactctatgcttgaatacatgctaatgcgtccgatagagcgtgatatttttgaacaaacacgtctgtggctaaaaaatgatttacggaatgagttcattttggtcattgatgaagcccatatgtatcgcggaactggaggagcagaagttgctctcctcatacgacgtttatgtgctcgcttagatattcctcgtgaacgtatgagatgtattttgacaagtgcaagtttgggttccgttgaagacggtgttcaatttgcgtgtgatctgactggtttatctagtaactcctctcgtaaatttgaaattattcaaggaactccagaagagagaacagtaacacaagtttgcgattcctcaattgcaagtgtgctcgcaaagttcgacttggatgcgtttcagaatatagccaatgatctgaataatgcgctaatagcattgactaatctggcagtgaacttgggatggtcaacgccgccaggagattgtcctgaaaaaatcaaagattggctttttagtaacttgacagggtttggctcattggaaagcttagtgtctatcgtgtctggtaaagcggttcgattagacgaattgagtgagcaactctttagagatgtaccaaaagaaatatcatctggagctactgatacgttgcttgctttggggtgctatgcaaaaagactttctgatggaagggtgttaataccgacacgattacacttgtttcaccggggattacctgggctccatgcatgtgttgaccctgattgttctacgcgcttgggaactcaagaatctcctatattaggacgcctacatactaaacctcgtaggcagtgtgattgtttaggtaaatctagagtttatgagttgtttactcatcgagactgtggtgcagcatttcttcgaggctatgttagttccgatttgaactttatatggcacgaagccaatggtcccctaactgagaatggatcactggacttggttccgatagatattttggttgaggataaagttcaccctcgtggacgttatcgagaaatgtggctacatatgtctagtgggaagcttattgatacttgtccactagactctaatggttatcgaaaagtgtttattcccgatcggctagccaccggagagcctctactgtttgatgaatgtcccgtttgcatgcgtaatacaagcctgtcaaatggtgaaagctcaaagatcatggatcatgttaccaaaggtgaggctccatttactgcgttagtcagaacacaaatgtctaatcaggcccccaatagatctgctgatgccaaacatccgaatggtggccgaaaagtactaatattttcagatggcagacaaaaggcagctcgactagctcgtgatatacctagagatatagagttggatgtctatcgtcaagcaatagcattagcgtgtgttcgtttgagagaatgctctaaagagcctaggcctaataatagtctttacctagcgtttttgtccgttctatctgagcatgatttacaaatgtttgatggccctgatgccttaaagcttattgctgcaagaaatgagtttagccgtgactacggaggagaccttgaagaggctctagaggacaattttgagccttctgagccgccacctagtcgttataaagtagcattgctcaaacttctgtgtggtacttactactcgttaatcggtaccaccgttggcttcgttgagccaagcaaagcaaagtttaagcgattggttaataattttaagagcaaagggcttggtttatcggatagcgatgtctcagctctttcagttgcttggattgattctcaactaagagctttttctttcgattcttctatcgatttacatttgcgttacaaagctgcaagctactataaaccgacttgggggagtcgtggacgttttgagagggcatttcgtgatagcttaacgcaacgacttttttggtccgataatacaattgaagaggttgaaagtgtcttcagggagcaactgactctagagcaagacaatacattttttttgtcgcctaactctctagttataaatatagacctgaaccatatctggtatcagtgttcggactgtacgtcgttaatgccaatagtgctaaaggaagatatatgtgtttcatgtggaagtaatacagccatagcactagatccacgtagcgacacttatattaacgctagaaaggggttttggagagccccggtggaagacgcgttagttaatagaactcgactttcaactctctccgtagaagagcatacagcgcagttatcgaatagagatagaagcagtgttcattcaacgacagagctttacgaacttaggtttcaagatgttttgattgattctgatagtagaccaatcgatgttttaagctgtacaacgactatggaagtaggtgtagatattggttctctcacagcagtatcgttgcgtaacgttccccctcagcgtgaaaattatcaacaaagggctggtcgagcaggacgaagaggatcgtctgtatctacggttattacctattgtcagaatggaccacatgatagtcactacttccttaatccgcacaatattgtcgctgggccgcctagaacccctgaagtaaaagttgacaatgcaagaattgctactaggcacgttcactcgtatctaatacaaacattcttccatgagaatattgatttttctcataaaaggccgagtgatgagacttctgtattagagaaagctttaggcaaaacgcgagactttttctttggcagtatggatagcggtcttagtctactagcatttgagcaatgggtatccgttaaagtgctaaatgaagatggtgatttacgtaagtccatccttaattggttacctgcatctttatcaacgggatcgcataatctagagcagtggttgctgaatacagtgacagcttttatagaaaagctgaaatacttaggtaaagaaatccctcaagctattgatgtagataaggatgaaatcgctactgataatgagattgttgatgagttggagcaagaagaactcttggacttcttattctttcatgacttacttccaagctacgcattccccactagtttgagtagctttttagtagaagttttggagaaacaaaaaggtacatggaaggttaaaactgttcaaaaacctcaacaagccatttcaaaggctctcagtgagtatgctccaggaaggctaatagttatagataaaaaaacgtatcgatccggaggtgtttttgccgatatgcctccatatgaggttaaccgggctcggcctctatttgaggaagctaagaccctagtttattgcgaggactgctcttttgtacgagatccgtacataactcaggacacacaactaatttgcccagtttgctcggggaatctcagggaagaaaccatgatccagccggaagtgtttgggccggaaaaagctagatatctcccggaagaagatagggagcaggagattacttttgctacgatggctcagttccctcaaccggtcaatgagcaggactttgtttttaaaccttgtggtccaaacgctagctatacacatgaaattggtcaacgacttgtaacagttaaccgtgggaaaaatgacaatgaactaggtggattttccgtgtgtgaagactgcggagcagcttcggtttttgatgaacgttccaatttaagtggcgagcatgaacgaccgtacaaagcgctacactctaaagctacgccacaaaaatgcgctggtgaatttaaaagggttttcttggggcacaactttacgacagatttgcttttaataaggtttaagatatcggctcctttgattacagatacttctgatagcgtttcattgcatattctagaagattcaatgcatacaatagctgaagctcttcgccttgctgctagtagacataaacagttagacgtcgatcctgcagagtttggggctggcttcagagttgttcctgcccttcaaggcgaagatcgtttagtcgacctgtttctttacgatacgttatcgggaggtgctgggtatgcggaaatcgctgctaacaatttagatgaaatcttgtccacgactttggagcttcttgaaggttgtgagtgtgattcttcttgtacggattgtttaaaccacttccacaatcaacatctacaaacgaggctagatagatatttaggggcatcattattgcgttatgcaatttatggtgaaatccctcaaagtgctcattttagtgagcaagctagacagttgtctcagttatgctctttactagagctagatggttataaatgtacaatgggtaacactgagaagagtccagttatcgtttcttatgataatcaaaagttgtcactggggtgctttcctggattaattgatagggcgttcctctcgcatgcttgtcaagttgagccggattcaatgttgattaatgagtatttgcttaaatcgaatcagccagagatgcatttacgcgtaagttctagatttactcgctag

SEQ ID NO: 27646 - DNA, 1194 bp, Vibrio vulnificus
atgtctaacaacgttgtgagcgtcaacttaaaggaagctcaactaaaacgaaaacttcgagagcacctacattcacttggttttaccaaatctgaaaatggatccctcttggccccagggaatagtaaggaagttattcgctcactgcatcaagcccaaagaaaggaaaggcttgcagcaagtgatcattttattggaaaaaaccatgacaagttgtttaagtattttgcgtcaggtagtgagattattcctgagcgaatatccccagtattggaacgagttgattctcggacatggtcaggagacttgtttcgtttagcatctctaacatggtcagtgccagtttccagcggctttggaagacggctacgttacttagtttgggatgaaagtaacggcaaactgatgggacttattgcgattggtgatcctgtttttaacttagctgttcgtgataattatattggttggaatgcatcagaccgtagtgatcggctagtcaatgtaatggatgcctatgtattaggagcaattccaccatacaactcattactatgcggtaagctcatagctagccttttgagaacccaagaaatttatgacgattttagtcgtaagtatggttctaccactggattaatctctaaatcagagaaaaaagccagtttacttgctgtcacgacttcttcctctatgggacgttcttcagtctacaatcgagtaaggctgaacaatatggattatctcaaatctctaggttatacaggaggatgggggcattttcatatacctgaatggttgttcaaagagttgagagaatatttacgtgaaaaggatcatagatacgcagatcaatattcttttggtcaggggccaaattggcgattgagaacaacaaaggctgcattatctgcattggggttcaaagctgatttgctcaaacatggaatacaacgcgaagtcttcatatctctattagctcagaatagtgtagatatcctccaaacaggacaaggagtacctgatatatccaatctgaaatcttcgaaagcagttgctgatttagctcttcaaagatgggttatcccaagatctgaatgggacaatagttaccttaattggagggccagctctgttacagagttactgggatttaaatgtaaccaactgatagttaataagaatatggcgtaa

SEQ ID NO: 27647 - DNA, 1671 bp, Vibrio vulnificus
atggaatatgcggtaaataagcatactggaaaggtcgagttcgcggaacgggcaaatgtttttggtaaatacatttgccatgaatgcagaaaaccagtgaatttgagatctggaagaaagagaaaagcctattttgctcattggccgggttatggaacccttgaatgtgaaaaatttgtgccaggaggtgtatctctcagtgttacagaggacgaattttgcgctatatctaccatggctcgaatggaactgcgactaaagataccaaccgaaaaacattcttcttggtatctagaactgactgttcccccatgcagagagtcacatgccacagttataatagatgttgggggcaggtttcaaacactggacatgagaggcatgtccaaaccgagaaagttaacagccgagccaacaactgaaaattaccgaatagtaagctttacgggaagaccagatcctcaattcgttaacggtgttgtgcgagagtgtaatgctcttcgaccttccggagctacagtgtttagttcaacgctcagtagtgaaagacaaggcttctctgtttcaaaagagatccgattaaatagttcatttgcaatgctttggacatcgcctagttccgtaatttttccagaggagattacagttgactctttgactactagagggcagtggcatttagctatgataactgtcccaagtcatctatcaattgaggcaactctttggtttgaaaattttacaggactagaagtttctcgcccaactccttcaattaacgtaatttggccatttgtaacaagaagatctaatcttgacgaagtcgtcgtagagcgagcaaaagaagtattgcttggtatagatcatcttcctgacgaccatcagtgtgctagaacgaaactcaaggcaactggtgaagagaaagagctatctgtcccaagcttaataggttccgagaaattctttcttttagaatcatatcattcgaaattcattgcgctgttttttgacgatgattcgaatacacatagatatttatcaatagagaaaaataacaacttagcagtgcaatatcagcatcagtcaacagttgatattgcacttacaaatgatgagcaagatatacaaatattttctcttcacattgcagagtgtgaaagtttaatttctaacctcttgaagcacgggtatcgattttcttacatctcgatgcctaaaggtgttgaaggtctagttaaagtatatccatcagggaagactgagaaaattcttgtagctggaagtgagccagctccccatgatcataaagcgctgctacttgaagccgatgtaaacaaccacatttctagcttgatttctgaccaacttgtatctattgaggtagattttggtggttatggcaatctgtatttaaccagttctagagattgtgataatgaatgcagaggggatgagactatagatttacctccatgtctgagaggtaggttattgtttttcctatcacaaatgtcttcagcgcccgtaaataactttcttacagatgaagagctaattcgagtgttcgaaagtacaaagccgaaacttggtttggtacctcattatcgttcgataaaaaatgagattcttcgttgtgggagtaacgtaacaataggcaataattcaaaatga

SEQ ID NO: 27648 - DNA, 1890 bp, Vibrio vulnificus
atgaactacgagtttagtaatgcagctaaagaaagaataggatcgattgctcaagcagagattactagtttcattgaagagttaccccaaagcattttaagaactgtttttaaagcattacctaaggtggatggttttcgtcgcaatagcatagcggaattcaaagagaagcaaaaacggctgatcatgcacttgagtctaaatgggcgttcaaaggttaacccagaatggactgtttttagtaaaatatgggagttatgggcaaaagaaaacctaggtatagatttacctgaagtggatgaaaaacttgatgattatcagaaggctttgtctttttttaataagttgagcgagagttatccaaatctttcacaagaagatgctgacaagttgtacaagtttagtggatttgttacacatgagcaggtaaacagtctgattactagttttaagaaaaaagctgatattaaacgtgaccagatggtcatggagttaccgcagcgtctacaagaactagaaaataaagttaagaaaatagaaagtagttgccgtgagtttgaagctctttacttggaatcagaagtagaatttgactctgttgagaacaagctaaaccaagtaaaagctttatcagagcaaacaacggaggggttaagcgttgtttctcttatgctctcagaacatgaacggagtttgcgagaagttgaaggtcgtttaggttctgtaggaacattgcaaagtacgttagaaaaggacgtatctgtactttcagaaatgaatacaaggttagagcagtggttaaaaaatatagacggtgagttaaaaagacaatcacaaaatatccctgagatggataccctgtttgggattattcagaaccttgaatctcgtatcgataatttagttcaaacagacgaattagttagtagtcgtcttgatgaaatatccagtaaaattagctatatagactcactttgtgacggtgagtactctcctgacgcatcaagaaaaaccatcatttctggcatgaagttgaaagagccagaagatgaaactgtatacttaagctctatatcagaagccagtgaagctttggccacaaatcttcaagttattggtttcactaaatcggaaacaaattcactatctcgtaaaattctagcaggagtactttccggtcaagttcttcagttttctggctctctagctgatttagcttgtgatgcagtttccgcagctataggcggctctagagtgctggaatggactattcctgtaggtttgatagatagcattagctctgaggaatttatctctagtagcgcctctaataaaacatgttgcgctgtgatgaaaggtgtaaatttgtcagcttttgaggtttatggcgctcctattcgagaagaggtgattcgtagacaatgttttttaccatgtttctcacaagcaatttttctagcaactatcaaacaaggtcctgctgtttttccgaatgggggctctatagccgaaattgggcctttatttgatacagacgagcttcgcatgcgacttagtccccctaagagcaataaatttgtgtttgggaaacttgattatgaatcgatgctaaatgaagtagataggaatgtgtcggcaaatcaagaggatttggatgaagtattagaagatgcttgctttcatggcgggaacttatggtcccgctgtgtttcaagagcttacaaagctttacgcagtgtgccaggaggcgacgaagtaacagacttacatgccattttgtcaaattgggcattgccatgggctattgttagtggaactaaaacagatggcatagaacgagttctggaaaaagaaagttcaactaaaggccacgagtcaatggttcgatag

SEQ ID NO: 27649 - DNA, 915 bp, Vibrio vulnificus
atgctctttctccattctcttggatctgaggatgattattataaaggacctatatctacaatacagttgacaagagctgtcaaagagaagttacaagtcctttttgagtatggacaggcaaacaatagcaatcaaatagatgtgtttaagctagcgaattgtctacaccgcttaggtgattttcataagtctagcggtgggcaatggacaattccccccatacatgcaattcgttgtggtgacgaatgtgctttgctcttaggtggtggaccaacctcgattttacctgagtccttgagttcacttgtatctacggtcggtaacttaagacttattgatcaacgagagtgtgaaaatctgattgaactctgggatatcgataaatggattcagtttaaacaccaaaacctaaatgattgggcaaattcgctgaagcacaaggcatcaaaaaatttggtggaatctgtatttgatttaaggcaagtgcaagtttatctgaaaggaaggtggattaaatttgatgacttacccacggggattaatgatttccctatatgcagatttcacggttctgctcaattctcatacttctttggtgagttgatttctagtcgtttagagagaatttgctcaataacgagccaagaggctaggagataccgtttttatcgtgatgctgaggatggtaggccagtttgtgtcaatgcgaaatatatttcgaaaaatttaattcgtatgcagatagttaggccattacctatcgaagagtcaataattcaaaatcttggttggcaagttccggtagaagagggagagtacaacaaagctacttactacgagtttccaatagaagtagttccgattctcagagaagtactcgatagacttcgtatagtgttggcattggtagaataa

SEQ ID NO: 27650 - DNA, 5496 bp, Vibrio vulnificus
atggatagttcgacaaatcaaaaagtagctagtggtgttcatgaaaccgtggctaatttgaaacgcagcctaaaacagtacattgaggcgcaatatcatattcgtaatgaatcacttgttgaagagcgaagtttattactagataaagagccaactattgttcaatcaccttacgtggaagcaactcaggtttataaagttggaaagtcgtactcagaactggatatcccatttgctgtttccgagacgctaataaagttatctcaaataggcgttggtctgtaccctcagccatatgaacatcaatcacaagcgcttacatcttttttcagaaaagatggagcagacatagttgtagcaactggtaccggttctggcaaaacagaaagtttcttgatgccagttataggtaatttagctcttgagggagaggaaaggcctgaatcagccaacctacctggttgtagggcgatgctgctataccctatgaatgctctcgttaatgatcagttatcgcgcatacgcaggatgtttggtgatccccgtgcctccgaaatattgaaaaataagagaacaaagcctattcggtttggtagttatactgggagaactccatatcccggtagccgtactgcagctaaagacgagcaattcatcaagccactctttgagaacttttacaataaaataggtggggagtcgactataagagctcaactagagaaaattggccgctggcccagtaaggatttgagtggcttttatggtgctgaacttattgaacagaaaacttatgagagtggagccaagcaaggtaagctgtattcgaaaaaaaattggaatgaacgtctaattacgcagtcttctgatagagaactcatgactcgtcatgaaattcagactgagtgtcctgaactactcattactaactactctatgcttgaatacatgctaatgcgtccgatagagcgtgatatttttgaacaaacacgtctgtggctaaaaaatgatttacggaatgagttcattttggtcattgatgaagcccatatgtatcgcggaactggaggagcagaagttgctctcctcatacgacgtttatgtgctcgcttagatattcctcgtgaacgtatgagatgtattttgacaagtgcaagtttgggttccgttgaagacggtgttcaatttgcgtgtgatctgactggtttatctagtaactcctctcgtaaatttgaaattattcaaggaactccagaagagagagcagtaacacaagtttgcgattcctcaattgcaagtgtgctcgcaaagttcgacttggatgcgtttcagaatatagccaatgatctgaataatgcgctaatagcattgactaatctggcagtgaacttgggatggtcaacgccgccaggagattgtcctgaaaaaatcaaagattggctttttagtaacttgacagggtttggctcattggaaagcttagtgtctatcgtgtctggtaaagcggttcgattagacgaattgagtgagcaactctttagagatgtaccaaaagaaatatcatctggagctactgatacgttgcttgctttggggtgctatgcaaaaagactttctgatggaagggtgttaataccgacacgattacacttgtttcaccggggattacctgggctccatgcatgtgttgaccctgattgttctacgcgcttgggaactcaagaatctcctatattaggacgcctacatactaaacctcgtaggcagtgtgattgtttaggtaaatctagagtttatgagttgtttactcatcgagactgtggtgcagcatttcttcgaggctatgttagttccgatttgaactttatatggcacgaagccaatggtcccctaactgagaatggatcactggacttggttccgatagatattttggttgaggataaagttcaccctcgtggacgttatcgagaaatgtggctacatatgtctagtgggaagcttattgatacttgtccactagactctaatggttatcgaaaagtgtttattcccgatcggctagccaccggagagcctctactgtttgatgaatgtcccgtatgcatgcgtaatacaagcctgtcaaatggtgaaagctcaaagatcatggatcatgttaccaaaggtgaggctccatttactgcgttagtcagaacacaaatgtctaatcaggcccccaatagatctgctgatgccaaacatccgaatggtggccgaaaagtactaatattttcagatggcagacaaaaggcagctcgactagctcgtgatatacctagagatatagagttggatgtctatcgtcaagcaatagcattagcgtgtgttcgtttgagagaatgctctaaagagcctaggcctaataatagtctttacctagcgtttttgtccgttctatctgagcatgatttacaaatgtttgatggccctgatgccttaaagcttattgctgcaagaaatgagtttagccgtgactacggaggagaccttgaagaggctctagaggacaattttgagccttctgagccgccacctagtcgttataaagtagcattgctcaaacttctgtgtggtacttactactcgttaatcggtaccaccgttggcttcgttgagccaagcaaagcaaagtttaagcgattggttaataattttaagagcaaagggcttggtttatcggatagcgatgtctcagctctttcagttgcttggattgattctcaactaagagctttttctttcgattcttctatcgatttacatttgcgttacaaagctgcaagctactataaaccgacttgggggagtcgtggacgttttgagagggcatttcgtgatagcttaacgcaacgacttttttggtccgataatacaattgaagaggttgaaagtgttttcagggagcaactgactctagagcaagacaatacattttttttgtcgcctaactctctagttataaatatagacctgaaccatatctggtatcagtgttcggactgtacgtcgttaatgccaatagtgctaaaggaagatatatgtgtttcatgtggaagtaatacagccatagcactagatccacgtagcgacacttatattaacgctagaaaggggttttggagagccccggtggaagacgcgttagttaatagaactcgactttcaactctctccgtagaagagcatacagcgcagttatcgaatagagatagaagcagtgttcattcaacgacagagctttacgaacttaggtttcaagatgttttgattgattctgatagtagaccaatcgatgttttaagctgtacaacgactatggaagtaggtgtagatattggttctctcacagcagtatcgttgcgtaacgttccccctcagcgtgaaaactatcaacaaagggctggtcgagcaggacgaagaggatcgtctgtatctactgttattacctattgtcagaatggaccacatgatagtcactacttccttaatccgcacaatattgtcgctgggccgcctagaacccctgaagtaaaagttgacaatgcaagaattgctactaggcacgttcactcgtatctaatacaaacattcttccatgagaatattgatttttctcataaaaggccgagtgatgagacttctgtattagagaaagctttaggcaaaacgcgagactttttctttggcagtatggatagcggtcttagtctactagcatttgagcaatgggtatccgttaaagtgctaaatgaagatggtgatttacgtaagtccatccttaattggttacctgcatctttatcaacgggatcgcataatctagagcagtggttgctgaatacagtgacagcttttatagaaaagctgaaatacttaggtaaagaaatccctcaagctattgatgtagataaggatgaaatcgctactgataatgagattgttgatgagttggagcaagaagaactcttggacttcttattttttcatgacttacttccaagctacgcattccccactagtttgagtagctttttagtagaagttttggagaaacaaaaaggtacatggaaggttaaaactgttcaaaaacctcaacaagccatttcaaaggctctcagtgagtatgctccaggaaggctaatagttatagataaaaaaacgtatcgatccggaggtgtttttgccgatatgcctccatatgaggttaaccgggctcggcctctatttgaggaagctaagaccctagtttattgcgaagactgctcttttgtacgagatccgtacataactcaggacacacaactaatttgcccagtttgctcggggaatctcagggaagaaaccatgatccagccggaagtgtttgggccggaaaaagctagatatctcccggaagaagatagggagcaggagattacttttgctacgatggctcagttccctcaaccggtcaatgagcaggactttgtttttaaaccttgtggtccaaacgctagctatacacatgaaattggtcaacgacttgtaacagttaaccgtgggaaaaatgacaatgaactaggtggattttccgtgtgtgaagactgcggagcagcttcggtttttgatgaacgttccaatttaagtggcgagcatgaacgaccgtacaaagcgctacactctaaagctacgccacaaaaatgcgctggtgaatttaaaagggttttcttggggcacaactttacgacagatttgcttttaataaggtttaagatatcggctcctttgattacagatacttctgatagcgtttcattgcatattctagaagattcaatgcatacaatagctgaagctcttcgccttgctgctagtagacataaacagttagacgtcgatcctgcagagtttggggctggcttcagagttgttcctgcccttcaaggcgaagatcgtttagtcgacctgtttctttacgatacgttatcgggaggtgctgggtatgcggaaatcgctgctaacaatttagatgaaatcttgtccacgactttggagcttcttgaaggttgtgagtgtgattcttcttgtacggattgtttaaaccacttccacaatcaacatctacaaacgaggctagatagatatttaggggcatcattattgcgttatgcaatttatggtgaaatccctcaaagtgctcattttagtgagcaagctagacagttgtctcagttatgctctttactagagctagatggttataaatgtacaatgggtaacactgagaagagtccagttatcgtttcttatgataatcaaaagttgtcactggggtgctttcctggattaattgatagggcgttcctctcgcatgcttgtcaagttgagccggattcaatgttgattaatgagtatttgcttaaatcgaatcagccagagatgcatttacgcgtaagttctagatttactcgctag

SEQ ID NO: 27651 - DNA, 1215 bp, Yersinia intermedia
atgcataaagatccctctatagtgattaatgttaacccgcgtgaagctaaactaaaaaaaaaattgcgggagcatttgcaatccttaggatttacaaaatctgatgccggagcgttacaggcccctgggaataccaaagatataataaggacccttcatagcggccagcgatcagaacggctttttgcaagccaaaatttcatttcgcttaagtcgacaaaattgatgaaattttttgcatccggtaaagacgttgatccacagaagatatcgcctgttcttgagcgtgtatcatctggaacttggcaaggcgatctgtttagactagcggcattatcatggtcagtacctgtttcaagtggatttggaaggcgtcttcgttatcttgtttgggatgagaataatggaaaattaatgggactaatcgccattggtgatcctgtgtttaatcttgcagttcgagataagttgattggctgggatgctcatgacaggagctctcgacttgtcaatgtcatggatgcttatgtgcttggtgctcttcctccctataattcacttcttgggggaaaattgatagcttgcctgcttcgtagtcgcgatctttacgatgatttcgcaagagtttatgataatacggttggtgttatatcccaaaaaaagaaaaaggcacgtctcttggctatcactactacatcgtcaatgggacgttcatcagtttataatcggttgaaactcggcggagttcagtatttaaaatcaattggttatactggcggctggggccattttcatattccagatagcttgttcattgaattacgtgactatctccgtgacattgatcatacctacgcagatcattatgcgtttggaaacgggcccaattggcgcttgcgtacaactaaagcggcgctaagtgcgttaggttttagggatgatttgatgaaacatggagttcaacgagaggtattcattagtcagttagctgagaatgcaactagtatcctgcaaactggtaaaggtaaaccggaacttacttcgttgctttccgtaaaagagatagcagaatgtgctatggaacgctggatggttcctcgatcgttacgcaactctgagtatcgtcattgggaagcaagtgatcttgctgatttacttagtaatcgggcgttaaacttgaaccaaatttcagagaaaataaagatagttagctaa

SEQ ID NO: 27652 - DNA, 1398 bp, Yersinia intermedia
gtgatctcaactgaaagaaagatccggggatggtcattagagctagtgttacctacatgtaatttatgtcgagctaagatcacccttgatgtgggggggagaaaccagacgattgatatgagtggtatggtaaagcgccgacagattggtgctgagctttcagttcagccttaccgtataatttctttttctggtgatcctgatcctgcgtttatttcggaagtcgaaatggagtgtcagggactcccttctgtggggggagctgttttcacagccttgggaagtggggcatcagggggatttcctcttgctcaggagttaagatgcactgatacatacgcttttctttggcagcagcctgtacagcctgattttccggatgaattggtaatcgaaagactagtttgcagacagggatggcatttagcgcttgttattattcctgaaatcccttcttccgaatgtgctctatggctccattttttcactcggctccctattgttcctgctagatcctctattacagctatttggccgttcttaactaaaaattccagtgttaatcagatcgaatgtcttcaatcgaatactgtgttattgtctgcgaatatggtttcatcgacccaaggtgttgggccgactatatatgcgcaaggttcctcctcgatcctatctgctgtagggatagaaaagtcacctgcattctttactcttaaccctgggcacagtgaattagttgggatatctgataccagcaatcaggatataaaattatttctctctttctcgtctaatgttgaatgtattaacaagtatccttcagtagatttggtttttactaaacaggacggagagaaagaaattgtttcgttacatgagcggagatgtgccttagtcacaactgaggcaagatttctaggacataaattagaatatctgtcgatgcctttaggagcagaaggattagctaaaatagaatcactcactgggagtagctgtatcaagcttgtttcgagtgaaaatattgcgccccatgataagagtatgcgtttgttacaacctgattcttttttcaaacttgctatttgttttgcagatccaacatatcacttggaaatagaatttagtggcctagggacattatatctttctgctttatcacaattggcctcaacagtcggtacaaataaagaattatctcccatcctacgttcaaggctgttcagtttcttatttcagatgcgtattataacgccaaatcttgttttaaatagtgacgatttttcgttagttgaggcattgaaacgtttacagcctgaaacacaccttttaccccattaccgcgcactggtaaaggaagttattaccagcggatttgaatttaatcgcttgagataa

SEQ ID NO: 27653 - DNA, 1884 bp, Yersinia intermedia
atgacttacaaatacagccaagaggcgaaggaacgaatctctaggttaggtcaatcggcagttatcgaatttatcgaggaggtttttcccgcttctcgtcgcagtgtttatagtattatgcctcgagttcaaggttttagatcggggcatgcagcagaatttaaggagaaacagaaacggcttatagggcaaatgttccagactaactcgtcccctgaagaagtcaatgcatggaaaggttttagtcttctttggaaattttgggctgaagaacatattggtaaaccattcccttcttctagtgactctaaaacactcactgattctggaactgctttttttgggaaacttgcggacacttttcctaaagtggcaagagaagatattgaacgtttgtttattttcagcggatttgctgatgattcaaagattacagaagcatttggactttttcgaccagcgaccttgcttgctcgtgacaatgtagttgatgcactacctattcgtttaggggagcttgcagagcgtattgatgccgttggaatgactgttgtggatactgggaaaagtattaaacgccttgaatctacaactagtttactttccgtagagttaaataaatccataagagatactagccttaatttaaatctaattactgaactacaaaatttactaagtgtgcaaacaaaacgttctgatactctaatgacggctattaatgaactatatgtttttagaaaaggatctaatggcatcatagatgctctgaaatccaaaatagatgtttgtgaattaggtataaatgagttttctttacgtgataaaatactaaataatttagccgaagaagtttcggaattacagggtgcactccacgctatatgcgtaaaggaaaatgaaaaagctaatttaattgatgagaacggtcataatgaacttgttgagaaaattaactatctcgagagtcgtataattgaaaatgattcgagtcaaactacaggtaaatatactgggttttatgaaaataaatctttgtttccatgtgaaaaaatattatcacatgatgatgcatttaatatgattgcatcaaatcttcaggctgttggcttgactaaaagttcttcttttatcgtagcacgattaacattagctgcatttatttcaggacaaatagttcagttctgtggttctctggctgatattgttgcagatgctgtcgctactgctgtaggttattctaattatcatgagtggcgagttcctgtaggtcttgtttctgatgagatcgcgtttgattttattgaatctaaagctaaatcatctcactgtttggtattgagaggagccaatctttccgcgttcgaaatctatggaacagcgatcagagatattgttgttcagcgtcaactatataaaacaagttacgaccaccttgcactaattgcgacttggaaacaaggacccgctgtatttcctgatggtggtatgttgactgagttaggaccggtgattaatacggacacccttaaaatgcggggggtatctgctaatttacctgtgctgaattatggttgtttagcacaggggaaatgggctgaaattgaaggcttaaaatccgatattattggtgagaatatggatgaattgaaatatttattggatgagactggatttgatggaggtattttgtggcgaaggatgatcaataatttttatacttctcttatgaaaatccccggtggaaattatatttatgaccttcattcagtattgttcttttatactctcccttgggctaaggctaaaggtggtcccgttaaggaaatcgcggacattgctgctcgtgaattaaaagagttcagcgacaaaatgtcggtttaa

SEQ ID NO: 27654 - DNA, 1044 bp, Yersinia intermedia
atgtactggagggcggtatcacaagaagaggctcttaaaatagtctcggctgctataaattgccagtttactgatgaggggctgagaatttcaacgttgtccgagtgtttacggagtgtattgcatcaatattctgtatcagatactggggaggggagacaaagtgtagcatcgcttcgactaagcagtgcggtaaggcgtaagcttgtgcctttgtggccagagcttacagatactggtgatgctatccatccgggcattatggctatattggacagtttggcggaattgggagatatgattaggttagagggcggtaagtggctgactgcccctccgtatgcaatacgcactgataacaatatggcaatccttattggaggagacccaacaggttcgctttcaccagatgtggttgcaaaggccatggtacgacttcgtttggtcgatcaggtagcttgtgaaggtaaagcggagctctgggatgccaatgagtggattggtgccccaatggaaggcaatgaaatgtggtcattaaaattattggataaaacgatatcccggtttactgatgctcctaatgatgttggagaagctacagcatatgtgcgccatcaatggatcaatttgtcagaactaccttcccaagagaaggggatgtacctttgtagaatatttattggaaccggtatttcatattttttaggtgagtttattacgggacggctatgtagaatgagtgctattgaatcttctgacgatgttagaaggctccgtttccatcttgatatgaaagaaagttatccgttgaaagtgagggtcaatatatttcacggattagcaagaatacgattagtacgaaggttaccaagaaaagaatctaaggtgcttctactaggctggagagagtctggtcctgaaggtgagcattcagggataacgtaccatgtatttcctgaagaagtattaccaatagtacgtagcgcttttgaggggctaggtattatttgggttaatgaatctatgcgacggaatgaaaaatga

SEQ ID NO: 27655 - DNA, 5508 bp, Yersinia intermedia
atgattaataaaaataaattaactgagcgttctggcatacacgaaactgcgaaaagtttagcagatagcctaagacaatatatcgaggcgcagtatcatatccgtgatgaaggattgattggcgaacgccgtgcgctattgcaacaagacgaaactattgcacaagttccttatatagaatcaacacctgtttatgagcccgggatgccgtacagtaaactccctattccccaagcggcaagtaatgtattgactcagttatcgaaaatgggggttggtctttacccacaaccatatgaacatcagtcacaggcgcttgagtcatttctggggaatgatgcatctgatctaattattgctacgggtactggttccggtaagactgaaagtttcttaatgccgattattggtaatttggcgattgaagcaacggagagacctcaatcggtatctcttccaggttgcagggcaatactattgtatccaatgaacgcattggtgaacgatcaactagctcgtatcaggcgtcttttcggtgattctgaggcatctaaggtactgatggctggaagatgttctcctgtacgctttggtggttatacgggaagaactccttacccaggccgacgtagttctaaacgagatgaactgttcataaaacctcttttcgacgaattttatagcaagctcgcagataatattcccgtacgtgcggaacttgagcgtattggccgttggccaagtaaagatcttgatgctttttacgggcaaggtgcatcccaaactaaaacctatatctcaggtaaaaaagcgggaaagcaatttgttgcgaacaattggggggaaaggttagtcacgcagccaggtgatcgtgaactaatgactcgacatgagatccagcatcgatgtccagaactgctgataacgaactactctatgcttgagtatatgttgatgcggcctattgagcgtaatattttcgaacagaccagagattggctcagagcagactcccgaaatgaacttatccttgtgcttgatgaggcgcatatgtacaggggggccggaggagcagaggtagctcttcttattcgtcgtctttgtgctcgtttggatattcctcgggaacgcatgcgttgcatcttgaccagtgcgagccttggttctatttcggatggtgagcgttttgcccaagacttaacgggcttatccgaaacatcttcacggaaatttagagtaattgaaggtacacgagaatcgcgccctgtcgcacgtgtggcgacaaacaaagaggcggaagtactggccgatttcgatctgaattcatttcagtgcgtggctgatgatctggaatctgcgtttgtggcaatagatactttcgctgcacaaattggctggcaaaaaccgacaataaaagatcatattacactacgtaattggctgtttgataaccttactggttttgctcctcttgaaacgctcattgaaatagtttctggtaaggcggtgaggttggatgtcctaagtcaaaaacttttcccaaactcccctcaggaaattgcggtgcgagctactgactcactactcgcattgggttgttatgctcagagaaactctgataatagagtgctaattccaacccgtatgcatcttttttaccgggggcttcctggcctttatgcttgtatagatcctgagtgtaatcaaaggttagctaatcacggcggaccaacaattcttggacgcctgcatacgaaaccattaaatcattgtacatgtgcatcaaaagggcgaatctatgaattactcacccatcgtgattgcggtgctgcctttattcgtggatatgttgactcggaaatggaatttgtttggcacaagcctaatggaccattatctgagaagggggatattgaccttgttcctatagaaattttagtcgaaaaaaaacctcatccacttagtgattatcaagacagatggctacatattgccactggacgcctttttaaacagtgccctgagaatagttctgggtatcgtaaagtttttgtgcctgacagggttaagtctgattcggaaattacattcgatgagtgtcctgtctgtatgcgtaagacaagaagcgatcaggatgaaccttctaagatcatggaccatgtgactaaaggcgacgcacctttcaccactttagttcgtacgcaaatgtctcgtcagcctgccagtcgtccaaccgatgtcagacaccccaatggtggtaaaaaagtacttattttttctgatggtcgacaaaaagcagccagattggctcgggatattcccagagatatagagcttgacttgtttcgtcagtccattgccctcgcttgttctaaactgaaaatgatcacgcgagagccccgacccgcgggggttctttaccttgcttttctaagtgtcctctctgagcatgatttactaatttttgatggggaagattctcggaaggttgtagctgctcgtactgagtttgatcgcgattatgacagcgatctggagcaagcctttgatgatgatttcaggccacaggatccaccaccatcccgatacaaaatggctttgcttaagcttttatgtagcaactactattctctttcgggaactactataggttttgttgaaccattaccggctaaaaaagaaaaattgtggaaggctgttcaggctaaaaacatcaacattgagaacaaagatgttcatgctctggctgttgcttggattgaaacattactcactgaatttgctttcgatgagtctattgattcggcattacggagtaaagcggctggtttttacaaaccaaactggggcagcaaagggcagtttggaaagacccttagaaaaacacttatgctacgtccggctatgggggagttttcagtaaaagccttagaggaaatcttccgtacccaattggcatcagaaaaagatggagtgtggtttctttccccgaactctcttcgcttacaagttgatctttcccatatctggaaacaatgtcctgactgtacggcacttatgccatttactttagagcattctatttgtcttgcttgcggtagtggtaatgttaaatctgtagctcctctggaaagcaattacattaatgcccgcaaaggattttggcgttcgccggtaaaagatgcgttggtttcaaattcgcgacttctaaatcttagcgttgaggagcataccgctcagctatcacacagagatcgttccagtgttcatgctactactgaactctacgaactgagatttcaggatgtccttatcaaagattccgacaggcctatcgacgtgcttagctgtactactactatggaggtaggcgttgatataggttctctggttgcggttgcattaaggaatgtcccgccacaacgagagaattatcagcaacgagctggccgggcaggtcgtcgtggttcttctgtttcaacggtggtgacatattctcaaaatggcccccatgacagttattattttcttaatcctgaacatatcgtcgcaggacctcctcgaacgccagaagttaaggtgaataaccctaaaatagccagaaggcacgtacactcttttttagttcagacttttttccacgagttaatggagcagggggtttataaccccggagaaaaaacatctatgttggaaaaggcacttggtacaacacgagagtttttccatggtgcaaaggatacaggtctcaacctggatggtttcgataattgggtgaaaaaacgtgttgtgtccatgaatggtgatctgagaagtagtgttgcggcatggcttccttcagttcttgagactgacggtctttcccttggagaatggtttgctaaggtatcaaaagagttattgaatagacttcacgagctggctgatcatgttccactgcctgtcgttcttgcaggtgaagaaaatgataatgagaacattattggagtgaattttgaacaagatgagttgctcgaattcttattttatcatggcctattaccaagttatgcatttcccacgagtctctgtagtttcctagttgaaaaagttgagaaaaatttcagaggtacctatgaggttcgtacagtacaacagcctcaacagtcaatttctcaggctcttagtgaatatgctcctgggcgattgattgttattgacagaaaaacctatcgctcaggtggtgttttttcaaatgcattgaaaggcgaaattaaccgggccagaatgcttttcaataagcctaaaaaatttgttcattgtgataagtgctcttttgttcgtgatccctataagtatcagagtgataacaacatttgtcccatctgcgatggcatactgaaagaagagataatgattcagccagaggtatttggggcagaaaatgctagagaacttaatgaggacgatagagaacaggaaatcacatatgcaaccgtggctcagtatccacaacctgttgatcctgaagattttaaattcatggtgatcgggaaacatattctttttacccacgcaatagaccagaaactggtgacggtcaaccggggtaagaatgaggggcaatccagtggtttttcagtatgtactgagtgtggtgcagcttctgtttttgattcctactttcccgcaaaaggggcgcataaaagaccttataaatatatagaaactaaggaagcatcacagttgtgctccggcgaatataaacgcgtttttcttggacatgatttccgtacggacttgcttttattaaggttaacagtagcgtccccacttgtaactgacacttcaagtgcaattgtattgcggatgtatgaagacgcattatactcggttgctgaagcactccggcttgcggctagtcgtcataaacaattagatctcgatcctgcggagtttggttccggattcaggatactgcctgctgtaggggacgatgcccagacattagatatcttcctgtatgatactttatccggtggcgctggttacgctgaagtagccgccactaatctggacgatattcttacagcaactcttgaactcctggaaggctgtgaatgcgatacgtcctgtacagattgcctcaatcattttcataatcaacacatccaaagccgtcttgacaggaatttaggtgcgtctttgcttcgttatgcattgtacgatgaggtgccatgttgctcttcatctatcttacaagtagataaactttcacaattaagggctagcttggaactggatggtttcaatagttcggcagaggggggacaagatgcgccattgattgtcgggttaaatggtcgcactattgcccttggatgctatcctggcctcattgataggcctgatttcaagcataatgtctgtaacgcaaagaatgtcgatgaacatttggcactgaatgaatatttgcttcgctcgaatcttcctgaagcacatcaaacagttagaaaacttttacgataa

SEQ ID NO: 27656 - DNA, 5676 bp, Achromobacter sp. 2789STDY5608612
atgctggagaatggccccctagagccactgtcgttcgaagggagacgtgcattcgccgaactcgcgctatctggcttgttcgaaggccgcccagctgacggcgaaatccagcgtaggtctgaatacccgccgtaccaacatcaggtgcagatgctcaatcgaggaatccgcccgggaaagcctgcgatcgttacctctggcacaggctccggaaaaacggaaagcttcatgctgccggtgcttgctgcgatatccaatgaggcggtcaaatggcctaagccggatggcaattacttaggtgaggacggccagtggtggagaaaaaacgagacagattggcgggcgatgcgtgcaggcgagcagcgtcggcctgctgtgcgtgcattgattctgtatccgatgaacgcgctggtcgaagatcagatggttcgattgcgcaagacactggattcagacgaggcccgctcggtgatggacgaaaggttctcgggaaaccgtgtgttctttgggcagtatacgagtgctgttcctgtcacaggctaccagaagcaccctaggctggcggatgacccggacgagaaaaagcgccgtaaacgacgcctggaaaaactgcgcgttgccctccgaagagctgaggagaaccaagccgctgcgcgggaacacgatgcgcagaaggcggcgtctgaaaaaacccgctttatctttcccgctatggacggtggtgagatgctgtcaagatgggacatgcaggacgccccaccagacatcatgataactaacgcgtcgatgttgggagcgatgctgtcgcgagaggtggaggatccaatcttcaagcgcactcgcgagtggttggctgaaaacgacgactcgtacttctatctggtgtttgatgagctgcacttggtgcgtgggtcggctggcaccgaggtggcgtttttgacaaaaaccttgattgacaggttggggctcgccgacccggggcatcggcacaagctgcgcattctagcgtcgtcagcctcgatgccaatggaggggcaagacggccagcgctcaaggcagtatctacgggacatgtttgcgccgtacggtaccagtacggggccgggcgaccgtgggacggatagcgccgacttttggtcagaatgcgttatcaagggcgtgccaaacatcccgatatgggatcgcggacggatcgaccccaccccgttcgaatcactcctcaaagctgcgctcgacgcgcgtagcgatttcgtgccccaagtcaagcgcagcgcagccttaacgacagcagttgaagcggctgccgctgcgctatctgtgggcggaacctccgaggatgagcgtgtgagcaacctggcggaggctgctgcggccgctcttaccggagcgtgtcgcgagggagagagtgtgcgtgcgactgccatatctgagctgggcgtgcggatttttcgggagggagccacggacctcgccgctgcactgcgcggtctgacgctcgcgcgagcactaccggagtctagagtctggaacacacgaattaagcccgcgaccccgtcatttcgcgttcacacgttcattcgcaacattgaagggttgttcggtgcgcctaggccgacgtttggtggcgcgacctttgacgatctgacgactgaacggggcctttcgcacgctccctcctccgctggcgacaaacgtggaagaagactgtttgagcttctttactgcgaggcgtgcggcgatctgctgattggcggccagcgcggcgagcgaaaactcaactcgaactcgaccgagatgttgccatcgtctggaaatctagaaaacttgcccgagcgcgccgcgagcgagtactacgatcagatgtccttcgaggagttcgcggtgttctggcctcgaagacgacagccgatgctgcctgatagagactacgaccattgggagctagcctacctggatccgcactctggtgttgttacttgcggttcagacgtaccggatgggcacgtgggcggctatctctactttcaaaaggatgaggcggtcagcggcaagggaaacaggctcaagggcgggacaaagcgatcaaaaacagcgcagccgttctgctgccccaagtgcggtattgactattcacgtcgaccggcaagcaatcgactgcactcgccgattcgcgcgttccgcacgggcgtgtccaaggcgtctcagctggttgcaaccgagttgttcgagctgttgcatgcgatcggagcggaaccgaaaggaatttgcttctcggacagtcgccaggacgctgccaatcaagcgctggcgatcgaaaccatgcatttgcgagatctccgacgtgaggttctagtggcggccgcgcgtgcccgcatagagacccgtcaaaaggaatggctcagcgagaagcagttcaatgagatgattggacgcctttctcaagatggaaaaactactgaagtgactaagctcgtacagcgctatagcgcgcagacggcgggcggttctgtgcagtatggagatcgcaaggtcgcgttgtgcgaggtattgcaggacatggaaggtggaggacgtgtcggcgatctcgtctccgagttcgtgaagatgggcattcacccgttcgatcaaaacggacgtgcgacgttcgaaggaaagccatggcacgcactattcgaacgatccaacaattcggtcgagtatgcgggaacattgaatggagctgaaaaagccagcctcaccgccataattttaaggcagcagtacgagctgattgacgatgtaatcttcgcaaatacattcttcgcgttagaggagaccggcctggcttatccgagcttggccggcgctgctcatgacgacgagaacataatggacgcatggcttcgtgtattcgccggcgcataccgcgtgcgaaataaccgctactttaacgaggacgaagtgagggagtgggcaattggcactgacgttccgcggacgagccgggtgaggaaaatcgccgacaaagcgtacgtcggaggggacgccaccgcgaaactgaccgacgtaattaggcggttctcggaattgggtcatagaggtggaatgctcgatatcgcaaaactgtacttaaaggtcgccgacaagaatgaccgttattggcgttgccgcaactgcgaacgtgtccatctgcactctggtttggggctatgtactcgctgtggagagatgttggacaagaattccagtggtactgtcgaagagctatggcacggaaacttcctcggcaagcgtatcgtgcgaggagcggccgatggcgtccctcgcttccgtctgcgcgtcgaggagttaactggacagactgatgacttcgccgacaggcttcgtaagttcaaaggaatttttgtcaatggcgagagcgagaccgaacagcgcgcgagccaaatcgacatgctatcggtgacgacgacgatggaggtggggatcgacattggggcgttgcagagcgtatatcaggccaacatgcctccccaaagattcaactaccaacagcgcgtaggccgtgctggacgcagaggacaagcgttctcattcgtagcgactttctgccgcgggaggtcgcatgacgcgtactacttcgcgcacccgagagccatcacgggagatgctccgcccccgccctttctcgctgtcgagcacgacccgattccaatgcgccttctgcgcaagtgttggctacgtgccgccttccagcgactgcgcgacgagtgctacgcgagcggacagaaatatcctggcgatttgctggtcccgcccgatgtgcacggggagtatgtgacaacgcaggactattactacaacgctggtgcagggtggcgggaacgactcaagggggcgctggaagcaaccgtccatgagcgcgatcgcttcgtcgatatggcggtcgaaggagaacagcagactagactgctgactggctccacatccgataagctaatggccgagattgagtcgctccacgcgcatgcacccaatgcgccgattgggatggcaaggttcctagctgagtggggattgttgccgatgtacggaatgccaacccgagtaagaaacctctaccttgggatacgggacgcgagtggcgagaggggcgagtactcgtggtcaaccatggatcgggatttggacatggctgtgttcgagttcgcgccaggaaatgtgctagtcaaggataaagagcgacatcggatagtaggtttcactggtaaccttagcgatccaatacgaatggcgggtggatggaaagcccgggcggtgtctgggtggcgagagacacactcctacgtcgcgctttgcgcggcctgcggctcggcaaaatttcaggaagcgctgccgaccgacggctcgttttgcgatgactgcaaaaagcctatccctgttgattcgtttaacccttatgtgacgccggttgcgttccgcacggacttcaccccgtcgtcaggggatgaggaaaccgtgcggatgtcccagaggacagtagctaccgtgcttgaaatgggagtgcccgttgagcaagggaacatgatagtgcggagtggcgcgggtgcaataatcctgcagctcaatgatggccccccagaccacgaaggcaacggctcgctattcgttctcgacgaagttgcggatgtacgtgttccgcttggcgcaacgggtaaatacctgtctcaggttagcgaacaggcgattgaagcgagcgtgcggcaaaagggcggcaatcgctggccgttggacgtcagtggatcgatcgggtcgaaattcgggttggtgtcccgcaagaagaccgacgcggtctacctggagttgcagcaattcgactctcgtctgacgcttgatagagttgcgcggaggggcgagttttgcgatattgcggcccgagcagcggcggtaagcgccactcagatcttagtgcaacgtgcggcgctagagctcgatgtgtctgccgaggagttcgaggcgttagaaccgcggttgcgcgacggcaggcccatgctgcagatcgccgacgcgttgatcaacggctcgggactgtgccgaaggctcggcgaacccaacgtccctggcggtccgtcgtacatcaccgagattgttgacgcaattctatcgcgcacgaaccaatggcctctctcggattttcttgcatcatacggcgacgggggatctcaccagggacaatgcaagacgtcctgctatcgatgcatacaacgtttcagcaaccgggcgtatcacggcctactggactggcgcctcgggctgtcttatctgagagcattggctgatcctgagtatggttgcgggcttaattctggtgatgaccagctgcctgagctcgcaggctggcgcgagcgtgctcacacacttgccgaggacatcgtgtctatgcgtccaagctcgctaagtcacgaacggctctcacgctcaggattgtcgtgcatcatcgaacgttccagtggcgacgtatggcgttacgttgtgctgcacccgctttggcgaaaggatccagagacattgggcggaattctggggacggactttgttccgggaatgcttgcggtcgacacctataatctcgagcggcggccgctacaagaactggctcgcttacgccatgaacgtggctttggacgctcgaactcgtag

SEQ ID NO: 27657 - DNA, 1149 bp, Achromobacter sp. 2789STDY5608612
atgagggctctctatgagtttttctgtggtggcgggatggtgcgcgccgcaatgcgcgaagaatggaactgtttgttcgctaatgacattagtgaaacgaaagccgccgcttataaagtaaattgggggggcgagcatcttaaagtcagggatattgcccacatcaagccaagcgacttgcctgggcgggccgatttggcatgggcttccttgccgtgtcaggatttatctttggcggggaatggtgtcggactaaacggtgagcgaagtggcactttctggacattttggaagctaatgatggctctaaaaaaagagggaagaaatccatctttaattgccttggaaaatgtttacggcacacttactagtcatgaaggtaaagactttgagtcaatcgcaaaggctattgtgactgggggctatcgactgggcgcgatggtgatcgacgctgcgcgctttttgccacattcgcgacctcgccttttcattgtggccgtcgatgccagcgtcgctttaccggggcatttgctagctaatggtccatcgaaagtttggcatccgtcagggattgttaatgcgtttgagcgcatgccgcagagattgcagtcacagtggatttggtggaatctacccttgccggcgaataagcccaagggattgaaagatattatcgaagacagtcccaaggatgtgcaatggcattccaaagaggaaacgagccgattgcgcggcatgatgaccccaatcaatcgactaaaggtagaaggagcaatcgagctggcgtgtcaaactggcgagagggttgtgggaaccatttatcggcgaatgcgccaaggactccagagagcagaggcacgctttgatggcgttgcgggctgtttgcgcactccatcgggagggtcgagtctgcaaactgttattgtgataaacaaaaaaaatgttcgatctcgcctattgtctcgcagagaggcggcgcgcttgatgggtttggatgacgattacaagctccccgaaaggtacagcgaggcctaccatctcacgggcgatggcgtagcagtaccagtggtaaatcaccttgcgcagcacatttttaatcctatcatcgacgaaattaaggccttcgagttagctggtgaggctgcttaa

SEQ ID NO: 27658 - DNA, 1980 bp, Achromobacter sp. 2789STDY5608612
atgtgcctgaatgcggacttggataaccccgtcacggtaatccaagcggcggcgcaactggaaggcagaaagagcatctccgttggccttaaggaggcatacgacgactttgttcagtcgtattactcccagcgtagggcgattgctgaccatcggttttggcacctggtttcgcaggcgcgtaatgtaggcgctggttcacgacagacgaccgcgcttgatattgcattgacagcagatgacgagagcgaattccgagtcaagcgactactaactgaagaaattcatgtgcactggtcgttgtcagcggcgttgcgtgacaagacattaacggccagtaagaacctcggatctgcagtcggcagagggttgctattcttcaggcaagtaggcctaggtcgttggacagccgaacccgacttggcaaagtgtcgagatcgtgtgttagtggcatttgacgaccgatttgcaaacctcatacgtgaacgcctgggcgaagtgcacagagatgctcaatggaggttgaccagtgacccccttgatgcaataagagtcgcgaccgagttgcgcacgtgcggggtcatggtggatgcctccgtccaattgtttcgtcctttggcgtcggatggtgtgcgcgtgcacggtgcgtggctcggactccccggtttcttgccttcgatcgacacggataccgacgagcttcgggtaattccagaagggcgcaatgccgccgaggtgcggattacgatggccggcagcatcaggctagcatcccaaacatcagtcgctggctcctatcttgtggagccgtgtctgctcccgcgcgaaagccgtccaccttggcgactgaggctgcagtttgttgatcgcgccgcgccacatatgaagctcggcggatcgcggcaaaatctgccgcttttagaagactggtacgcggcaggtccggcacggatcgccagccatttgcccagcaatctcggctgggcacgctcgcgtagcgcgatggagtggctattagaggcgctatacgccagcggttccaacggctgggacgagtctgaccttgtcaaccttgtgcgccgcgcggaccgagagacagatttggcgccttggcgcacgctgcgcatgttgcaggatggtggcgtgattgaacctcggctaaggcagggatggaagggccgcgtctggacactggtgtcgccgcgcatagtcgtatcttggaccgatggcaccccgctcgtactagcagagggcgcgatgtgcctacatacgctagaagcgttccaactggcgattacaggaatgggcggcacgcccttcagaatacctgggaccgcgcgatggtcagtaccggttactggcgcagtcagtattgatccaaatgtcttagcctgccggcttggttgggaccttgtcgagcagacagaagctccctcgagcgctccgttggcgctggtcgaaaccgaccgtatcgcggagcactacagggttgcgtctgtatggtgctggctcgagcgacgcttcaaggcctttggggccgctgagggtggggcgcggttaactcaactctcgcatcctgccgcgaaggaccatgatgtgtaccgcgttgagcgtgacggaaaatgttggcattttttgtctcgccaagcggcgattgttgctgcgcactcggttgcgcgcgtcccgttgtttgcatttgtcgacgatcggatcgaagtgggagcacgagatggcgggttgccggataagttggcgacagcattgcgccggcgtcggctagcgagtagcggattcacccatgatttctacggatatcccgcaactgccgaggatgcggcctggctcgccgcactgctaccaggctgcgtcgtcggcgcgcctctgtgtacggagccaagtacaggtgagctgctttcgagatccagacgttctggcggcgcattgccggtccagtggcgtgaaggccggctgactctgtag

SEQ ID NO: 27659 - DNA, 2100 bp, Achromobacter sp. 2789STDY5608612
atggcatctaacttgatttggtatgcaggccgctgcatcaagcgtgcagaaaaaggcgcggcatcgcacttggaggcggtggcgcatttggtgaacggcggatggagattaatcgaagatcccaaaatcctgttcagaggcatgaacgatgtagagttgcgcgctgccgacgtgcgacagatgagagtatcagattgggtggcgttcacgatcggtaataaggggcgcagaacaaagtcatggcccgcaatagcgcaccgtcgcctgtactggtatgtggacttgtcggcgttaggcggtgccgaacagacgcagcgccaactcgtcgtagagggcgtccagacgcgccacccctcgggcacctggatagtccggtgcgcgaaagaagaggtcttacaggtggaactgaggcagcacgaaggcgtcgcccatttagcgctgggcgatggccgggtgtctgcgtacagtttcgacccagagtcggttacaagaatgccgacccttgacggagaggtcgagctatacgacttgaagggcgtggcgcctgctagatcctacgattggacgcctgatgactcattcgctttacgtgtcgtgcgggcggcggtggacgccggcgatagccatgcacgcagctttgtcgcttggcttgaatcgcacgggaagcaatctgagggcttgcttcccgtgaaatcgtccgacatggctgcggccaatgaggcgcttcgttccggaaagctggcgaagcgtctcgctgcagatcaggagcttttgcgaagttttttggatgcgctggttaacgatgagcgaatcggctcgttgatcaaggagggtgtggaacgagttgcggagcaagaacgtacggtcgcgcgtgcccgggcagaggcagaagcgaagcgcgagatggaagctagccgaaagcagcaacttgcggctctgaagcaggagctggaaaacgcggctaaggaggggcgaacgtccgtcgaagaggagctcgccaagctgcgagctgatggtgaggcagagttgcggcaacgcgtttccgcacgcatcgacgagatggaaaagcgggccgccgaactagatgcgcgctgcaaggccctggttatcgaggcgggccacgcgagggaagccatcggtgaagagcggcaaaaggcggagtctatacggtccgagattgcagaggcacaggcatcgctcagcgcgatccacgactctacagcaatggcggcagctgaactcgccgctgagcagactcgcctgacctctgcccggatgaaatgtcccgttgtctcctcaccggggccagcaaaggtccttactcttgagagtgtgggggctgagatagagaagtcgcagttgctatcgagcactggcaagacacttatggcacatttcctggctctgacattggctggagaggtgcctgccctatgtgggcctggagtagatgatttcctcttggttgccgagatcatgttcggcggtggcagctcggttcgcatggaaggggatccgacgattctcacattcgaagatctgtggatacgggcaggaactgatctgcgaaccggattcgggcaggcgttggcaatcgccagcggcatcgaaggcaagcctcggacgacacttgcggcgctcgagcgtgcggagcgttcgggagcccgtttctggtatccagcgctagccgaccgcgcgcagcgcgggatgctgccgcgcagtctgctaatttgcgtgactatcgccgaccaggagtgcgaggaggctttggaggttctgagccgcgccgtgcgccttgatctgaacgacgtgctgcaggcggatagctcacttcctctggcgatgatcgcggcctctgcaggaaatgtcgcagagttggacatcggcagcaagcgcgcaaacgttgctttaggtgcggccgcagtggcttcggatgctgcccagctcggcgctgcacgttcattgcgcgccatgcgcgctgtagccgaggccgcccgcctgtcttcggcggcccgcttgccagagcttgtacaactttttctaggcactggagggcaaccggccagggcgaacaaacctcagggagttacccatgcttga

SEQ ID NO: 27660 - DNA, 5337 bp, Actinoplanes awajinensis subsp. mycoplanecinus
atgaactctccggccctgacgctcgacgggcttcaaaactatctcgaagacgcgttcctgcggtactacgagaccgcgtacgagctacgcgacagcgcattggagaaggagcgccgccgactgctcagccagcgcggaacggtcttcgtcgacccctatgtcgagctgatgccgtcgtacccctcgtcgcggtcgaccacgggggagatcttcttcgatctcggcatgcccgaggctgcctcgctggtccaagccggcctgctgccgcatcctcgtccatacgcccaccaggagcagtcgctacgggagtcgttgaagggccgaaacgtcatcgtcggcaccggcaccggctccggtaagaccgagtcgttcctgctgccggtggtggcggggctcgtcaaggagtcgaagagctgggcgacgccggccgacgcaccggcggctacgccgtggtggcgcgccggcggggcgttccagccgcagcgcgacaaggagcagggccgactgccgggcatccgggcgctgctgctctatccgatgaatgccctggtggaagaccagctggtacgcctgcgcaccgccttggactcgccggccgcgcgtgcgtggctggacaagaaccgaccgggacaccgcttctacttcgggcgttacaccgggcgcacgcccctgcccggcacgcgcgagaccgccaccccggacaaggtcaagcggctcgcaaagctcatgcgcacagcggagcagcgccagcagcgtctggcggagggcatcgccgagggatccatcgacgacaagtggcggtacttcctgccgtcgctggacggggcggagatgaggtcgcgctgggacatgcagcacgctgtcccggacatcctcatcacgaactacagcatgctctcgatcgcgctttcccgctcggacgaggcgcccatgatcgaggcaacccggcgctggctcgaggcctccccgagcaacaagttcaacctggtcgtcgacgagctgcacatgtaccgcggcacgtccggcaccgaggtcgcctacctgctgcgacggctgatgagcgcgctcggcctggaccagcgccccgaccagctcaagatcatcggcacgtcggcgagcatccaggacgacgctgaaggccgcgctttcctcagcgagctcttcggccgcaaggacagctcgtccttcaccttcatcaaggccaaggaggaggagccggaaggcgccgacgacctgcgcgagctgaccgctccgctgctcgaggagcagctgaccgcggagagcctgcccaccgacgggaccttgccgcgggcgatgctccgggcgatgaccgaggacggcgagctccggccgcgtgcgctgtccaccgttgcgggcaagctgttccccggcgtcggcaacgagcaggcgcggaaggccttcgacaacctgacgaagctgctggagatgcaggactccccggccgtacgccttcgtgggcacctcttcgcccgcaccctgcagggcctctgggcatgtgctgacccggagtgctcacaggtggcagccgacgagcagtctccgcagcgccgcatcggcaagctgtacgccacccagcgcttcacctgcgattgcggtgcccgggtactggagctgctgtactgccagtcctgcggggagagcatgctcggcggctacgtcgcccggaacgccggcaaggagttcctcgtctccgcaatcggcacgctggacaagctgccagaccgggcacccgccggacgcgacgctcacgactatcgcgtctactggccgaccgaccgtgagccggtggtcaaggggaaatggcgacgaaccggcacccggaccagcaaggacgccaagcctccggcgtacgagatggagtttgtcaaggcccgtttctcgccgggtaccggccagctcgagcgcaggttcaccaagccgcgcaccggcttcatcttcagcctgacggccggtggcgccgaggatcggatgcccgcgttccccacccggtgcccgtcctgcaaggacgaccgtgagcgcccgacgaagagcgaccgggtcgaagaccagcgccgatccggctcgccaatccggacccagggtgtcggtttcgagcgagccaaccaggtgctcaccggcgcgctgaagcgccggctcaagtcgcggcttgtcacgttctccgacagtcgccagggcgcggctcgcgtctcggcaaatctcgagctggcgcactacctcgacctgatccgcgcgttgcttgtcaagtcggtgaaggccaaaaccggcgatggtgtgctgttgcagaagctgctcgacggggaccggagccccgaggcgaaggaggccctcggccggctcaaggccgtcaaccgagaagcgttcatggcgatctccaccaagatgaacggcttcgacttggacagcgctgacgagcgcgcgctcgccggcgccctggagtccctgagcgggcgacccagcctcgttgacatggtcaacgagctgcagccgcggctgctggagctcggcgtcaatcccggcggcccggggccgacgttaaacaaggtgcgtgacgggctgtcctggacgcgcctgttcgactgggatgtcagcccggtacgcgaccgcggcacctccctcgacgccgacgaccgggagttgctcgctgagatccagcgtgccctcggcgcccaggtggtcaagaccgtctttgccggcggcgatcgggacatggaggctctcggcctgggtcacgtcgtgcctggtgcgccgatgaccctcggctcgctcgacccggccgccgccaacgagttcgcctgctccgcgctgcgcattctgggtcgccgacggcgaaccccgtggacgagcgagtatgccgagaaggactggccccgtcagctgcgcgacttcgcggataaggtggttgagcgacacccctcatgcgggctggacggggaaggcttgatcgaggccttcggccggaagctgaacgccggcgagcagtcaggccaccgtgtcgatccggccgagatgcgcgttgccctggtcgacaagccggccttctggcgatgtggcacctgccggaccaagcatctgcaccgcagcgccggcatctgtatcacctgcttcgcccggctgcccgaggagccggagaccgctgagtcggtcgcccaggactactacgcctggctgatcgatgaggacggcggcttccgtctgcactgcgaggagctgaccggccagaccgacccgctggagtcccaggcccgccaggctcgcttccaggacgtcttcctgggcgacacggaggtgccccgagtcgacggcattgacatcctctcggtcaccacgacgatggaggccggcgtcgacatcggtgcgctcagcggcgtagtgatggccaacatgccgccgcagcgattcaactaccagcagcgggtcggccgggccggccggcgcagcgagcatctcgccatcgcgctgaccgtctgccggggtgcgcgcagccacgacgagcactacttcgccaacccggccgcgatcaccggcgataagccgccgcagccgttcctcgacatgcgctccgagccgatcctcaagcgcgccttcgccgctgaggtgctaactcgcgcgttccgctcagtgtcgaagcgagtgacgttcgccgtcggccgcagcgttcacggtgagttcggttccaccgacgactggatcaacctccccgagctcagcagcgccgtccgcgacactcttgccatcggccacgcgacgtggctttcggtcgccaacggcctgctgaccgcgaccaacatggatcccaaggtggcggaccagctcgccgactgggcggcaacccagttggccgatgccatcactgacgccgctcgcacggcccgcacccagtcgctggcggagaccttggcgcaggccggcctgctaccgatgttcggcttccccacgcaggttcgcgtgttgtacacggagaagcccaggggtgtcggcgagccgaacactcttgaccgggactccagcatcgctctctccgagttcgccccgggagccgaggtcgtcaaggacaagtcgatccatgtcgcggtcggcgtggtggactaccggcaggccggcaacggcacctggatacagagcggtgaggaccctcttggcccgcgggacaaggcgggtgtgtgccagcagtgcctcggcatcaccctggcggagaccgagacctgcccggactgtggggcaggcgctcccagcttcgcccaggtaaccgtcgcgcagccgctcggatatcgcacctcgttcgtggcgcgcgactatgagcagctcggcgagccgaccgcccgggcggcgcagccccggttggtcatgggtgtgtggacggagaagcaccatgcgaacgcccgcgtccgctcgaccaccggcaagatcatgtcggtcaacgacaacgacaacgagctgtaccagttcaccgccgcgacgttcaagaacagctcgcgacaggctgacgggctcatcgagctgagcctgctcaccgagaaggagcgccagaagcgggcgaagctgtccaaccaggtgccggagggcacgccacgggaaccggtcgcgctcgctgctcagcgccacacggatgtgctcgtggtcggcctgtccagcaccccgcccgggttgacgatcgacccgcaggagccggccgggcgtggcgcctgggcgtctctgggctatctgctgcgtgacgccgccgtgaagtggctggacatcggcccggcggagatccaggtcggtgtgcaccctcgccagcacgagggccggctcaccgctgagctgttcatcgccgacagcctggagaatggcgccggttacgccacccggctggccgacaagttcgaagacctcgtgggagaggccgaagcgttcgcacatggcctcagcaagcacaacagcggagcaccctgcgactcgagctgtcacagctgcctgcgcgactacggcaaccgcgcctggcatccgctgctcgactggcgcctcgccaccgatctgctgggcctcctgcagggctggccgttggacgtcgaccggcagcgtgagcgtgatgttcgggcagcgcggcgattcgcccaggacttcaactgctcggtggtcgaggatgagatcctgatcatcgacaagcctggcgcgggccgtctggcgatcctccacccgttcgaggaccgctcgggcacctcggccaacgcccgagtgacctcgctgcgcaatcgggacagcgaggtcaagctggtgacctcgtacgacctgatccgacgcccgggagccttgatggccgagctggcggcgcgatag

SEQ ID NO: 27661 - DNA, 1284 bp, Actinoplanes awajinensis subsp. mycoplanecinus
ttgttcgaaaggcggttcacggtgcagggtcaccaaggctcggttctctcgctcttcaccggggcaggaggcctggatcttggcttggaagccgcggggttcgagacgagagcctgtctggagatcgaccccttctgtgccgagaccctgcagaacaacaggcccgagtgggagcagcttaagtgccgtgatgtgaccgtcgccgccgagacagtcaagccgaaggacctcgggctgaaggtcggcgacctcgacttaattgcgggtgggccgccctgccagccgttctccatggctgcgcagtgggcgaacaccggccggcgggggatggacgacgatcgggcacagactgtcgtcgcgatgctcgacctggttgaggtctttcagcccagggcgttgctcatcgagaacgttgccggatttcttcgcggcgagatctcggcctcgccgttcatccgcgagcgtctcgctgagatcaacgcaaagcatggcaccgcgtatagcctgcatgcgcagatcatcgactcggcggcctacggcgtaccgcagcgtcgcaatcgggtgattggcatcgctacccgcgacggcaagctgatggagctgccggtgccgacccacgccgatgcgcccatccgggcctgggacgcgatcggggacctggcggaggccgacctcccggtgccccaaggcaactgggccggcctgctgccgtcaattcctgagggcagcaactaccagtacctgacggcccgcggcggtggcgaggagttgttcggctaccgaacccggtactggtcgttcttgctgaagctcgcaagggaccagccggcctggacgctcgccgcgagccccggcccttcgacagggccttttcattgggacaaccgcccgctgaccgctcgtgagagcctccggctgcaaagcttcccggactcctggaacttggccggccccttccggcagcagatcaaacaggcaggcaatgccacgccgccactgctcgccgaggtcttcgggcgcgcactgctcacgcatctgaacggagtgccggcggacgtccaggagcaggtgaggcccacgctgctgctcggccagctggagggcccgctccgcaagcccgctgaggtacttcccgttccggagcggtaccacgacaagaagggcgcaaagaaggcgcatccgggcacaggcaagggcccgaagccgcgagaggtcgcacccagccaatcgcgggcaggcttggtctccagctcagacgctgtccagcaggagttggcctggtga

SEQ ID NO: 27662 - DNA, 3057 bp, Actinoplanes awajinensis subsp. mycoplanecinus
gtgaactacctggagtggaacagcagcctgctcacctacgtgatcgaccgcggggaccccacccgggacctctacctctacgtcgaccgcgatctcctcgccaagctgtccgggctcagcccggaacaggcggtagaggacttcagcagggcttttcaggtgggcatgggcagcaagccgttccatcgcggcatgcagacggcgaccaaatggcgcctcagcggcttcccgggcgcaccacagttcgtcatccatctcgcgatgacggtgctcgccgtcaccgaggacccgatcgacggcagcgtctacaagcgccagaacgccctgctcggcctgccgagcctcaagagcccgccgctgggctacgacaccgatgtcccgctgctgtggcgggcgtggaacatgtggctgaaggggccgggcgccatccacggccgcccgaccgcacggtcccacgacctgtggtcactgcagggctgggcgcgcagccaggcactcatccgctatcacgaccggctcctgatcgaggagtacctggcggccggcgacccgtcgttcgacagcttccggacctggctggccctgcaccgcccgcacgtctgggatcgcttccgcgagcagccggccatggacatcctgcgcgccgtcttcgaggaggaggaggctcgcttcggggtgcacgagccacgctcccggccggcaaccggcccctcgcagcagcaaggcctgctgagctacgaccctatgacaggcgcgttctccggcatcgtgctgatcgacgaggagtgggtcggacgcacggtcgacctgggccagggcgagaagcacactgtcgacggctacgaccctgtgctccagatccagcccgatgtctccgagctggagatgctcaccacgggcgtccagcaccggctcgccgatgaccttgtcatgcgcttcggtggcgagagcctctacgccctgcgcgacgacgcccgcgtggacgcccagctgcaggtccggagcgtggaccatcccgctgtcgtcgatctcctggttcgcgccgaccaggttgcccgggtgacctcgatcctgcagacggccgggctggagccccggcagacgcccgccgggatcggggactgggcccggttccgcgacgtcagcctgactccggcccagcccgctctgctcacagggctcggcttgggcagggctgcccgggccgagcagcaatgcaccttcttcggcgggctgcgggtacggacgggcctctacctggtcggtggggagcccgacgtccatctcaccggcgacgagccggtcaccgaggtgatcgtggacggcgtgccgcatccggtcctggcggacgaccggcggctcgcgctgtccgacctggcactctcgccgggccagcaccgcatcgagtcgccctgtggcacgcggaccctgcggaccgaggactacgtgcacgaacggcctgtgcacagcgagatcgcgcggccgatcgtgctgctcccgcacggctatgccgtcaagcccaccgaggtgcgcacgtcagcggcggcgacactggccggcgccgccctggacggcgtccaggtctacgaccccgtcatcatcggcaagcgcccgggaaccgacacgctgatgatcacttactcgggcgacgtcagtgaggtcttcccgaccactccggtctgggtcagcgaggcggggatgcagcccagcaccatcgatgtgctggccacggtgcgagacaactcagcgccggtcgcgtgcgtgcttgtccgcagccgtgccaacgagcgtgtccaggccatcgcagtgccgtcggaggcgccgcgcttcgaaggcaaagcaccgagccgtccccggccggacctcatgacctccctggtgctgagcttccgcaagtggtcctgggtcggacagcgccacccccgggtcgacaagatcatgagcaccgccctgcgcgccacggagcgcgcctcctcgacggcaccattcgtgcagccgagccccggcccggaggtctcgcgggttaccgtggccgagcgtctcgtggccgagaacccgtacgacgacgtgctgacctggctctccgagcgggagaatggcatggcctcgatctctgagctcgccgacacctggagctggctgtgccggcgctacgggctcaccgatcttgccttccgctggcgcggagcgctgaaagtcctggaagacctgggccacatcgagaggcactacgactcggcccgggtcggcgtcgcgccgtcgaccttcgtcgccctgccggcctctgccgggctctatgcgctggccggagcacgaccgcaacagcttctggagcggctcaacaatccggatgatccggacgcggtcgtcgccgaggcggccctgtactggcaggtccaccaccgtaccccggtggacgtccaaggcaggccgagcggcccgcaggccatctacctggagtccgaccccgcacagcgagatgtcgtccagcgcggcctgcagggtctcggcgtgaagatgcgcggattggtggccgatgccctgctcgcactgcagcccgccatcactgacctcgacgccgtcggcacccggcagaccatgtcgcccggcaccgagatccaccggcgcaccaacctgaacggcgtctacgactggaagccggtccgagacgacgcacggcctgggctctactcctaccggctgcgcagcggcagggctttcgcctggcgccagtcaccgggcgactctctggtcgaagtcgagttcggcgtcggcgaatggctgctgcgtgcggcagagggagagaccagcctcttgcacgccgaccagggcacccgtcgccgcctggcggttcccgaggccgtgcagctgccccgaatgatctcccgcgcgctggtgctgcgcagtgggcttcctccacgggtgagccggatcggacccggccccgccctctacctggtctacgagaacgtcgacagctccaccacccgtaacgtggctcagctgctcgcgcaggagccggttgcggggaccatcatgacagcacgacaggggtga

SEQ ID NO: 27663 - DNA, 5352 bp, Actinoplanes sp. N902-109
gtgagtcacctagctgcctccgcgctcaccctggacaacctgcagtcctacctcgaagatacgttcctgcgctactaccggaccgcatacgagctccgcgacccacacgtggaggaagagcgacgccggttgctgagccaacgcggatctatcttcatcgacccgtatgtcgagctgatgccggcgtacccctcgtctgcctcgtccatgaacgagatcatggccagcctgggcctgcctgaggccgccgatctcatccatgccgggctactcccgcacgctgcgccgtggagccaccaagagcaggctctccgcgcctcgctggcaggcgacgacgtcatcgttggcacaggcaccggctccggaaagacagagtcgttcctcctgccggtcctcacacgccttgtggccgagtcccgcgcctgggaaccacaggcaacaccgagcgccgcaacgccgtggtggcgcggcaccggcgcgttcacgcctcagcgcagcggtgagaccgctcgcctgccgggtatccgcgccctgctgctctacccgatgaacgctctcgtcgaggaccaaatggttcgcctgcgatccgctctggactccccctcagcgcgccgatggctcacgcagaaccgtcccggacatcgcttctacttcgggcgctacaccggccggacaccgctgcccggcacacgacacaccgcaaacccggacaaggttaaacggctggcccggctcttgcgcgaggccgaggcgcgtcatcagcgccttcttcaaggcatcagtgacggagagatccaggaaagctggcgatacttcctgcccgccctggacggcgctgagatgcgctcccgctgggacatgcaagccgccgtgccagacatcctgatcaccaactacagcatgctctccatcgccttgtcccgctcggacgaggcacccatgatcgagacaacccgccgatggctcgaagcctcacccgagcaccatttcagcctagtcatcgacgagttgcacatgtaccgcggcacatccggcaccgaggtcgcctacctgctacgccgcctcatgaccgcattgggcctcgacgagcgttccgagcagcttcgcgtgatcgggacgtccgccagcatccaggacgacgccgaaggccggacattcctcagcgagttcttcgcccggcacgacccatcacgctttactttcgtcaaagctcagcaccagattccgcaaggtgccgacaatcttcaggacctagcagcgtctttgctcagcggagcgctgcacgccgacggtctgcccgccgacgacaccgtcaaaagagccttcaccctggcaatgacagacccgcagagcggcgagttccggccgcgctccatcgacactgtcgccggcaggctgttccccgaaagcgaacctgagcaggctcgagcagccctcaacagtctcacggccttactcgagcaacaggccttcccagctgcacggctgcgcgggcacctgttcgcccgtactctgcagggcctgtgggcctgcgccgaccctgcatgtccaaaggtgccggaaggcctccgagacccgaaacggcgcgtcggagtgctatacgcaacacaacgcttcacctgcgaatgcggttcgcgcgtcctcgagttgctctactgccagtcgtgcggcgagaccatgctgggcggctacgtcgcccgagcctccggacgcgaattcctcgtgtcatccatagcctccctcaatgagctaccggaccgcgctgcgaccggcagcaacgccgacaactaccgcgtctactggccgactgaccgcgcaccagtcggcaagatccaatggcagcgcaccggcacacggacatccgccgatgccaaggcaccgcagtaccagatgagattcaccaaagctcggctgtcaccagggaccggccagctagagcgcaatccgcgacagggtatgacgggctacgtctacacgctcaccgccaacggcgccgaggaccgcatgcctgcctatcccaccaaatgcccctcctgcggcgatgaccgcgagtggaggcaaaagagcacgagagtggaggaccgacaacgctcgcgctcctccattcgcacccagggcgtcggcttcgatcgagccaatcaggtcctcaccggcgccctcaaacggcggctcgactctcacctcgttaccttctccgacagccgccaaggcgcggcccgcgtagcggccaacctcgaactcgcgcattacctcgacctcatccgggcgctcctgctcaaaacgctgcgcgagaaagccgaagacggcgcgctgctacaggacctgctggacggcaacaacagcccccaagccagcgccttcctggagcgcctgcaggtagccgatccccatgccgccatggcagcgatcaagaaggccaacagcttcccgctcaccacggccgacgagcgcgctctccaaggagccaccgagtcgctcggaggcaaacccagcctcgtcgacctggtcaaccaactgcagccattgttgctcgacctcggcgtgaaccccgggggtccgggaccctctctcaacaagctgcccagcggattgccctggaccagcctcttcgattgggacgtccgtcccatccgggaccgaggcgccttcctggactctgatgctgtcggacttcttaccaagatccagcgcgagctctccgagcaggtcgtcaagacggttttcgctggcggcgaccgagacgccgagtccctcggcctggcgcatgtcgtgccagcaacgacagtttcccttgggcccttgagtagcgacacggcgtatgagttcgcatgctcagcgctacgtatcctcggccggcggcgacgcgtcatgtggacgaccgatgccgagaagggatggcctagccagctcaagcagtatgccgaagctgtcgccaacgctcacccttgcggcttcgacggcgaaggactcgccgacgccctcggccagcgcgtcaaggccggccaggagtcggggttccgtgtcgaccccagcgagatgcgcatcgcgctgatcgacaaaccacaagtctggcgctgcaccgtatgccgcaccaagcacctgcaccccagcgccggcgtgtgcatcacctgctaccaaatgctccctaccgagcccgaggagcccgaggcggtaccgcaggactactacgcctggctcgcagaccaggacggaggcgcgtaccgattccactgcgaggaactcaccgggcagaccgatccactcgaagcccaagcgcggcaagcccgcttccaaggcgtcttcctcgccggaacagaggtcaaggaagtagaggagatcgacatcctctcagtcaccaccacgatggaagccggcgtcgacatcggagcgctacgcggtgttgtcatggccaacatgcctccccagcgcttcaactaccaacagcgcgtcggacgcgccggccgacgcagcgagcacctcgccgtcgcgctcacggtatgccgcggcgcgcgtagccacgacgagcactacttcgccaaccccgcagcgatcaccggcgacgaaccaccccagcccttcctcgacatgcgatccgagccaatcctcacgcgcgcctttaccgccgaggtgctcacccgcgccttccgacacacagttacccagatcgacttcggcgtcggtcgcagcgtgcacggcgagttcggctcaaccaccgactggctcaaccatgccagcctagccaccgtcgtccgcaacaccctgaccaccaagcgcgaggattggaaaaagatcgcgcgaagcctgctcaccggcacgcggatagccgccactactgcagacatattggccgactgggcagcaaccaagctagccgacagcatcacaacagcagcgcagcaggcccgcgtacctgcactggcggaagcattggctcaggcgggcatgctgccaatgttcggcttccccacgcaagtccgcgtgctctacgccgactggccgcgcggctgggaggagcccaacagcctcgaccgagacacggccatagccatctccgagttcgcgccaggatcggaagtggtcaaggacaaagccatccacacggctgtcggcgtcgtggactacatccagcgcccagacggctcctggggtcaaagcaatgatgacccgctaggccctctcagcgccgcgggcatctgccactcgtgcctgggcatcgccaaagttgctggcgacgcctgccctcactgtggcgccggcgcacctgcatacgcacaggtccagctagcggaacctctcggctatcgaacgtcgtactggccacgggactacgaacaactaggcgaccccgccgcccgcgctacgcagcctcgcctagccctcgacgatgcgcccgacgccaagcatgaaaacgcgctcgtacaatccgccaacggcgaaatcctggccgtcaacgacaacaacggcaatctgtacgaattcgtgccctcgaccaaaaccaccaagaagggagcacggctcgccgacgggctcatcgaccagcgacttcttgacgacaaggaccggaaagaccaagccaaactgtggggccacaccgccgcaggccctgcccgcgagccggtcgccctggccgcgcgccgccgcaccgacgtcctcgtcatcggcttggaccagctgccgtccgggctccgcatcgacccacaacaacccgcaggccgcggtgcctgggcatcactgggctacctgctacgcgacacagccgccaaatggctcgacatcggatccgatgaaatccaaatcggtgtccacccgcgcaagcgcgcggaactagttggcgaactcttcatcgccgataccctcgagaacggtgccggctacgcaacccgcctcgcaaacaagatcgaaacgctattcgacgaggccgacgcctacgccgaaaccctcggacggcacggcgccggacaaccttgcgactccagctgccacagctgcttgcgcgactacaacaatcgaccctggcacccgctcctcgactggcgcctcgccatcgacctgctcggtctccttcgaggtaggcctctcgacgtcgaccggcagcgcgatcgcgacttcaacgcggcgcgaaagctcgcagacgacttcggcttcgaccttattgaaaatggatttccgatcatcgccaaagcgggcggcggcgcgcttgcaatcatgcatcccttcgaggaccgagcgccaacgtcagccaatcagcgagtggccgagatccggaaagaccaggccaacgtcaccctggccacctcatacgaactcatcagacggccgggcgcattgatcgcagacctaatggccagctaa

SEQ ID NO: 27664 - DNA, 1065 bp, Actinoplanes sp. N902-109
gtggcacagtcgtgtgccatggcaggtgtagcgatctctctgttctctggggcaggcggcctcgacctcggcgtcgaacgggccggattcgaggtcagagccgccctcgagcgcaatcccgatgcgtgcgacaccatggagaagaacttccctcacctagcatcgccggtcattcgtcgagacatcctggataccccgacgggcgagattctcaatgctgctggccttaaaagggggcagcagccggagcttctggtaggcggcccgccgtgtacccccttctcgaagtcggggttttggctcgactacaagcgagcgggactcgaccctgacgcatcgctccttcaggcctacacacgcgtcctggctgaagcgaggccccgctacttcatccttgagaacgtctatgcccttacctataacaacaaggcaagccgaccagcgttcgaacggctcctcaaagagatcacggccgccggatacacattcgaccatcaagtgctgcacgcagccaactacggcgtgccgcaggcgcggccgcggctgttcatcctgggcgctcgcgcaggtgagcccacgccaaagctgccagacccaaagcatggcggacgatgggagcgccgcgccaccggcaacgcggacatcccccacgtcacggccggagaggtcctggcgggactggtgaccgacccggagccggaggagatcgtagccggaaaatatggtcaccttttaccggaggtgccgcccggcgacaactatttgcacttcaccgcggagcggaattatccggacccgcaattcgcctggcgcagcaagtattggtccttcttgctcaagctcgacccgaacaagccatcgcccaccattcaagcgcagcctggcccatacataggtcctttccactgggagaaccggcgcttgcgggtcgctgagatgaagcgattgttcacctttcctgacgagttcgagctggttggtcgacgttcgtcgatacaggcgcagctgggtaactcagtacctccgctgctggcggagatggtcgcccgagccctgccggcgtga

SEQ ID NO: 27665 - DNA, 3066 bp, Actinoplanes sp. N902-109
gtggaccttgcagagtggaacacccaactgttcagtgacgtctgtgctcggggacgtaaggaccagcggctatacctgtacgtcgaccgggacttactaggcaagctcgctaattcggcgccccaagcggctgtcgaagacttcagccgggcattccgcgcttccatgggggtggagccgttcagccgaggtgcacaggcagctaccgcctggcgtcggcatggcttcgaaggtcccccgccgttcgtcgcgcacctggccatgagtgttctcgccgttaccgagcagcccatcggcggcagccatggcgtctatgcccgtcagaaccgtctactcggcctaccggagacaccgacatccccgccaggctatgccctccatgtgcctctgctctggggcgtgtggaactcgtggctcgacggtcccggcgccctctacgggctgcccaccgctaaggcgcacccgcactggtcgctgcaaggctgggcgcgcagccaaggtctcgtgcgcttcaccgaccgcctccagctcgaggaatacttctcgactgccacgggtcaagcgtcgttcgacgctttctttacctggctccgcctgcaccgtcatgacctagcacaacgcttccaggagcagcctgcgctggagatcctcgaagacgtcttccgcgaagaggccacccgctggatgcaggaagggccgcgccctgtgagccggcccgggcggcaaggcctgctgcagtacgacccatggacgcgctccttcagcggcgccgtgcctgtcgacgaggctttgatcggcgagcgggtcgacctcggtgacggcgagcagcgcgtcgtcgaggaatccgacagccttctcaccgtgacgccgcctgtcgctgatgatgctctgttgcgcgacggtttcgagcacgagctaaatcccgacatagtcaagcgcttcggcggcgaggccatctacgtcatgcgcgacgagccggcggccaacgggctcctgcaggtgcgctcattgagccgcccagaggtggtcaagatcctgctacggcgccatcagcttcagcgagttagcgagaccctgcgctccgcgggaatcggcgtcaatgtcgggccggcggcgtgggccggttggctttggatcaataccttccaagtgagcccatcgcagcgccccatcctggaatgcctccatctcacccacgtagccacagccgcgccgcagccagcccatctccatggcggtttgcgactactcgcgagcacctatctcgtcggcggcgagcccgacctccttacgacccccggcatgctcaaagacgtcaagctgaacggaaaatcggtgaggacttcgccactcgctcatcggctgcccctggtcgaccagttcctcggaccgggcgcgcatctcctcgaattcccggaaggtcggctctcgtttcgcaccctggagtatgtccacgaggcgccgaaggccggcgggatcctccggccgatccaacagcgtggctctcgctatgtcatcggcgcagccggagacgctgaggacgtatcgatgtcgctatccggggcggccttgcaccaagtggcggtgcctgttccgtatgtgatcaggcgctcgccgtcgtccgaggtcatgtaccttactcagtgcggcgaggtcaacgagatccgccccgatacgccgatgtggctccggtctctagacctggagccgaccgcggtcgacgtcatggccgcgatccgcacaacgccgtcgaccgtagcgtgcctcgtcgtgcgcaatacccgcacgggaagcactcaggcgatcgctgttccctcggacgccccgcgcatggacggtcacgccgagacccacccacgcccggacgccttctccgcgctagcggtcagcgtcggctcatggtcgtgggtcggggccccacatccgcgtatccgtcggatcctgtctcaagcgatccaggccaataacagtaggacaccccaccgccctcagccgcgagcttggtcaagacgaccaaaagccaccgtgcgcggcgatgtcgccgcggtcgtggtgccgaacaatccctttgacgatgtactgagctggctgtcagagcgcgaacgcgggcgcgcatcgctgcaagcgttcatcagcacctgggaatgggcatgcgcgcgctatggctttgccgccctggcttaccaatggcggcgcgccctacgcatccttgaagagcttggtcatattgagcgcgactacgagaccgggcagatcggcgtaaccccggccgaactcgtcgcgctgcccgcctcctcaggactgcatgtcctgacaggctcacggcccatccggctcgtggagcggatcaatgaccccgacgacgacgacccagttgtcagcgacgcggtatcggcatgggaaatacacatacggaccttgatcgacgcgcatggctttcccgcggggccgcaagctatctacgtcgaatgggactcggcacggagggaaagcgtcggcaagggtcttcagcggttaggcgtcgacctgaccggatcggtcgccgaggccctcttggacatgcagcctggcatccaccagctcgacctagccggcatgcccctgaccatgtcgccgagccgggaaatgctgaaacgtcgtcgcaacgccagcggcgcttacgagtgggccgcgacgccctccgataccgcggcaggactctactgctaccaactgaggcaccgccgggtctacgcctggcgctctgagcccacagctccgctggtgcaagtcgaattcgccatcggcgagtggctacttcaagccgctaccggcaataccaactgcctgctcgccgatgcgggcgccgcgcgcctgctggcggtgccggccagcttgccgctgcctcgcctccttgcgcgctcgctggtcttgcgcagcggcctgccgccacgtaccacatccgcgcgaaccgacggcaccacctacctcgtctacgacaacatcgacgcgcgcaccattcagcacgtcgcccggctcttggcacaagagcccgtccacaccagcatcaccaggaagttggcataa

SEQ ID NO: 27666 - DNA, 5874 bp, Agrobacterium tumefaciens F2
atgttcgatccgattggtggcttcaacagaatgatcgaacagttcctgtcgtatctcgatacggcatatcgcatcgataaccagaatgtatctgcgatgcgcagggagctgctatcgacgcccggcgagcttgctctcgatcccatattcgaggccgttcctcgctacgagactgcaggctacggcttggaggcccttattgaggacaaggacggcaagttgccgggcttcttgaaggcggagcgccaggcattcgtggaacttgccgtgtcaggcctgttcgaccgcgacacgaagagcgccgaaatcaagggcgcctaccaaccgtatcttcatcaggtgcagatgctgtcgaagggcgtacaggacgggacgcctgggatcgtcacctcgggtaccggttcgggcaagacggaatcgttcatgcttcctatccttgcccaactggccaaggaggctacgagttggcctgcaccattgcggcctgtagacgacgactggctggaagacggcaagagcttccagatccatcgccgcaacgagcatcctgaccgtcccaaagcggtccgggcgatgatcctctatcctctcaacgccctcgttgaagaccagatggtgcgattgcgcaaggcgctcgattccccggcggcacaggcagtgatgcagaagcacttcaggggcaaccgcctcttctttggccgctacacgggaaagtctcctgtgaccgggtttctcgatcatccgcgcagaagcaaggacaagacctggaagaagcgcaacagccgcgcgcggcgcgatctcaaggtggagctgcagcgataccagtcgatccattcccggctcgatgcagatgccgatccagatctacactatatcttcccgacgaccgacggcagcgagctgatctcccgttgggacatgcagaagacgcctccggatattctggtcaccaaccagtcgatactgaacgcgatgttggttcgcgaggtcgaggactgcatcctgaaggaaactcgcgaatggctgatcgggaacgaggacgccaggttctacctcgtcctcgacgaactccatctcgtccgcggctcctccggcgccgaaatggcggggcttctcaaggtgttcctcgagcgtatcgggctcgcagatcccgctcatgctcacaagctccggattctctcgtcgtcggcatcgcttccgatggacgagaaaaacgcgtcggcaagtatcgagtatctccgcaacatgttcggtgccgcgggaaccgcaggtgcctccgacgtcgatgctgcgtggaaggccagtgtcgtgacgggcaagccgatcgtcgtcgagcggcccgagcgcacgccgtcacgtgacagccttgtcgctctggctaaggctttggacgacctagactatagaaagcagccggagaaactgcgtcagcgattcttcgaagctgcgctgagcctgccaggagcggcaggccaggatttgcggtcggtaatgctgcacgcgacagccgcagcggccgccatgctcgacttcgccatgcaggacagagacaagccgggagcaaagacaccgcgatcaatcgcacagatcggcgaggtactctttgacgaagcagatagggaagcagttcgcggactgcttgcattgcgagcgatcccagatctcccggacgacgtcctagccgacgatctccggccatcccgtggcgacatcgcaagcctgccgggcttcagaatgcacagctttgtccgcaatatcgaaggcttgttcgcttcggtcggccgtgacgacagcggctccgtggcctggggttgcccgagtatcgagcgcggtcaggactatgacgagaaggctgcttccgaaggccgtagacgcatgttcgagatgctgtactgtgaagcatgcggtgacctctatctcggaggcaagcgcggggagaacgatcccggctcgtcgcgccgggtatcgctcttgccagcgccacaggaactcgaaaagcttccggaaagcgcctcgtcactccgcttcgaggatgcgagcttccgcgagttcgcattgttctggccgcaggggcgcactcccgagcgtgaaatccgtgtcgacaacacgccgtacgaatggatcgtcggttacctgaatccgcgtacaggagtcgtaggagaggaggagagcgaagagagcgttaaaggataccttctgcggtggcgtggtgacgacaagttccacaagcgcacgatcgaggacgacggcactgccgttccctattgctgcgcgaagtgtggcaccgattactccggccgatatcggcaggctaactcgaagcgaagggaaggccgcctctctcctatccgaagcttcaggactggtttcggcaagacctcgcagctgctggcgactgaactcgtcgcggctctgaaatcgcagggcggcgacggaaagctcgtagccttctccgacagtcgcgaagacgcggcgaccctggtgctcgacgtcgaagttcagcatcagcgcgacctgaggcgcgagatcctgatcgctgctgccacacgtctcgccgcggatctcacctacaccgacgaagacaaggtggagctcgccgacctcaacgcagaaattgccgcccttatgggggaagggcatgagttcgaccatctcatgccccgccagcgagtgctcaaccgtaagcggaacgccgacggcaaggagccgagcgtaccattgagcgacctcttcgagttcgcccgacagaacgtccggtacgacactcgaccgatcctcaacgaactcatgaagcttggctcgacccccgtcgagggagctgacacctacaagaaccgcgtctccaacaagtcgtggtacgagttcttcgatcgcgacgacagcggagacatcacctggaaacgggaagagctcaacgaaaaggtcgatctgctcgcgagggcgagaaagaaggtgcaggacgagcagccgccggatgcgaccgaccttctgttcagcaagacctatttcgcccttgaagagacgggcctgggatggccgagcttttacgggtcagaggagtacactcccgagaagtcgaaggacgatgcgatgctccgcatttttgcggacgcatatcgcatcacgcctaatccctacatggacgaggtgaagacagtctggtcgacagctcacgagatgctcggccgcggtgacaaccgcatgcgtcgcttgatgtcgaagctgtttcctttgcagacagaggcggagtgcaatcttttccttgaaaagctcaggactaagctccggcagactcgtctggccggatcgatcgacatcagtcttctcttcttcagggccgcgaagccgaccggggcggcttggcgatgcgaccgctgtggacgagttcacctgcacgagggcttcgggaagtgcacgcgctgcggcgaggagctgaagcgcccggacgatctgacggccgaggtcattgccaagggcaacttcctcgggcgccgcgttaagcgcacgatcgaggctgacgagccgctcttccgcttgaagtgcgaggagctgacgggtcagacgagcgatccggcggaacggctccagcagttcaaaggcgtctttgttaagggcgcgaaagagaacgacgccgactttgcgtggcgcaagcttttcgacaccgtggacctgctttcggtcacgaccacgatggaagtcggtgtcgacatcggctcccttcaggccgtctaccaggccaacatgccgccgcagcggttcaactaccagcagcgcgtgggtcgtgcaggtcggcgaggacaggcgttctcgaccgtcctcaccgtctgccgtagcaagagccacgacatccactacttccataatccgatcgaaattactggatcggcaccgcctccgcccttcatcacgacggggctgacagatattccgtcccgcctgcttcgcaagttctggctggtgaaggcatttggcctgatgagagagaaagccgatcaggattggccgggcgacgacatggtgccgggagacatccacggcgagttcctctattgcagcgaatacttccgcacggaccggaactggtcccgaaagcttgcggaagctctggacgagacagacgatcagcgcaggaaactcgcgcaggtgcttgccgacgtttcgaagtgcgacgtcgaccggatcctgtccgcggtcactgccgaaaaagtgctcgaagccatcgatggcctattcgacgaactgggcctgcaacctatcggcattgcatccgcgctggcggagcgcggcctgcttcctctctatggcatgccgacacgcacccgaaacctttacgtcgatttggccaaggcaaaggctaaggaggacttcgatgcagactgggacactatcgaccgtgaccaggacatggcgatcttcgatttcgcgcccggcagcgtccgcacgcgcgagaagctccgccaccgttgcatcggcttcacgggaacgcttcccaaaccgaatgagcacatcacggacttcggcaccccgataaagccgttcggcgagtggtggaaggacgactttcagcttcgcttctgcggaacctgcggtgcgtggagccgaggttgcaacgaaacgtctgaatgcccagcctgcggcgcagcgacgacagatccgggtatccggtgcataacgcccgcgggctatcgcaccgagttccgtccgacggacgagaatttggcttcgaaggttggtcagcggatgacgcttgccagtatcggcaaggtcgacaaggagaagactgaggctaacctgcaggtgaacttcgccgagcagtcagagatcttcctcgtcaatcccggtcagcgtgacgaaacggacttcactggcttccagttgcaggaagcggtcgatcaggacgcgaagcggatctcttggtgggcgagcacgaaacccgtcgtgaagcttgcgaatcaagccatcagcgccgaagtcgtggccgaagaccaaggtgttcgttaccgtgcggacgagacggtgatcaaggcgtggctggcgtcaacgaagatcaccaactcgctccagatcagcccgatccggatgaacccgaacctgcgactgctcgacatggacgtcgggctttcgatgggacgtcgcgagcctacaagaaccagtgtccgcgcagcggcgatttcggcaaccgagatcctcgtgcagcgcgctgctttggatctcgacatcgcacctgaagagttcgacgccctggcgccgaacatcatggtgacagctatgggcgagcggcttccatatctccagatatcagacgcgttgccgaacggctccgggttctgccgtcaccttctcggcgacagcactattcctgtttccggtctcatcaagagcattcttgacgataccgaagaatggccacggcaggacgttgccgtggaggctcacaggaagagctgcggatcctcttgctaccgctgcctccagcggtacaacaatcgaaacttccacgggttgctcgattggcggctggggcttgcctatctcagggcgattgcagatccgtcctatcaagctggggtcgatggcgacttcggttgtttcgaggtttcggactggaaggcatctgcggccgatcttgcggagcagacgaagacgttcatccccggcaacacggtcgcccatgccaaggacagaccggacatccccacgttctctctggacgacagcggtagccgttggggtgtcgtggtccatccgctgtgggatgcaaggaagctcttcgaccggatcggactggatcgctcacacatcgcgatcgacagcttcgaacttgcccggcgaccgctgcacgtcttgcagcgtgctcgcgccgcggtgaggtaa

SEQ ID NO: 27667 - DNA, 1845 bp, Agrobacterium tumefaciens F2
atgctgaaatgcatggggaaaactatgggtcaagtcgcaatcgatctctattccggctgcggtgggatgtcagcgggagccgcggcggccgttcccgatctgcaggtcaagtgggcactcgacatcgacgtcaacgccaccaagacattcgcaaatgctcaccctgaagctgtggttgactgctgcgacgtttctctcgtgtcggcggccgaggtcgtggagcgggctgggatcgagaagatcgactggttcttcgcggggccgacctgccaggcagtgagcacgatgggtgtcttccatctcgatgatccgcggaacgccctcttcgtccacttcatccggctgctcgacggcttcaccgccgccggaaggaagccgcgccatgtcgtgatggagaacgtgcccggtgtggtttacggccagaaccttgtgatcgtcaaagaactgttcaagatcttcaaggagcgcggctattatgtgttcgccgacgtcgtgaacatggcggactacgggcttccgcagctccgaaaccgcttcatcttgatcgcgactgtcaacgaggtgccgccgactttcccacggcacacgcatgctccggtgaaaaagggcgaactcagggaatacgtttccgtcagcgaggccatcgccgatctcgcagtcggtcaggccgacgacaaggctgtcgtcaagctggcgtaccgcgggcgcccgacgcggttccagtcttatgttcgcgacggcaacggtttcgcgccgaaccatcacggcaaccacttgtcggaggtgaacaggaagcgggtcgccaccgtgccgcagggcggctgctggaaggacattccaccggagcttctcccagatcggttccgccgcgtccgcctgaccgactacgcgaccctgtatggccgccttcatgaggcttcgccttcctacacgatctcggctggcttcaacaacgtcacgtccggctgcttcacgcatcccatacacgaccgcgcgctgacggtgcgcgagggtgcccgcctgcagggcttcagagactccttcgaattccttggccccaaggaggcgcaataccgtcaagtaggcaacgcagttcctccattcttcatgatgcaactggtccagcacctgatgtccggtgaaaagggggtgcccgcacgcatcactgccgcggccctcgaaggaggcaagaagctgccgagcatggtgaagcgcttcacggcgaagagaaacgattccgagcgctcgcgggacggatacggcggcggtacctactggccagcgggctggggcgagccgattgccgcagatgccgtggccgcgaacggctaccgcctcaaggaggacatgccgcttcgctatcggcgccgtgacgaatggcgagccaaccgggaccggttcgtcgaccaggacatcgtcaaggtctacgatgcccagcgccagcagcacgtggcggcagggtcagtcgcatttccactcgtcaagcaggacgacgtcgacgctatcgatcgggcaattgttcagatacttgcagtcgtcggcactcgtcccggatcgctggaagtcgatgccccggttcgatacctgcgcgcccggaccaagctgctgcacgaacagctgcgggagaagcaggccgccgacctacccgccatggaaatcgctgacgacgaggaggtcatcaggttcggcaaatccgacgccctctcacagtttgcgcggctcgcattcgaggattccgacctggcggacactgacgctgtccgggggccacaccttgttctccactggaggcacatggaggccgacgccattcggattggacaagaccttcacgcggagcaatga

SEQ ID NO: 27668 - DNA, 2469 bp, Agrobacterium tumefaciens F2
gtggggacgagacggggtagggggatcttggctagcttcgaggaggaatgtatcgagaggtactttctcgcgcccggtaacgctgggccgatcgggagcgtgtacctgtcggatgaagatctcctggagatcctcggagtcaacgacatcgaagaggcgcgccgccgattcataaagcttttgccagctggatccaatcttcgagattatctttcgggtgagcttcagccgacccgcgccagtgtcccgtcctacatccggctgctgatgtttctgtgctggatgcagactacggagacacgctggggcggcactcgccaatttcacgaaatattcgagggtcacatcggctttcgcccttggagtatgagcgggctcaacgggctgtgggagcatttccgggacttcttgaaaaaggaacatggagttattctcgtcctgccggacatccaccgcgtatacacgcaaatcggtcgaactctgcagttggcattcccgacctggcgggaccgggaggctttgcggaagcttaagaggcaggtttccgaacagcacttgctcgacccactggtcgttgcgaacactgttcgaacttcgcgaggctcgcttggtgagaccatgcagtcgttcgtctataacttcgaggaattcgatcaggctcgaaagcgtgggttcagagagtttgagaaaacgcccttctggaaggcatggtacgcgattgtcgccacgcaagccgccgccgagtacatcgaggtcatcgaaagcgattttggtgtttacgaactctaccgcgtaccgccggtcggggatcgcgttctgatctcggcgccggaagaggcactgaggctggtccccaaaccaatcgcgaagttgatttcaaaaggtttggtctgcctggagagtctgggctatggacgataccgggcgcaggcgaaggcgacttccaatgttcttctgatgcacgcgactaagtttgcacaatgcgacaggtcgaacatccgctcttcggcgtcaatcaattcaaagtgggtcgtggcgacccttcgcgggaagctgggtgagaccgagatcagtgcctccggtcagagggagttcgggtggcacgacggcattcgagtcggtgctggagcctacctcggaagatcaccacttacgccgaccgtctccgggcctgtgcctgaagcgatcaaggtagaggtgggtggaaaatcagttggattgatcagggtcgcagacgacatggccctaccgccaggtgtctacactggtgccgcggtcgctcgtagtcttggggcgtcgcacgaagtgctcctggttgctcgcgcgaacgaggtcagtccggtgcgacggatgccagtggagttagcgaaggatattcctgaagacgacttccactatggcacagctccatcggtcgctctcgacacggaagtctggtcgggcgttcgcatggcgcctggcgacgaactcctgacgatcggagaagccctctacgaacgaacagctcgcggcctgccgctgtctgaagccgttgacatcgtcaggcgtgggattagtcttctcgaagatcgcccgtccgagtgggatatcgtgcgattgtttgcggatgccgggtggctcgagccaaccttcctcagacatttcccggcgcggcgtctccttcaattgcaactgtcagcgtatcctgtcgacgagaccacagtcgttatctgcggcccaacgcccctggcggtcgtcgataggctgacagttgcggcaagagccgccggcggagcgatcgagacaagaaatggcgcctcctcatggtcgcttcctcggtatgtcttccgcgcgcagagcagcggcggtgtccaggagtttctgcgaagagcagaactaggcttggcgccgaaaagcgccccggcggtggctgatcgcgcagaccatggcgatccccacggcttccgcgtcgtcggcaaactgtcactcgaccgcgggttctttgcgacagccttcgacaaggagatgaccaacggtctgtaccgcatcgaacggcctgaaggccgaatgcacttctactatcgttcggtaatccccggaaagcctgatcagaattacgtttctccatccgtggcgttgttgtctcatcatctacggctcggcggggaggtgttcgagttcaaggacggcatcgtctttgctcgcgcggcgagggtaaagctcccgtccagctgggcaagatgggcttctgacctctcactgtgtaatcccggcctgtcgaacgcttcaggtttctggcgttatgagtatcccgtgggagaagcagcggtagccgcgatatcgaaactggttccagtttcgatggacacgggactgaccaagagctggcgggatgggttcgtcctgtcggcatccaatcgagatcgaaaaatctatgacaaccgctcgcggctggttcgctcggcggcacgcatgcgcgggaagaagtaa

SEQ ID NO: 27669 - DNA, 1920 bp, Agrobacterium tumefaciens F2
atggtactcgatggcgtcggctctctctggctggtcactggagagaaggacgagccaaaacacgtattggaggaccttgaggagctgccagatttcagcgtgccgatggtctcgacgctgtcgtcgacgatccgtgccagctctgaattcgagcttccggcgaccgtcgaagcattcaacctccccggacatttcaagaccaccactttcgtcaccgtgacgcgcatccttgcagcctatagcgcgcgagacatcgacttcgaagaggtcgttcgccgactgcgggagggcaggttcgaaatcccatcgagagagatcattgccatcgaggtgtccaaaggcgactggctcactagccatttcattcgccttccttccggttcgtacgggctttcgcccgatgcggatccgcgagcacttcctgtcaaaaccatcgagaacaagcctgattcgatgaaattgccgtcgggcctgctgatcttcctgtccgagcctcgatggagcctcgcgacagaaaaggatgtccgccccgaacatgaggtgctggagtctgccgagcgctggctcggtcgttcaacgctcgcagtagaaagcgcgccgggcgacgctaatgctgtcgacttgcttcggcaccacgtggcgacgacagtcaatgacgacgagaaagcggatatcgccgccgcggctcgacttcttgcaggtcgccaatcgatactcgacatcatgccacagatcctcgcgaaggatcctgcctttcagaagcgggttcaggagttcgagcttcaggagcaggaacgtctcaaggaaaggctccggtcgaaagtcgagtccgagatcgaagcggagaaggctcgtctcggggagattcgagcggaaatcgccgaagcagatgctcgccttgccgtcgccgggcagcgcgaactgcttcttcggaacgaggccgaaaagcacgacgaggtcatgaaagcgcgcattgaggaagctgcaaaacagctgcagggcggcgcaatagaacagaccgaccatcttcgtcgtgaactcgacgagcttcgagacctggtactgcaaatgcccagccatcccacaaccgtcgtcgtgtcggcggctgaggaaattccggaaccgcaacggccggacgtcaatggcacggccgtcgggccgaaggctgacgagggcgcgcgaaagagtattctcgcgggcttggcatctgcaaccgggatctcgcaagcccatttgatggcgatcctactcaaatcgacagacgaggtcccattgcttgtcggcgaacgggcttccggcgtggcagccgatatcgtggctgccatcggtggtgaggacagtgcggtcgccttctgcgatccatcgcgtatttcgtggcaggatctcatgcacgacgagacttcgggcctcgccgcagcggtggcgaaggccaaggccaatccggacatccttgtcccgatagcgatatgcggcatcaccaatggcccctgcgagtactggcttccccagttcgtggaatccaggcgcatcgggcgtcttccgcggaacctcgcaatagtggccagtgcgggcatcgatgggtcgcgagtttcgataccagactctgtccttcgcttcctgatgcctgtcgaggtgccgaacagcgccaagcccgttcgcaggttgtttgccggatcgtggcccgcggagttcgacgccaaccggtcgaacctcgccgatgcgatcgacgtgctcacgcagtcggaagcattcgagaacgggtcgctccaacgtgcggccaagacgctgtcgagaacgccacagggcatggcgatggctgaggtcgcccagccactcgtccggcaggcccagtggctggcgagcgtctccggcggcggacaatacgaattcaaaaatcgcttcaagaatatcgagggctga

SEQ ID NO: 27670 - DNA, 5712 bp, Alkaliphilus oremlandii OhILAs
gtgagaaatcctataggtgtatttgatgagattaagaataatagtatttcttatattaaaacagcatttggcactcaatttccatctattgaggaagagagagaattactattaaaaaaagaaggggtatttagtcgtgatccatggatagaagtaatacctagatataaatcaagtggaaaaacaataaatgatttagaaatagaagatactccggggttagataaagaacaactacttttatttaagaatcttgtaagtagagggttagtaggaaagtttccattatataaacatcaagctgaaatgttaaagacagcacttgacaaaaagaactgtgtcattacttctggaacgggatcgggtaaaacagaatcatttttattaccattatttgcacagttagcaaaggaaatgaagcattggagtaaacctaatgccgcacatgcacatcaaaatgattggtggaaaaatatagagtggaaagatgaatgtaaaaaaaataaaacgtcatgtcgtgtacctcaaagaaaggatcatgaaacacgtcaagctgcagtaagagcattaattctatatcctatgaatgcgttggtagacgaccaaatggtacgtttacgaaaggcattagattctaatgatgtacgtgaatggtttcatgaatatcttagtggaaatagagtttatctaggtagatacaatggaaatacacctgttgctggacatgaatttgataatgatggcaaacttaataagaataaagttgcgaaacttataaaagagctagaggagatagatgcaacagcgaaagaagtagcaaattacatacaacatgaagtagaagatgaaggcgagaaaaaagaagtgttggcttcttttcaaagattagatggagctgaaatgagaagtagatgggatatgcaagaaacacctccagacatcttaattagtaacttttctatgttaagtattatgctgatgagagaagaagataatgatatatttgagaacacaagaaaatggttaaattgtgaggacttacctgaatctcatcgagaggcggaaaaggaaaatcgtatttttcatttaattattgatgagttacatttatataggggaactgcagggacagaagtggcctatttattaagacttttacttttacgtttaggtcttaatcctaaacatccacaattaaggattcttgcatccagtgcttcattagagccaggagacgataaaagtcaaaaattcttgaacaatttttttggatgtgatgattttgaaattattacaggagagtatgatgaaggaacgactgaattacctgaacaaactttacctattgaaccttttatcactctagcagataatgcacaaaatctttcagatgaaatatttagccaagtagcaaaagagttaggaagtaagaagaagtttttatcgggtaagatggaactaattgatatactcatttctcctagatataacctacagagaatattattagatacatttaagaatgaagaaggtaaatataaaccaatatctttacaagagttttcagaaaaaatatttggatctaatatagataattggcgtaaagctgcacaaggtatttgtatagcccgttccttgtttgaagaagaaaaaatagaagatcataatcttccatcttttagattacactgtttttttagaaatatacctggactatgggcttcaactaaacctttaggaaaagtagaagatggtcgtccaataggtaaattgcattcaaaaccggacattatagataaagatgataagagtagagttttagaagtcctgtattgtgaacattgtggaactgtgttttacggtggaactagattagtagataaacaagaggctaatacatatgaaatgcatattacaactccaaatttagaaggaattccagataaacaactatcagtaatggttgaacaaagaaaatatgatgaatatatggtgttctggccatttccaagagaagatctacataaggattctgaaaagtggaaacatgaattttcagcccctaatggaagaggaactgtaactgcccaatggagccaatataaattaaatatttattcagggcgtgttaaaagcagtaaagtaaatcaaacagaaacagattcatggattaacggtcaattatatattactaagaaaaaagaaaatgaacagtttatagatgcgttgcctaatagatgcccttcctgtgcaactgattacagtaaacgcaatagaatatctccaattagaggttttaggacgggtttttcaaaaataagtcaaatttttactaaggaactatttcaacaaatacctgaagatacggatagaaaattagtaatttttacagatagccgtgaagatgcagcacaggtggcaaatggtgtagagagaaatcactactctgacttacttagggaagttatgattaaaactattaaagatgaagtgacacttgctcctgagatattagaggcaatcgagagtggaagggaatatacacaagaggagcaagatcgtataaaaaataataaggtgattaaagaagatttacttaaaaaactaggtaagatcaatgcttacaaatcattaccaccagaacataggatggcacttgaatctgagttagaacaattggaaagggaaattgaagaaataaaagaaaatgggaaatctagaattatatcatttagtcaattagtctcaaatgattataaacaatgtggtaaactgattcaagaattaataagtttgggcataaacccttgtggtaatgatttagataagcaaaaattctattggaataatgctgagcatgattggatagaattgttcgactttgaaacaaaaagttggaaaaataatttacctgttgatgctgatgaagctaagaagataatcaataatactcttagctataattttggaaggttattttttggtacgctttactttggcttggaatcctcaggacttggaattataaaaatagcttataataatgaacaattaaaaccttttgcagatcgattaggaatgtctttacaaacttttgaacagatatgtgattcttatttgagaattttaggtgaaagatacagatatttaccacagaaacctgtatttaatagatggaagaaaatttggcaagaccagtttgtggtagatgattttccagattacacatcaatttcagcatcacttaaaacatatattagaaaggttgctgagaactataatattcatgaagaatatttaggagaaacattaataaatgcactaagagcatttggtcataataatgtaaaaattaatataccaaatataaatataaagctagcaatcaaagaagatccaatatggcagtgttctaagtgtaaaaagtatcacctacacttttctgcaggagtatgtacgaaatgtgggaatgatcttgatgagaaagctactggaatttgtgaagaaatttggagtaataactatataactcaagcggttctatctgatagagaatcaatacgattacattgtgaagaactaacagctcaaacagataatcaatcagaacgccagaggttttttaaaggtatgatattagatgaagatagattatataaaaaagtaaataatatagacgttttaagtgtaactacaactatggaagtaggagtagatatagggaacttacaaacggttatgttggccaatatgccaccaatgagatttaattaccaacagagggtaggtcgtgcaggtagacgtgggcaggctttttcaatggttttaactttatgtagaggacgtagtcatgatgaacattactttgctcaccctgaaaaaataacaggagatcctgcaccagtgccatttttaacaatggatcaagacagaatcaaaaatcgcttattagtaaaagaatgtctaagaaatgcttttaaatacgctggagtaagatggtttcacagtccaacgcctccagatacacatggtgaatttggattagcatcagattggtgtagaaataaagataaagttattgagtggctaaataatatgatagatcagcaaaaagaaattatgatagcattattcggtagcattgataataatatgctaaattatctaaaagaagaacttccaaatcaaatagataatactttggataataaagagattactggagatggattggcagaaaagttagcggaagcagctattttaccgatgtatggcatgccatcaagaacgagagttttatatcatggtgttaaccctaaagatatggaattcttaacaatagatagggatttagaaatggcgattacagaatttgcccctgaatcggagaaaacgaaagataaagctattcatactgcaatcggattcactgctccctttatttttaaggggcggagctttgaagcaatttctgctgacccattaccttttaggcggttaatgggaaggtgcagagcgtgtggatatctaaaatctattcctacaagtaatgagttttgtccacattgtggaatatctaagggtgatgaagagggatatagagagtttaatatagcaattcctcgagcatttcgcacaaacttaggttcagggaaagatgctaaatctgatgatttcaaagtaagtagaaggatttctttattagcccaatctgaagatatagatagaactaaagtacattctaccaatacaaatatctatttatcagataacagtcgtgtttggagaatcaatgataattcaggtgagttatttgaaggcggaataaaaactcaaactaaaatacctaatcaatggattgcttctaaatttataaacgatgaagaaaaaggtgaagttgaattagagaagattgcaattgcagcaggtaagcatactgaagtattaagaatacaacctaatcaaatacctgatggattaaatttaagtctacattactctgatagtgcaataaaagctgcagcatttacagcagcgtttattatacaaagagtggtggcagaagagcttgatattgatccagatgagattgaaatttcacagttacaaaagtatgttagtaatgatgaagatggaataatagaaattataatgagtgataggctagccaacggtgctggatttgttcaatatattcataataattatgtagatttattaactaaaacttgtaatccaagtggaaattcatttgcagcaagtattatatcaccagagcatgcagaagattgcaaatctgcttgctatgaatgcctacaagtatttagtaatatgccttatcatggcttgttagattggagattaggcttatcatatttaagggttttattagacccaaattataaagcaggtcttgatggagattttgattttattgatctaaaaggatggaaagatgaagctgaggaattaattaaacggaattttgtagatatctttggttttaagtatgaagaatatggacaattacctggagctaagatgggtaaatataatattattgtagtacatccattttggaatacagaagaacatagagctaagggaatacttgctgatgcaatttatcaagcaggagaaaatcctttgtttgtcgatacattcaatttacttcgaagaccggggtggtgttatcagaaattgatgaagtag

SEQ ID NO: 27671 - DNA, 990 bp, Alkaliphilus oremlandii OhILAs
atgaaattgatatcacttttttcaggtgctggcggtatggatctgggatttgaaaaagcagggtttaaagtaatagcagcaaatgagtatgataaaactatatgggagacttatgaaaaaaatcataacgccccattaattaaaggtgatataagagaaattgcttcaggagatttcccagatgattgtgatggcataatcggaggaccaccatgtcaaagttggtcagaggcaggcgcattgagagggatagaagattcaagaggacaattgttctatgaatatattaggttattaagagataaacagcccaaatttttcgtagcggaaaatgtatcaggtatgatggcaaaacggcactctgaagcggtgcaaaatattatcagtcattttgcgggtgctggtagaggatacaatgtatttatacagaccttaaatgccaatgattttcaagtacctcaagataggaaaagggtattttatattggttttagaaaagatttaggtatagctgatttcaagtttcctaaaccaatagaacctagattaacgctaaaagatgctatatgggacttacgagaaacagcgataccagcattagataagaataagacgaatggggatcagtgtattgttttaaaccatgagtactttatcggtagctattcaacaatttatatgagtagaaacagggttagaagttgggatgaacctagctttactatacaagcatctggaagacaagcgccacaacatcctcaggctcctaaaatggaaaaggtagagaccaacaaacaaatatttataccaggtagcgagcagctttatagaagattatcagttagggaatgtgctagagtacaaacttttccagatgacttcaaattttactatactggtttacaagatgcttataaaatgataggcaatgcagtaccagtagaattagcctatcatgtagccaatcaaataatgacatacttaaagtaa

SEQ ID NO: 27672 - DNA, 2052 bp, Alkaliphilus oremlandii OhILAs
atgaattatttagaatggaatgaggctattgctagacactatttcaatgaaagtatggctggtagagaagtgatattgtttatggatgaaaatttaattaactcattaggcgagagaaaaaattcagatatagaagatttttttgaggccattaaggagggatcaaggtggtgtcgtggcgacactgtatgtgaaaaagcctacacaacatatagttggggtaagatacgtaatgaaccaggttttccgccttatattgcatatttagctttctttgttttagcagcaggattagatgaagattttgcaacacatgcgtattaccctaaattgagtactttattagacaaattagatgaaggaactaatggacgcagaccgaaagattttgataagatggaagaattatggtatgacttgcaagaatggagtatagataaagaacaagaaaaattaggaaaatttattgcaaggtctatgattaattggaaacatgttggattacctatggcgcaagtattaatcacacaagatgaaagaagtagattaccaaacttttttaaagaaagcagctttgatccagtttttccaccaacattagatgctatatcttctgcaatttatagaagtggaatatttagtcaaaaaacaaagcgattagcatctaccacagataaaaataaagcgccatttagggaagcattactgcaattaatcaaacaagatttattagaatgggatgggacgatagaggtatctaatgaagcaatacaagagaggcagaaaagtaacaaacaaagcattaatgttaccttaaggatctgtattgatggatttgatagatttacatcatctataaaaacctcattgagatttaaaactgcaaaagatttcccagacgatgaaatgacttttgaaagtttatttagcaaagtaacatttacttgtgaagaagaagaattaggatggtcaacacaacttctagatgaaatagaacaagaattattatgtgtaagtgcattggatttgctaaatggagatcaatttgaagataaagaatatggttggagtgcatctttaaaaccatcaaaactaagaatatttgaacgtgatgaagatcgaaatctaactggatggattgaagtagatagtattaaatcaaatactgaatactatatactttgccatgatagaattaaaaattcaattgaagagtggggatataaatattgcactgattttaaaatagaaaatgcaagcaatcttccaaatgggtggtatctatataaaactactgaaattaaccattcacatcccgatgaggatattttaaaacttccactaaattattcatttagattagatggaggaattaaagcaagtaaaggaaatacatattttaagttttgcccaccaagagttcatttagaaggtgggaaactagagcaattgtcaatacaagtatcaccagagaatcaggatattcaagaatatgaaaaaggcagatggaagtttgttaatggatgtgttaataatgatgttgtagatttaagtctatatataggtgaagaaatgattatccataaaaagattaattttcaaagtagcatgttaatgaataattattatctacctagaatgaatcgatttgggcatttattagaggaaaaagatgataatggctatatacaaggtgtacatataacagaaaaagaattacagaaactgcctacctatactcccgaaatcccaacatacagttcagatacaataatttttttaggaagagtacctggtcagataataagttggcctaaagaggatctaaatatagagtgggaaccaatttgggctttatctaaaattaagagagattattggaaggtacattttattggaagtaatatagacgaaagaatgagactaagcaaagagtaccctaagtggaaaaagtggagacaggaatttattcaaaaaaatgttgaactacctaaaataaaaataattagagagctatggctttcatacaaaaaggaggccagaaaactatga

SEQ ID NO: 27673 - DNA, 6081 bp, bacterium L21-Spi-D4
atgaaagaccctattggatcatttgaaacgataaaagagaatttcgtccggtacgttaaaacggctttcaagaccaaatttgatagcctggaagatgaacgtgaagcgctgttaaacgaagacaaagttctttaccggcaaccctggattgagccattacctgaatacaaatcgagtggaaaaactatcaacgacctttcttccgaagatttaccagggttaaatgaggcgcaacaggatacgttcaaaggcttggtcagtcaagggcttatacccggttatcaacttcatgcccatcaagctcaaatgttaaaagaagcattgtctggaaagaattgtatcataacctccggaaccggctctgggaaaaccgaatcattccttttacccctgtttgcacaaatatcgaaagaattttcttcatggagtgctaccggccagaaagagcaatatgcagatagttggtggaggggtactctaagcgcacgggagattgttgacacagaaaacggttttgtccttagtaatgaagtccggcaaagggcgcacgaaacacgtccccaagcaatgcgggcaatgatactgtatcccatgaatgccctggtggaagatcaaatgacccggttgagaattgcactggattcaagccctgtaaggcaatggcttaatgagaacactgggggcaatactatttcatttggaaggtacaatggttcaacaccgattgcgggaaaactggaaaggttgaatgaagatgggattcccggaatcaacaccacgaaggttaactcacttatgcgggaattacaggcaatcgaaaggaaccaacaaaaggttgaggaatatatacggcaggaaaggcaaaaaggaaatgaagtggatgagaaagaactgaagtctttttttcagaggctcgatggtgctgaaatgagatgccggtttgacatgcaggttgccccaccggacataatgatcaccaacttttccatgcttagtatcatgctgatgcgggatattgacggcccggtttttgaaaaaacacgccagtggcttgcttgtgaagacctgccggaagataagcgtgaccaggaaaaacaaaacaggatattccatcttgtcattgatgaactgcacctgtaccgggggacacaaggaacagaaatagcatacctgttgaaactggttatgaaacgcttaggattgcatccaggccacccacaattgaggatattggcttccagtgcttctttggaaccaaatgatgaaaagagtttagagtatgtaggagatttcttcgggttcaggaaagaagatgtcaaagataagttcgagattgttacaggtgaattaagtccggtggatccactgccggaagaagatgccccattgccaaccaatccctttattgaagtttgcaaggcatacacatcaacgagacatcaggttgacgatcctgcattttcggaagcatgtgtatccgcaggtaatacgttacgtcaagtcttcggtattgacgacaatgtttcgtctattcaggacttcttacaattactccttcacccagaaatcaagcttcgtgaaaggttttttgatgcatgcagtgtagtacatgatgggaaaaaagtaccccgtccagtttgtacattcaggaagcctggggatggtaaccctcctgaccttccttatttttttgaggccttgtttgggcaggtgaatgaagaaaaattacgccacgcagcaaggggactgttaatagcccgttccctgtttgatgaaccccaatataagaatctattccagcaagctggaaggagcttgcaaagattccgatttcattactttttcaggaacattgaaggaatgtgggcttctacatcatcagaaaacccggaagattcaaggacatcaggtaaactctatcctgtaccgagaatcaaatcggaagatgggcaccgtgtattggaacttttatattgtgataattgcggtacaacactgtttggaggtaagaggggagcgccaggtgatacgaatgctttctgcgaattacttccggtaagccctaacatcgagggcatccctgaaaaaacaccggcaaaactggttgagaaaagaacataccaggaatatggtgtattctggcctcaaggtgaccaggagtttattgcacatgaaaggacacggggtgaatgggatcacccccacgatgcctggtggaggcaattaacagtagaaggtgcaacttccactgaatataccgcacaatgggttgaagcctatctgaacaagcattcaggcgatgtagttccatacagcattgaggttgaagaaaaacctggaaactgggtaaaaggatactttttcagggtactcagggattcggataactccggtgttgctgataccagattacaagcgaacaaggatgagtttggaaatatgattgacacgcataaagcacttccttgtacttgtccggggtgtggtgtcaatgaacagtacagagctaaaggatcatctattcgtggattcagaactggatttgctaaaactacccagttatttgcaaaggaacttgtttaccagttgccagagagtgcaaaacagagaaaactcgttgtgttttcggatagccgggaagatgcagcacaaatagcgaatggtattgaaagaaaccattttacagatttattgcgtgaaaatttgattaaggaattgcatgacacaataattacaagagccagaataatagaaaggtataattcaggtgaagatttagatgaactaagaactacctaccaggaaaagatagatgaagtagaggaagtaattgaaaacagcgaaataagtcaagacacaccgaaccagagaaaacaagaaaagagacgaaatgctatccagcaaattcaagagatcaaaaaccggataatcaaagtaagagaccttgtacgttctgtggaccctgataaatgcgctccgttaatcaaaaggttcattcagcttggagtcaatcctggcggaccttccattaatcttcaggagatacaggatggcgacactgccaaagagtggtacaagttgtttgactttacaaaaggaactgaaaaatggatagacgatgaatctaatttccggggacaaatcgaaaggggaacatttgttcaattggccagcttgttttttggaaacctgttttactcccttgaagcatcaggattaggttatctgacggtcaatactactgctgaacctttgacacataatgctgccaatgccggattgattcgtgaccgattcctggaggtaatcaattcatctatccgcatacttggacataaatataaatacatgcctaatgattttgacaacccccgaattctggatgtaactgattataattcgtttccatcactattcaagaagtatatccggaaggtcgcagaactcaacagtattgaagaaactgacttgggtgaagcagtattaaatgctttgacagctcttgatgtgttgactggtcaggggattaatacgcaggaactttatataaaggtagcaaccggggacgatccggtatgggaaagtccaagagggagccgtccccaccttcataagtctgccggtgtttgcacccagtttccagaagggccaccaatacctgaaaactcaaccagtatttgcaaaaacttctggaacaataattacctttcgtatcattctgcggttgaaaaccggaatcccatccggctgcattgtgaggaattgaccgggcaaacggataaccagtttgaacgtcaaaggcatttcagggacattatcctgcaagatgacgggcaaccgttggcaaagagcattgacttgttaagtgtaacaacaaccctggaagttggcgttgatattggttccctgcaagccgtgatgctggctaacatgccaccacaacggtttaattaccagcaacgggtaggccgtgccggacggagaggtcaggcattttcagtgatcctcactttttgcagggggcgcagccatgatgaattttattttaaccatacccataaaatcactggtgatccacctccccctcccttcttgacaatgggacaagacaggattatcaaacggctgctttcaaaggaggtattgagacaagcctttataccactcatggctgacatacgggaagatatattaaccctttccaggaacgaaaggcaaacaagtgttcatggggaatttggaaagaccgaccattggcagaattacagggaaagcgtccaggaatggattaaccgtaaccgtgcggaaatagagagaacagtcgaggcattgaagccgggtattgacccaggcaagaagcaagagctagccgactggataatcagtaacagtgatgatggttttatggtaaaagttaaccaagtaattgagaatgatgaaatttcaacaattgacatatccgaaaaacttgcagagggtggtgtgttacccatgtttggtatgccaacttcagtgcgtaacctataccatgagatagcttatgacggacgggattacaaccttaaatccattgataggaatacagaccttgccatatacgagtttgccccaggtgctcaaaaaacaaaagacaaggctatccatacttcaatcggcttcacagatgattttattacaagaaatggccggtggggtgatccggtaattgttaatggctccccgttttataacgaaaggtggatggttaaatgtaaaacatgcaatttcattgcaacacaacgggaagaaccagaacaaaacatttgtgaatattgtggggaaacagaaagggtggatattttcccaataaagtccccggttgcataccgtacaaacctgtcgggcggaaacgattcaaaggagaactctgaaataaccctttcaaggcctccgatacttgctgaaagcaatgatgaggaatccctggtacaagaagcatcaggcaacaacttcctggctaaactcgcagacagagatattacatggcgggtcaatacgaatggagatttgctgtttgaagggaaacaggtaagaacagggaacttgttcccttttaaccggaaccaatgggttaatttcagtaaccagtggatattgaggggaatagaagataatagtgaatccggataccggtttaatgtccacgacaatgaagatgcttatgaaaaaattgcgcttgcagcacataagaacactgaaattttaaggattcaccccattcacatttcaccggcccttactctggacatgtttaaccaggtatcgtctctgaattatgccggaatacggtcagcattttactccgcagcattcctgttgcaaagggtgatagcagacaagctcgatgtggatccagttgaaatagagatagcagacatacggaagatatcttcggaaaacggcagggatatggctgaaatcattctgactgatgagcttccgaatggttccgggtttgtccggcatttattcaataatatcaatgaaactatccaggaagccataacaccacaggaaggaataacctatttgggcaatattcattctgaatcgcacaggcaatcgtgtaaagatgcttgttatgattgcctgaaggttttcaggaatatgaattatcatggcttgcttgactggcggttaggtattgccttgatgcgggtaatgacaagcaggaattatctggcaggggctgacggtcaattcaacggatttcttgaactggaaggatggcctgaagatgctacacggttgcgggatagtttcgcagaaagttttgagtttgatgtactggagggatttgaattgcctgcggttctggtctctaaaaccagaatatattatgtaataatcattcacccactttggaattgcaaaattaatgaaagcgggataccggatgtccctgataacacttggttagctgaacgtgtatttgaggtttatcagaaagcgcaggaaaataatggagtaatacggttcgtggatacttttaatcttcacaggaggccgggatggtgctatcaaaaattgtttactgaatga

SEQ ID NO: 27674 - DNA, 1173 bp, bacterium L21-Spi-D4
atgaagcataataatcaagaaaataaaatacccctcttgtcattttttagtggtggtggctttttagacatgggttttgaaaaagcgggatttgaagttgccttttcaaatgaaatagatgaggattttgcccggttttataatgaaggcatgagtagttggtctggtgaaaaaagagaagtaagcgcaatatgtgatattgatgaagcttccactaaagaaatagagggacgattgaaaggacggttcggaattattggtggtcctccttgccaagacttctcgatacagggttcaaaaaatggttttgatggattgagaggaacgttgacctatcattattacgaacggattatggatttgcaacctgactttttcttgatggagaatgtacctggactagtactgttgaagaaaacaaagaaagctttcaatgcaatactggatctgttccgtgaagaatacttgataagcactgaaagactcaatgccttgcactatggtgttcctcaaaatcgggaaagactttttgtgtttggggttaagaaaagccttgtaaaagatacatctctctacacacttaatgatttatggttcaactggcctgtaccatcctatcccaaagcagaaacatcttataattggggagaacctaaaggccggggtttggaaataaaagggaaaaaattgccagaaccacctcttgaattatgtattggagacctactgataagcaataatgaaaaacggacaattccaaatgctaacgagttttttaagctcaagaaactctctaaaattaggaagattgtagaaggggatacttaccgaccttcttttaaaagacttcatcgaaagaaatacagtcccactgcttgttatggaaacaatgaggttcatcttcatccagtgtacaacagaaggctgtctgtacgggaagccctaagaatacaaggcgttcccgattcttatattattagtacacaaggaaaactaagtaaaaaattcaaaatgattggtaatggtgttcctgttccattggcacatcaaatagcattgtcaatcaagaagtttctaagtgagttagaacactataaaccaaaaatgaatggacatttggtcaaaggaaaaacgaagccaagtgatgtcaaaaattcggtcgaagaacactaa

SEQ ID NO: 27675 - DNA, 2847 bp, bacterium L21-Spi-D4
atgaattatctcgaatggaataatgcgatcggtaaatggtttttcaacgaagagaaagccgaacaagaagtacaactgtttatttccaagcatgatttagttaaaattggcagggagaaagaacttgacggagatactgaaaaaatattcctcgattttatagaagccattagaaaaggtattcctgggcaatccttgaacggtaatatcctcgaacatgccctttatgcctataataaatggcaggagagccctgcaaaaatagacgggataccagttgagtaccctttatacttgggctatttaaccatatttgttttgcctttaacagagagtaatcaacctgatttacgtgttgatgcttattatccacgggtaagaacttttttgaaaaagtatgagcttcccacaatgccaacgcaaaatgagtattataattggaactcattatgggatgacttatttaactggagctttgaagaaaagaatactgaattaggatattttgaagtccatccatttaaaaatgaaagatgggtatatgtaggtaaacccctttcgcagagtattttccccattcatgccctcagacaactccctcagttttttgaaacttccggtttggttccaggagaggaaatagaagacaacacatttaggaagcttctgttagcaaatggggagagaggtttaggattgtcagagagggtacttaatgccatacgtcaatccagtaatgaattaggacaatccattataagtatagtgaaaaagaactacctggaatggactggtaatacggatcaatatgattcggaaactgaaaccatcaaaaaaggaaatacagttgcccaattgcgtctttgtattgaaggagacaaggccagaggatacaagacttattaccggctatacactaaactggactttcccgaagatttgacattcttacatgatgaacgggagcataaatgtcagcaattcggcaaggggtggtcgaaacccttattccttccgttcagcgaaggaatggagcttcaagatgatttgaataaatggaaagcaaagtttccagaaaaggatgtgaggttacttattgaaggcaaaaacttccatttgagtggttgggttgaagtaccatacatggttacatcaaggatgttgttactggtaaaggaagaacaatctccatccatagaggaatggggcgattgtttttcaaaaggtgattttaaaaagatcccagcaacgggaatacccgatagccatgttctctacgaaatatgtaatcctcccatcaaccatcctgacattccggtgttgcaatttaaatctgagaaaagggtaatgataactggcgggcttaaaacccgggcacggacatggctaaatgacttgcttcctgatgttgaactggagaatgggcgtggcaaagaaaccgtttacctcgtatatgaagacagtgatgaaaagattccgttgaagcgaaaggatattgaccaacctgtttggacacttcccccagacatcaaaatcaacaggggttttcatgtaaaagttgaaggcagtaaggtaaaaggagaacagttaagaaactttattgaaggttcccaaggtaaggtagaattgcttaacgaagggatgctgccagcccgtaatcaattcggtcagatcattagcagtgaagaaagtaattcgtacgtaattggaagtaagttattgactgaagatgaaagaaagttatggctgcgtcaagcattatattcgcgtgaattccgaccacaaataacaaaaggcaagtacctatcatccgtggaaaatgatttcaccgggtataataatttacttgtgagtttcctaactgtaaaaggtgaaagttcttcaaaagattattttgaagcttttgagtcagtctatcaagaaaagtttggtccagaagaaatagaatcacatccaattgaactttccaggttaaaacgctggtctctaaactacttggattacatgggaattttggattacgaatattccacaaagaaaattgtagttaatcccccgcaatttctacttataccaacatgcagtggcaggaaagtgcttttgattggaggcaggacaccagagctaatgcaaaaagtcaaagcggaaactgaaaaggaagggttgcacttgaaccttgaaccacaggacatctctttatcccctttcatcttgccaccaactgtatctgttacgggttttgatgaaaatgatgggaatagaatagagagaaaattgagaaaagtcgctgaagcctgctccatatccttcgacccaaataaacttccacagttcaggcttgcagaattttcgggtaatattgatgattacaaaagtcaactgacacccgatgaaagatttgatgattctggttggcctgcaagggtttttgacgttgatcaattacattttattccaatagaaacacgaagaatagataaaggcttctctctcgtggaatatcggttgacagaatacagctttaaacacaggttatggatgaatgaccatccttatgatgttaataagaactgggggcgctttatgattctcaaccgttacagaaaggaagtaataattaatgacagaaaaaagaacatagttgctattccagcagcgttgccactaccaagattaatttcagaagctatgacattattcagtggtaaagctcctaaaaggctgtttctggaaattgaaggaatcaatacatggttcaatatttatgaaaatattccaccaatatttgcttcaaactactttaggaaagtaggacaaacgaaaaaagaattgacaataaatttatga

SEQ ID NO: 27676 - DNA, 5862 bp, Bradyrhizobium sp. WSM1253
gtgcttgatccgatcggcggcttcgaacgcatcaaggacttcttcatttcgtacgtcgagacggcgttccgcatctcgaacgaggagacggcgaacggccgccgcgaactcttggaaaccgacggcgctctcgcgactgccccgttcatcgagcctgtgctgcgataccagcagtacaaggacccgctggagaagctcgtttccgacgcgcggttgagccacttgtcggaagacggccggagcgcctttgtcgagctggcgctttccggactgttcgacggtgagccggcccaaggatcgatcaagcggaagtcggcttacaacccgtacacccatcaagtcgagatgctgtttcgcggcgcgcgccgcggaaagcccggcatcgtcacgtcgggcaccggctccggcaagaccgaaagcttcatgctgccagtgctcgcggcgcttgcgaacgaggccgtgaactggcccgccccgcgcaccggattcctgcaggacaactggtgggccggtggcgacccgttcgtccatatgcgccgccatgaggatccgggccgcccgaaggcgttgagggcaatcatcctctatccgatgaacgcgctggttgacgaccagatggtccggctccgcagaacgctggactcggaagaggcgcgcgcagtcatggacgagcgcttctccggcaaccggatattcttcggacagtacacgagctcgacgccggtcacgggatacgaaatccatccccgccggtccaaggacaagggcgagcggtcccggagaacccgccgcggcaacgttcttcgcgaggagatgcggaggttcgaaagcgaccaggacgcggcgcgccagcacgacgcagcggcgcgccaggctgcggccgccgccggtgagaaggccgagccgacgaggttcattttcccgtcggtcgatggcggcgagatggtcagccgttgggacatgcaccgcgcgccaccggacatcctcgtcaccaacgcatcgatgctcgggaccatgctgtcgcgcgaggtggaggacaaggtcttcgaatccacgcgggattggctggcgagtgatccggaatcctatctgtttctcatcatcgatgaattgcatcttgtccgcggctcggccggcaccgaagtgtctttcctgatcaagtcgctactgcagcgcctggggctcgacaagcccgagttgatccacaagctgcggatactagcatcgagcgcgtcgcttcctctcgacggcgagaacgaagagcacagcctgcgatatctgcgcgatctattcgcgccctacgggacgagcgaaggaccgaacgatcccggcaccaaaaagctggatttctggcgcgattgcgtcgtgccggggacgccccatcttgatcgggtcgcactgagcaaactcccgaccgaaccgttcaccgacttagtagcggcggcagatccgaagggggaagggctcgttcgcgacgtgccgaaatcgaagcccgtcgaactcgcgctcgggaaaatcgccgtcgccttcggactgaatccgcaggacgccgccttcgtccaaagcctttcgcgtcgagcggccgaggtgctgacgaccgcctgcttcgacggcgagaacgtgagggctacctctatcgataggctcgcccaggtcatcttcggtagcgccgacgctacccgagcgctgaggggcttgatgctcgcccgcgcgcttccggaaagcgcaggccacaaggcgtccacgccgcaggggctgccttcgttccgcttccatggcttcatccggaacgtcgagggtcttttcggctcggtcgacgtcggcaatgacggcatcagaatcggcgatcttaccatcgagcgcggcacctcccatggaaaacgcacgggcgattccgcacgcggacggcggctcttcgagctcctgtactgcgaggcctgcggggagatcctgctcggcgggcagcgcggatccggtgctggcactaccaacgtgaccgagcttctgccatcggcagcggacctcgaggggattccggaaaaagccgggtcggaatattacgacaagatgacctggcagcagttcgccgtcttctggcccaggtcggccgcgccccgcatgtcagagcgcaactacgaccgatggacgaagtcctcgctcgatccaaccaccggcgccgtcaccgagcgcgacgaggtgcccgcaggccacatcggcggccacctatactttcagacggacgatgcgatacaaaaccaaaggggacagcaagtgcgcctaaggatggcgcaaccgttctgctgcccgaagtgcgggacggactattcgttccggccgcggacaggccgggcgagctccccgatccgcgcgttccgcaccggcgtcggcaaggcgtcccagatggtcgcgaccgagctcttcgaactgctgcatgccatcggcgcgcaggccaagagcatcgtcttttcagacagccggcaagacgctgcgaaccaatcgctggagatcgaaagactccatctaagggacctccgccgcgaaatcctcgtcaccgcggcgagggaatgcctcgcggatgcgcaggcgaggcacctcagccaggaagagcgggcgcgaatacttgccggcttgggtggcgacatgaacgccgtcgttgcgcaggtcaccgcttggaacaagatggacggcgagttgaagggaatcgacatcgaatcgaagaagatccgtctcgactaccttcttcaatacggcagcagtggccgcgcgctgtcccggatcacctccgagttcgtcggcctcggcatccatccttacgacgaagtggggcgagccaagttcgacgacaaaccctggtgggacgcattcgtccggacgcaaggcgtgaaccaattctctccgcagttgccggcagaccggcagctagacctcgagcgccggatcatgaccaaccagtacgaactggtcgaggacgtgatcttcgccaacacgttcttcgccctcgaggaaacggggttggcctatccgtcactctcggccgacgcgaccgacgaaatccgcaagctggatgcttggctgcgcgtgttcgccagcgcgtcaagagtgagagagggcaagtatttcgaccgcaataacttcgtgacgtgggaccggccccaggcggtgccgagaaacaaccgggtgcgcaggttcgccgacaaggcgttcggggcgggcgtggacaacggcttgaaaggcgttctcgatgcgctcgcggtgattggtcacaacgggggcgtggtcgaggtgggcaaactgcacctgcgcgtcgccgaggcgggcgatcattattggcggtgcgagtcctgcgagcgcgtccatctgcaccgcggcgagcaaatctgcacccgctgctacaatccactgcccgacaacccgaccggcgtcgtcgaggagctttggagccggaatttcctcggacggcgcatcgtccgcgggcacgatcagggtatcaagcgcttccgcctcaaatgcgaggaattgagcggacagaccgaggacttctcggatcggctacgccggttcaaggacatcttcgtcggccagacgaacgaagtcggtcgcctcgccgaagagatcgacatgctctccgtgacgaccaccatggaagtcggcatcgacatcggctcgctgcagacagtgtaccaagccaacatgccgcctcagcggttcaactatcaacagcgcgtcggacgggccgggcgccgcggccaggcgttctcgttcgtggcgaccttctgcagaggccgcagccatgacgccttctacttccgtcatccggagtccatcaccggagacgcgccgccgccgccgttcctcgcggtcgaccacgatccgataccccttaggcttctccggaaggtgtggctgcgctccgccttcgccgtcgtgcgggacaaatgcatagggcgcggggacatctatcctggcgacgacctcatgccgcctgacgtgcacggggaatatgtgccgaccggcgatttctacgacacaggatcgccgtggcccgaccggttgcttgcggccctgaagcagacgcaaagcgtgcgcgacgcgttcgtcgcctcggccgttctggacgaggagcaacaagcgcgtctgctcgcggcgtccgctcccgaaatgctgctcggagagatcatggaaaggcgggacgcggcgccccgcgacaacgccgggctggcccagttcctggccgagcaaggcctcctgccgatgtacggaatgcccacgcgcgtgcgcaacatgtacctcggcatggaccggacgggacgcggctcggatgaggagttgtcttggctctccatggaccgcgacctcgagatggccatcttcgaattcgcgccaggcagtctgctcgtcaaggacaaggagaagcacaaggcgatcggcttcacgggaaggctcctggatcccgagcggcgcggcaagaacattctggtgcagccaccgatgtccaattggatcagcgaatacggcttcgtcgggtggtgcgacgcctgtggcgcggccaagcatgagcgcgaacggccgggcggcggcgttcgatgcgacgactgccgtgcggacatgcaggccgcggaattccggcactacatctcgcccgcggcgttcagaaccgatttccgtcccgaggacggcgacttggacgaggtcggcgtgatgtcgacccgtaccgttgcaacggtggcgcgagagggcaaggcggaagacgtcggaagcattcggatccatgcgggtgccgggaccacgatcatgcagctgaacgatggccgcccggacgatctcggcgagcagcaactgttcgaagtcgaaatgatgaccgaccaggacgtcgcgacgttccctcggggcgtccaattggccgatcaagccatcgacaccgaggtgtccattaaggacaaggcgaaacggtttcagcgcacgggcgacggtatcggtaagttcggcctgttcgcccggaaggcgacggacgccgtcttcgtcgaagcgatccgattcaacgagcggctgaacatcgacctcgtggctaaaagcggcgaacgcacacacatcgctgcccgtgccgccgcaatcagcgccacccatctgctggtgcagaaggcggcgctcgagctcgacgtcgcgcccgacgagttcgaggcgctcgagccgcgcctgcggcatgaccggcccatgctgcagatcgccgacacgcttatcaacggctccggactgtgccgccggctatgccagccgggcaccgacggacgtcccgacatcgcccgcctcatcgaggagattctgacggcgtacgacaagtggcctcttctcgacttcgtggacgaggagcacgaaagcaaatgctcgacttcgtgctacatgtgcatccagcagtaccagaacaggcgctaccacccgttgctggattggcggctcgggcttgcatacttgcggtctatgatcgacccatcgttccagtgcggcctcgacggcgacttcgattccttcccggagttgagggggtggctcgcaaaagcgcacgccctcgccgaggaggtggcttcgatgcggccgaggttctggcggacggagcgggtagggtcgatgggactgccgtgccttgtcgagacggacgggcagcagcgagtgagccggaagctggtcgtcattcatccgctgtggcgggccgatggtacgcttcttagcgaccttggcgcatcgaaccagggcgcgcgcacgataccgatcgacaccttcgatctcgagaggcgaccgcttcgcgcgctcgaggtggcgggggatagggccctggcaccggttttcagggtgaccgcggccgactag

SEQ ID NO: 27677 - DNA, 1230 bp, Bradyrhizobium sp. WSM1253
gtgccgagctatctcgaatttttcgcgggcggtgggatggtgcgcgctggcctcggcggccggtggaagtgccatttcgcgaacgatttcgatccgctgaaggtccaggtgtacgcggaaaactggggcgaagaggaaatcctggaggacgacatccacaagctggaggcggaggatctcgggaagcgtgccgaccttgcctgggcctctttcccttgccaggatctgtccaccgcgggcaacgggctcgggatcggccagtcgagcggatccaaccgaacgcgatccgggacgttttgggcgttcatcgacctgatgaaggatctgaaggcgaaaggccgcctgccgcggatcgtcgtgctggagaacgtcgtcggccttctgaccatcaacggcggcgaggaattcaaggcagtcgtcgcggcgctcgaccggctaggcatgcgcgccggcgcggtcgtggtcgacgcgcgccatttcgttccgcagtcgaggcagcgcgtcttcatcgttgccgtttcgaagtcggccaagatcgcgaccgagcttattcgcgaggagccgcatactacctggcatccagatccgctggtgaaggctgttgaaaagctgtcgccacagtgccgcgagcaatggatgtggttcaatctcggcgccgctccggaactgaagaagacgctgaacaaaatcgtgaaggataagccggtaggcgtcgattggcacacgcccgccgagaccagacgtctgatcggcatgatgtccgccattcacaagcagaagctctctgaagccaagaaatctggcaagcgtatcgtaggcacgctgtccctacgcatgcggccatcgaacggaaagacggtgcagcggaccgagatctgcttccgtggcctcgctgggtgtcttcggaccccaaaagggggagggtcgaggccgcgcatcatcgtcgtgaacggctcggacgtccggacgcgccttctttcgccggccgaggctgcctcgctcatggggctgaaggccagctacaagctcccggaggtgtacgaattcgccttcagagtgatcggcgacggagtcgcggtgcccgtcgtctcgttcctgcgcggaaagcttctgacgccgctgctgcggtcgatcaagaaatcacgcgggaccgctgcatcgaggcccaagcgctccgcaggcggatccgccgaaaggagccggcgcggccagctcgaactcaggatgtga

SEQ ID NO: 27678 - DNA, 2559 bp, Bradyrhizobium sp. WSM1253
atgcgcgccgaattgccgaccaacttgccccagtgggaagaagcgctgacgcggcgtttcctgacggcagcgggcgagggcgtcggtccgatcaggtccttcgatatcagtcccgaaacgcttgcgatggcggcaggatcggacgccttcgcgggagctcaagcggtttcgtcgttcaaaaaagcgctgctgacgaacaagtggacgctctactccgccctggaggatggaagcttcaatagaaagcttgctcccgattgccccggctgcttcgcttacctcgcgctgacgatttttgtcgacagccagcgggacggcgatggcgcctccgaccagttcaggccgaagctcgcctcgttcctcggcgtagacagatccttctcgaagctggcaggcatcgcgaccatgtggaggtcgttgcgggactggctcttgcgccaggcgaaggcagggaagccgttccgcaggctcgtcctgcccgatgacgacggctggaaccagatcggccacaccgtgcggctgtcgtttccctcccggcgtgaccgcacgttcctcggacattttttcgaccagcatgcgggaattgcgtccgacgaaaaaacgctgctcgcgacgctgcgcaaccttgtcgaccggtcgaacgcgtcgaaaggcctgcatgacgccttcgacgaattctatgccgcttatcagagcgagcagcgcgcgctcgccgaacaccggttctggaagttcgtgctgtcggtcgccgaggcgcgaaacgtcgagatgtcgtcggatgtcgcgcttgaggtttaccccgacgaagacgggctccttcacttcaagatcgacgtcgccaacaaatcggaccgcgcgagcgtgcactccacactgcagtctgccgtcgcggcagtcggcaggcttggcccctcgaacctgcgaaaggtgacggaggcgggatacatcgtcttcaagcgcgtcggcacgtcccgttggtccgcagtgcctcgattttccgattgtcgcggcgaggtcaaggtcgggctgagcaaccgactgacggcggcggtcggcacgaagctcggaaggcttcggctcagcggcgactggagtctgacaaacgatccggtctcgattgcgcgggccgaggacgcgttgcgccggctgctcgcgaagggagaacccacgctgaccatctccggcgtgacggtgacgggtggcgtccggacggaccaccattggctcgggcgacggtcggttcttcccaggatcgagaccgatctcggattgccgacgatcgtcgccgagggggacaatcacgccccggctcttggctgcaaggagatcgagccgaacctgtacgcgatcaggtcgcgacgtccggtggccggggtattcgaactcaggagctccgcgagcaccggggcgaggcttcatttcgtcgccgatgcgttcgtccgcgacggacagaggccggccaacctagtcgacgcgccggagtggaacgataccgttaggatgctttcgcggacggccgagcctccgcagggttgggatgccgtcccggaggcgctggacgaccttctcgaagcgatctacgcaggcgggcgccggggctggagtgaggccgatctgatcccgctgctggagagggtccttcccggagagatcagcccttgggacttcctacgcagcctgcaggatgcgaccgtgctgacgccacttctgagagcgcgtcaccgcggacgtacgtggatattgggccacgtcgcgctggtgccgctgcggtcgcgcgctcaggatctcatattggtcgacgggtccgttcccgcgcttcagcgccgcgacttcgagcaagcagtcaaggcgcttggcgggagcgcgttcaggcgactggcgttgccatggagcgttcctttgacgggcgccacgggcgtggcgattgagaagctgcaggaacggctcggatggttgacaaaatcgcctacgataccgggacgccgcgctgcggcattcgacgatgacccgcagcgccgattggaagcctaccggcgggaatacgtctggtcgtgggacgcggggcgcttcacgttcgacggttccccgtcgcgcgtttgcctcacccgttggattcatctgggtgagcgcgatcacgacgtctacgtcgtttccggggccggcccggagcggatgttcgtgtcgcgatgcagcgcgatcgccgaggcgcacatgcaggcgggcagggcgatgtatcgatttgaggcggatcgtctggttcggataggccgtgacggcttcctgcccgatcgcatcgcacattggcttcgatatgaaaacttggccaacccgcaacttctgccgtccggtggttacgggtatcaggcgagtcgagatcaggcgacgaccgtcgcgaggctgctgcctcgcgcgatagaggctggcgtgacgcttcgcgcttcctgggacgccgtcgcgtccgcgcggcgcagcgggtttgccgaacgattggtcttcaccggcgggcgcattgtttcaggcagggcgcctctcgacgcgacgcagcggagcaactcatga

SEQ ID NO: 27679 - DNA, 2091 bp, Bradyrhizobium sp. WSM1253
atgagtgcgatcaatacattcgtaatcggtcaatgcacgcgcgtgaaagactcagttttcatgaaggcgcgcgcccagtccgtcgacggcgtgatgcgggacctgacccatacatcgcaaacggagttcccgccggagggcgagatcgagcttcgcggcgcgcgcgcttttctgaagcaggacgattgggcaatcgcgaagcccgttctggacgggccgcctcggcgccagcgctgggtttcgccgactgccaagaaactgctccctttcgaggatctcagcggcctgtccggatcggaagcggcgcgcaggcttctggtcgaaaccgggctgcaggacacctacgtcggcgaaaaggtttgtcgcatcggcctcgacgaaatgatcgttgtcaaaatggctaaatccgaggacggcaggagccgcgcgacggcggccgacatggcgcggctgcccgtattcagcttcgacgccacgaagatccttgccatccccacgccgggcggctcgatctcgctgatggaaaagaaccatcagtcccccgagattaagctcgcgaactggacgagcgatgcgaaatacgtcgagcagattgttcgggcggcgctggcgggcgaagatgacgaacagaaggcaagagcggcgatggccgcgacgcttctcgcgcacgcaggcaggcttgagggcctgctttccggcgcaggcgagccggatctgaacatagcccaagaaatttcacggtcacggcgcctcggcgagatcgtgacgtcgcgaccggcgctggtcacggacttcatgcaggcgctgcggcgcgacccggccattgcagcgcgcatcgagcaggagatcgcgcggctgacagcagacgccgtcgaggcgaagcgtgctgcgctcaccgcagaattgacgacttccatggaggcggagttcgccacggtgaggcgtgcacgcggcgagaaactcaaggcggagctggacgacctcgaaacgtcgagcctgcaggatcttcaggcgaagttggacgccgaggagaatgcggccctatcggcaatcgaggtcaggaagtcgggtctcgagaaggccgtcgaagaactgcagaagtcgcgtgacgcgctgaaagaaagcaatcgcgccaaggccggcgaaatcgaggcgcttgacgccgacatcacgcggctttcgttggaggccgtcgaccggaaagccgacgtcgatcgcctgcttggcatggagcaggtgctgcaagacgccggcgaccgcgccaagacttcccaggcaagcccgctgatgccgctcgcgaacccgtcgccttctgcaagcccgctgccaatcggcgagatctccgattggctgaaggcctcccaattgctcaccgaagcgggccgacggggcgtggcgcgggtggccacccttgtcctgagcggcggcgtgccgatcatcgaaggtcctgaggcggacgacgtgctcgacgttctgtcgtcgatgctggccggcggcgccatcaccacgctcgactgcgacccgacgattatcagctacgacgatctgtggcgccgccccgggcacggcgagccgacggcgcttgggctggctttggccgacgtgcaggacagatccatcgtccgactttgcgcgatccgccgcgccgacctcgcgccctcgcagttctggatcgatacgttggcgcgcgcaggcaagcaacggtccctgccgagagaattcctgctgtgcgtcacgcgcggcggcgaaggggacggcgaggcgacgagctctccatcgacgttccgcgctgaggggtggatcgaacgcacagcgggcgtcgcagccttggcgtcgatcggcaacgacacgttgcagcgcgtcgtcgaattatcgagcgtcggatcggaccccgctgcggccttggcgttgatcggctccgctcggttgccaatcaccgacgcccgctggctggccacgttcgctccgacggcgaaagcggttctgaagggcgaggcgggcgggttctcgaaggaagtccttgattctatctctggagacgcgaagccgaacctaaagctgatcgacaacggaggaccgtcgcgtgcttga

SEQ ID NO: 27680 - DNA, 5865 bp, Brevundimonas subvibrioides ATCC 15264
atgtacgatccgatcggggcgttcgagcgcatgcgcgacttctttgtcgcctacctcgatacggcatttaagattcgctcaccggctgtcgctgacgcgcgccgcgagctcctttcgaccgccggacgcatgtgcgccgaggcgatgatcgagcccgtgctccggtatcgctcgtcgccgcaacggctggaggacctgatcgaggcccccggcgcgctagaccccttgtcccgcgaggcacgcatcgccttcacggagctggccggatccgggcttttcgagggtgaggatgtgagcggaaagccttggcgacgccggccggccttcgctccctatgaacaccaggcacggatgctcgagcgtggccttcggcccggaacgccaggcatcgttacctctggcaccgggtcgggcaagaccgagagctttctcctccccatcctggcgcagatctcaagcgaggccgttggctggcccgcgccatccgctccccttggggccgaggattggtgggagtccgacagcgcggatttccgacccgcgcgccgcgccgagagcccgcatcgccccaaggcggtccgcgcgctcattctctatccgatgaacgccttggtcgaggaccagcttacccgtctgcgcaagacactggattccaaggaggcgcggcaaacctgccgggaccggttcaatggaaacctcatctattttggccgctacaacagccaaactccgagcaccggcttcaatcgccatccgtatcgggcgggtgacacctcggagcagcgtgcccggcagcggcgtctaaagagaaaccgcgaacatcttagggcgatcgccgagggccaggcattggccgaaacctacgatcgcgagcaggcggcgaagttgggtcgcgatgtggaggaggaaacgcgttttctcttcccggcgatcgatggagcggaactcaacacccgctgggacatccaagcgacgccccccgacgtcctggtgaccaactcatcgatgctgaacgcgatgatggcacgggaggtcgaggaacccatcctcgagcagactaggtcctggctgcgggcgaacgacgacgcctacttctaccttgtcattgatgaactgcatctcgttcgcggctcgtcgggctcggaggtcgccggacttctgagaatgctcataaacaggcttgggcttgatgatcccgcccaccgccacaagctgcggatcctcgcctccagcgcctcgcttccgatcgatggcgtcggcggcgaggcatcgctcaagtatctctgggacttcttcggcgagaacggcacattctcggccgccggcgttggcgcggaaggaccagccttctggtccaactgcgtggtgcctggcgaacctgaggccggtgtcgagcggtcggcgatcctcgatcccgcgccattttcgggtttgctggcggacgcgtgcggggaggcggcggcggttcttcgagcaccgagcctcgacgcgctcgacagcggcattacccgggctctcgccgccgtgggcggcgccgcgcctgaacttgatcagcgcgcacgcgatctggcggaagcggcagccgctgtcctgttatccgcttgccggagggaagacggtctcagggcgcgcgcggccagcgaactcgcggttcgaatatttggcggtcccgatctacgcccgcttcgcgggctgttgatagctcgcgcgctgggcgatgtgctcgcgtccgaacccggccggaaggctagggtctcggccaccacgccttcgttccgcgtgcatttctttttccgggcgctggagggtttgttcgcgacgatttcccggggcgaggatggcgaggtcgcctattcatccctgtcgatcgaacgggggtcgggtctggctcgaacgggcacggacgggccgccccggcgcctgatcgagaccctgtactgtgaggcctgcggcgagctcttcgtggggggcatgcgttcggccaacggggcgggtggagcgatagacttgctcccgtcctcggccaaccttgaggcgcttccgttcggcgcgtccggcacggagttcgaggatctcagccaccaagagtacgcgatattctggccgacaagccgggcgggcgcggagactccagagactatgagcggccgggacgccagccggcccaggtgggacgaggcctatctcgatccgtttggcgcgcgaatatggcgcgatcgcctgaacgaggacgtggtccgagggctcgtcttcaatcggtcgacccaagcctcgcacaaggacgcgcgcgatcgcgcgtttggtgatcgaggctcggcgacacccgccgcctgcccggcgtgcggtacctcatacgttctcagatcgcaggggcgatcctctccgctgcgcaatttccgcacgggtttcgcgaagacatcccagctgctcgccaccgagcttttcgaggtacttcacgcgccgagaccggcggtttcgccaaaggcgatcgtcttctcggacagccggcaagacgcggcgagagccgcggtggaactcgaggcggatcacttcagggccctgatccgggatgtgatcgtgcgcttgacgcgcgagaggatcgacgcggactatcgggcggaggaccgggcgaccgtcgaagaggccatgcgtgccgccgccgccgagatggactacaccgaggctgcgcggctgaaggcgattttgacccagaaggagtcgctggcgatcgagaccgagccgctcacggccctcgcgcaggatccggatgataccgcgtatctcgcgacgacgccggccgccgacccccccatggcgcagttgatctcccgcctcgtccgtctcggcatccatcccagcgattccagcgtcgcctccgatgatgagtggtggcgactgttcaccatggatggcgaaaatctcaaatgggcgaggccctcgggagcgctggacgccaacgcgatccagggcaaacgccgcgagatcgcggaagagcagcgcgaggcgctgcatgacacgctcttcaacaagacctacttttcattcgaggaggcgggtctcggctatcccaccttcttcacgcgcggggaatacagcgcggagcgtgacgaacttgacgcgctgcttcgcgtcttggcggacacctaccgggtggatggatcgcgcttcgtggacgtcagccaaatcaagcagtggtcttcagcggccgacgtaccagtgggaaatcgggtgcgtcgcttctgcgaggcggcctcgcctggaaatggtgatcagtatctcaacaccgcgcttgaccgcttgaggcaagcggacctggggcacaatggtggtgtggtccggctgttctcactgggcgtgaggctggcgagggcggacacgccattctggcgatgcacgcgctgtgaccgggcacatcttcatcgtggcgctcaggtctgcactcgatgcggtgacccacttcccgccacggccgcaggggtggcgaaggatctgtggcggcacaatttcctcgctcaccgtgtcgatcgcgcgggcaccggcgcggaggaacccttccgtcttcgtagtgaggaactgaccgggcagacgcgaaacggcgcggagcgtcttcgtcgtttccgcggcatcctggtcgaggaaggggctggacaggcggcgaggctgccaaaactcggcaaggaaatcgacctcctgagcgtcaccactacgatggaggtggggatcgacattgggccgctgcaggccgtctaccaagcgaacatgccgccacagcgcttcaactaccagcaacgagtcgggcgggcgggtcggcgcggacaggcgttctcgatcgtcgtcaccgtttgtcgtagccgtagccatgacctgcactatttccggcatccagagaggatcaccggagacgcgccacccccgcccttcttggccgccggctatgaggacatcccgctccgcgttgtccgcaaggcctggcttcaggcggcgttcaagtatctccgcctgaagcaccaagggcgctatcgcggctatgacgtccaaccaccagacattcacggggagttcgtcctagtcgcggactacaaggataacgcctcgccctggcgcgatgagcttcgcgatgcgcttggcgcaacggtcgcggcccgagacgccgccgttgtcctcgtcgcgggcgacttgccccccgcgctgatcgcgaaaatggaggatgcgctcgaggtcaatgtcctgatggccgcgatatccgacgttatcgcgcgtgaaggacggtgggatatcggcgtggctcacgcgctggccgagggcgggctgttaccgatgtatggcatgccgacccgcgtccgccccctgtatctggggctccattcgtcggggcccgacgatctcgactgggatacgaccgaccgcgattcggacctcgcgatttacgagttttcgccgggtgcgtcgttggttcgcgacaagcgcgttcataccgccgttggtctcacttcgtcccttcccaagccccaaaagcgcggtgcgtgggtgatgcctggccaagaccagaggtcggcgcatgacgatgaatggtggatggccagatgcgatggctgtggcgggtggactcgcgccgatcaacccgatgacatgacctgcgtggcgtgtggcgccgcgatcgttcgcgacgcgttcaagcactgcatatctccggccgcgtataggaccgatttcaagcccaaacgcaccggtgaggaagaactgagaatcgttcggtcgcgcattgtctgcgcggaagcgtcggatgtccgaccggtccgcgcggagggtagcaacctcgccgtcagtcttgagagaacggccaagatcgttcgtctcaacccgggctatgacccgaatcccctgcaatcggcgggtttctccttcgagcaggggcggcagcgcgcggctcccaagccaagcgcgtggatgaccttctcgaaccaggcgttggaaaccgaatatgcctcaacgctgcgcagtcccgactggaccccggatgcggaacccgtctccggctggcttgcgtccaggaaaaccacggacagcttgttcctgacgcccgccgtgatgcatccgctgcttgatatctcgcgggtcgctggcgcggacgagcgcgtcgccgtcagggcggcggccctgacatcgtgcttcttgctggtcgatcgggccgccctggagctggacgtcgatccgggcgaattcgatattcttccgcctcggctttaccagcccgacggcgtcaagcggcccatgcttcagatcgccgacacgctggtgaatggctccggtttgtcgcgacgtcttgcccaaacaccggaaaggccgtgggcgatcgacctactctcaagcattgtcggagatggcgcgtcttggccgctgggcgagttcatgaccacggcgcatcgacagtcttgcgatcaggcttgctatgagtgcctccagagatatggcaaccgaagctatcacggccttctagactggcgcctgggcctctccttcgcccgggccttggtcgatcccggttacacagccggggccgaaggggatttcagcgcgcccgaactcgttgattggcgcagcatggcggatgatgccctggaacgcgtggcgaggggaacgagcgacctagaggttatcagcagtggtccacttcccgccctgaggttgaggcgcacgggtggcgacgccgtgatcgcgatacaccaccccctctggcgcgttgaaggtgtcatctcgccgctcattgatcagatgcacaggcttcaccccggtccggttcgcttgatcgacagcttcgaactggcgcggcgaccattccagaaaatcgcgggcctttcattctga

SEQ ID NO: 27681 - DNA, 1134 bp, Brevundimonas subvibrioides ATCC 15264
atgagatccgtggagttgttcgcgggcgcggggggccttgggatcggcgtggcccgagcggggttcgaacccgccgccgtcgtcgaatgggaccggtgggcctgcgaaaccttgcttgagaacaagccttggcccgtccatcgcggggatgtccgcgagttcagctacgaccacctcgccaacatcgagctggtctccggcgggccgccttgccaacccttctcgatgggcggcaagcacaacgccttcctcgaccgccgcgacatgttccccgaggcgatccgcgccgtccgtgagctgcaacccaaggccttcatattcgagaacgtgaagggcctgacccgtcaggcgttcgccaactatctcgagtacatccggctccagcttcgccaccccgaaatggaggcgagggccggggagccttggctggaccatctcgcccgtctcgagcgccacgaaaccagcgggtcgcacgcggggctgcactacaacgtcgtgctgcgcttgctgaacgccgccaatcatggcgttccgcagaagcgggagcgagtgttcatcgtcggcttccgctccgacctgagcacggagtggaattttcccgccgaaacccattcggcccgagcgctcgcttgggcgcaggggcccgagggcgactactgggaccaacacaaagtcgcgaggaacaaccgaccactgctcgtggtgccgcccaaggagaggcccgaaagccagccatggttgacggtccgcgacgcgctggtcggcctacctgatccccagactcgccccgaggccgcgaaggcctttccggatcaccgtttcattcccggtgcccggagttatccaggtcataccggaagccccctggatcaaccgtccaagaccctgaaggctggggtccacggcgtgcctggtggcgagaacatgctgcgtcggccggatgggtcggtacgctatttctcggtgcgcgagagcgcgaggctccagaccttcccggacgatttcctgttccacggtgcgtggggtgaaaccatgcgccagctcggaaacgccgtgcctgttcgactggcggaaatcgttgcccagtccgtgcgcgcgcaactcgacggtgtcgaggctagaggaagcgtctga

SEQ ID NO: 27682 - DNA, 2157 bp, Brevundimonas subvibrioides ATCC 15264
atggattgcgccgcccttccgacgttgtggcgaagacttgaaagttcgtgcgcggccgcgccgccggatcgtcgactacgaccgctagtcctccccgatcctaggcaccgaacgcaaattggtcacgccatcgagctgaccttcccatcccgacaggatggtcggcgcctgaagcgggaccttgagcagggcggactcgcggatcccaaccacccggtggcggtgatgcgatggctcggcggacgagtggaccgatactcaccgacctttcgggagaccttcaccgactttcagatcgcttggcggtcgggcgcgcgagcgctgaccgaccaccgtttctggagcggttggcgaatggtggtggagacttggcgtccgaccgacgtcccggaagcctttcgggtcgtcagcgacgaatggggaaaataccagctgatcgccatggacggggagccgacgacgctaagtcgggttgaggcggcatccccgccgggtctccgccacctgttgaccaacggatctcccgtgcttctgcgggagatcgattggggccaatggacgtgggtaggccggggccggtccgccggtcgtgaggcccaagccgctctcatccgcgagaaaacacacagcgcgagcctgttggctcaactggatcgggccgtggttagcgaagcaccggggtgggccttcaccacggccgtcgatctcgttgctggaaccgccgtccgggatgcggtcagtgacgacgatctgatcgacgttcggttcgccggcgtcccgaggatcgatggcggccggttgtcacgcccctcattccccattcgactgctcacgacggggcccgtcgagagcgtcacgctgtcgggcgccgtcgcggaacaattggaactccagcggagcgggccgcgtgaatggttgattactccaaccgtcccggtcgaaggacacgcccaagttagcgtcaaggccacctgcggcgacatcgtgcgatccctttccctacgccggtcggcgctcgcgccggtgctgggcaaagagcttccggaccgatttctcattgacgaggaagcgtcggggtttgcgccgactcgcgcggaagccgttgctacccgcttcgaggaccatgagagcgccgcgacagcctgcccgcagcaggggctgctcgacctcgtggaatacttggctgcccgcccttgggtgatgccgctctctggcctgctggaactggtggacacgcttccgaaggcggacgccgctggcaagtggtccatactgcgcgcgcttctcgaagccggcgtgatagagcccctgcgcgtgaggggttggcgcggtggtgccgcgatagcgcggtccgcccgagccgtcctcgttccccaacaggacgtttgccggctacgtcttgacggtgtgatcaacgaggttctggcttctcgcgttcagggcatcgccgacagacttggcctgggcgtgtccattggcccgggcgtcggggattggtcattgcctctcctgtcggtcgagggagaccgggaggccctcctcgcgctcgcggcggaggtgggggtcacctgcgaatacatctcacccgacctggccggacacgttcgcccgcgtgacgccgtgccgaacgccgacggctcgacacacggagcgcgccaactcgtccgcatggccgacacccgcctcgccgaccgagggattcagctgagcctttgccgcagggaggcggaggacgcgccgccggtctggcttgttcaggccagtgagggcgagcctcgatactggactcaccgccacctggccctcctggacgcgtgtggcctcgcgggcgtcgcgcctttcgatatccgggacggacttctgaccgcgaacgtgcccggtgtattcttgccattacccgtggcgcgctggctcaggctcgccacgggcgtgccccctgggccgttcgatggcggatacgcctataaaacaacgccatgcgtcgaggccatgatacgcgagttcatggggatggaccgacctgattcgagccgcttccaacgcccgcgccccgcgggccgcgggcggggacctggaatggcgttcgcgagcgggtcatccgtggaggtcctgccaatctggcgctgggcgcgcgtcaaccgtggagcctctcgttga

SEQ ID NO: 27683 - DNA, 2070 bp, Brevundimonas subvibrioides ATCC 15264
ttgagcaagtcgaagttggagtacaccaggtttcatttcgtcggccaggtcgactacgcgcagcacaatttcgcgcgcctgaagccgctgctttattcggagacgggtcgtcgctgggacggcgtggtcgatcggacatggttcccgaacgaaggtctcgtgttcacggtccaagcggacttgcgatacgcggcgaacggctctctgtggattttccgcgtcgcgccaaacgctcgcggcgaggcggtcgacaaggatgtctacagcgccatccagtcgaagcccgccgtcgagctgatcgtcgggatggaacccttggagatcgagcagctgcgccagctggtgacggaagaggggttcgtcggcgcgaccgctggaaaggcgggcgcggcggttcccgagctcaacgaccggtgggtcgtgctgaacgaattggagcgtgacgaggaggggcgcttcaggcccgcgccctcattgaacctgaagcacctcaaggtactgatcggaacgccggaagagctttgcggcatccccgcgccgggcggtcaatttgtccttcctcccatccaccccgccagcggcgagacgcgcaactggctcccgccgacgctgttcttggaaacattggcggccgacctgaagcgctggatcccgcacggtccgcagcggccgaaagcccaagcggcggcccaggccctccgggcgctcgcgcccgagatgccgggggtgtccgcgcttcgcgccgacgacgccaaggtcgcgatggcgcgggccacgaacctggctgaatccgccgaaacgatcacgggcgcggcggccacgatcctcgaactgatcgtcgagcaggaacccttcaggaccgagatcgaccgacggcgagcagcgattaccacggagctcgagagcgaggccttggcggctgtcgagcaattggaaggcgcggcccgggaccggctgcgggtcgaacaggcttcgctgcaggaggagattgaaggggccaaggctcgacgcgaggcactccgagccgaaatcgaggagctgggagctgaagcggatctcctcaggtccgctcgagccgacaatgtcggcgcgctggaggcgcaagttgacgccgtcattcaaagggccgcgtcggaacccgcgcgcctcctcgccgactggatcggggtctcgggtttcgtcgtgggaggaatgagcagggagtccgaggcgcccattgcgtccaatgtggaccagcgttcgccggaacccacgatagcgctccccgccgctcgtccgatctccgccgccgaccttggcccgttgctgttcgcggcggggccggccatcaaccctggccacccgcggctcctgataatcgacgccgccctcagggcccgggaactgccagtgctcatcgggccgttcgcccgcgagttcgccgaggcctggctcgccgtcgccggaggcgaaatgccgttgtccgtcatgaccgatcccacgctgctttcgatcaccgatctgaccccgcgaggggcgcggggagacaaggcgccgcttcaggaggcgttcgagcgcgcgcgatcccgaccagatccggtcgtcgtgcttctcgatgaccttgatcccgcctccgccggattctggctgcccgaactggcgcgatcccagcgacagccgcagcggtacggctttccgcccaacctattgttcatcgccgtcgtcgaggcggacgccagccaaatgaacctcacccagctgcgggcgggggagctcttcccattggtcttcgacgactgcgaagtgatcgacacgagcccgtcgcgtccgccctctccactcacactgatacctgaaatcatgaatgggcccgccacgtcgacgagctggaccgcgagagtctccgcgctggagtcgtccctgagcgtgacgttcaaggccgacgacgccaagtcgatcgccggtgaactctcggacttcctgcgatgctgcaaggggcgaggcgcgctcgcgccaaccgatggatcgcttgccaaccttcttctgaaatccgcgagccgcttgcgtcacggcggcgctggggaaagctga

SEQ ID NO: 27684 - DNA, 5907 bp, Burkholderia multivorans CGD1
gtgtttacgactcggctattcagctctcgacaaactgttccattaacgttaagtgggcttccaatcatgctagaccccctcggcgctacacatcgaattcgtgaattcttcctgtcttacttggagaccgcgtttcgaattcgagataaggaagttcaacttgcgcggagagcgctgctgaatgaacctggaacactcacgaccgaagagttccttgaacccgtgccgcgatacgaacaggttccacatactttgcaggagcttgttgacctggacacagatagtccgttggaggagttcgaccgggacgcgagacgcgcctttgtcgagctggctctctccggactttttcccggcacggactctgatagcgaagacattcgcagacaaagtaccgttcagccttatgagcatcagtgggaaatgctgaggcgtggcgtccgcgcggggcacccgggcatcgtcaccactggcaccggttcaggaaagacagaatccttcatgttgccaatcttagctacgatggcgaaggaagccgttcgttggccggcaacgtcgcgcccgacacggcagtcgccgtggtacggcgacgcgagcagcgaatttgtccctcagcgagagcatgagagcgtcgaccgtccgaaggccattcgggcgttgattctgtacccgatgaatgcgttggttgaggaccaaatgacgcggcttcgaagagcactcgactctgatgaggccgcagcggtaatgagtgaaaggtttcacggaaacagaatttactttggccgctacaccggcgatacgccggtgacgggtcacttgaaccaccctcggagggcgaacacaccggaggagaagcgcaagcgcaagcgccgaatggaccagttacggaccaagctcaatgagttggcacagacgcaagcgatggcgcgcacgcacgatgcgaacgagcgggacgctgctgaaagagcgggtgaacacaagcccgaacctacccgattcctctttccgtcagtggacggtggagaaatggtgaaccgatgggacatgcaaactactccccctgatgtcctcatcacaaatatctcgatgcttgccacgatgctggtcagagaggttgatgcaccaatctttgatgcgacgagagaatggcttgccaaggagagggacgcgtacttcttcttggttctcgacgagttgcatctgattcgaggttccgctggcatggaggttgttggcctgttgaggagtctatttgcaagactcggtctcgaccgccctgagaatcgtcacaagcttcgaatcctcgcgtcgagcgcgtctcttccggacgaaggaatagacgcgaccaccagcttgaaatatcttttcgatttttttgggagctttggcacgtcatccttcgatggcgacaacggcttcaacagtcccggacaatggcgaactgccattgtccggggacgccaaatccaacataaattcgatagccgtctcccgcttgaaactgcgccattccaaaggcttgttgaactacttgcagttagtgaaggtggtttcgcgtcagcacctaagaagcgttcgcaggcactcgattcagcactgctgacggcagccactgcattgggcgttaaaccaaatgcttctgatgtgtcagcaacgctagcagaagccatcgccgccgcatctgctgcgatatcttctgcttgtcggtcaaatgcagatggtgtgctgcgcgcaacatccgtaactgagatgtcgagccgcctattcggaagcgacgcaagcgcccctgaggcactacgagggctttgcattttgcgtggcttggcagactacgctggtgactctggtctgtacggagcgaaggcatcggaccgacttccgagcattcgaatgcacgccttcttcagaagtatcgaagggatgttcgctgcaccgtaccgagattcgaccggaaaattgaggtttgaggggctaacggtagagcgcgggcgcgcgcatgcttcgtgtaacgatggagaaacgaggcgattattcgaattaatttattgtgaggcgtgcggcgaactttttgtcggtggtcgtcgcaactccgatgaggactctgtgacaacggagcttctctcaaccgcaccaaaccttgaacagttgccggagtctgcggcgaacaccaactacgaaactctcagttattcacaatttgcgattttttggccgtgccgcaatgaacccaaagacggtgaaactgatggagaagcatggaatcccgctacgctcgatacgcggaacgccgtcgtcacgcgtgcagagcggcacgagactacgagcctgcctggcagactgttctatatcaatccgggcactggttctgtccaccaacccggctcggcttctccacgatgctgcccggcgtgcggcaccgactacagtcggcgcaaaccaaatatgggagcacagtcgccgttgcgcagctttcgaacgggcttcgccaaaagttcgcaattactggctaccgagttattctccgcgctacgcgtgagtggcggagctgcgaaatcgattgtgttttcagatagtaggcaggacgccgcacgagcggcgctagacatcgagcgtcgtcaccatcaagatacgagacgccaactgctggtcgagtcgttgcgcgctgtcgctgctgcgcgcccgtcatcacaacagcttcgcgatatggaagttcagctccaacaggcggtcgaagcaaggaatttcgccgaggctggcagacttggccaggatatcgcaagggcacagcaggccgttgacgcctcgcgtgtcgccttatccgaagttatcgagcctatcgtctcggctgggggcaacgagctccgaagctatttgcggcgtcatgtcgaattgggcatacatcccacggacgctgccggcatcgagctcattgcccaggagccttggtacaaatggattgttccttcaggcgcgagcggaaagccggagtggcctgcccatagcgaaagcggggcggccgggcaggcgcgagcatacattcgtgatgagcagcgtccgctggtatacgaaatcctattctccaagacttactttgctcttgaagagacaggcatcgggtacccttcaatgacggcgacgcagacgccggagtccgaccgtctcgatgcatacctgcgggtgtttgcggacgcgtatagagttgctggcaacaagtggttcagggaccccgccaatatcgacacagcacatcagttccctaagaagggccgcatctatcgcttcgctaaagccagtgcatccagcaatccgattgaagagcttgatgaaattctcaagcgtttcggagctcatgcacacgcgcacggcatagtcgagttgagcgggctatatgtccggatgtccagctcgggcgacccatactaccgatgtgacaactgtggtcgtgtccatctccacagaggaacggcgttctgtacgcgatgttttgaaccactcccggtccagaagcaagggatagtggacgatttgtggaaggccaatttcttggcgcgacgaaccatgaggtcgggctggggccaagaatcggcattccggcttcactgtgaggaactgaccggtcaaactggctcccccgccgagcggttgcgttcgttcaagggcatcttcgtaaatggcggcacgtcggatgctttcgaactgtataggcgcgcggaggaaatcgacctgctgtccgtgacgacgacgatggaagttggtatcgacatcggcgccctgcaggccgtctatcaggccaatatgccgccacaacgcttcaattaccaacagcgcgttgggcgggcgggccgccggggtcaggcattctcagtcgtcttgacactttgtcgaagccgaagccacgatttgcattacttcagaaaccctgagcgaattactggagatgttcctccaccaccatttttgacaacaggtcatcttgctatcgcctgtcgcatcgttagaaaggcgtggctggctgcggcgttctcggtgctgcggaacgaagacggcatcaactacctcggcgacgatatcgtcgacacccacggtgacttcccgagggccggcgaaatatacgcatccaattcacagtggcggtacagactggctaacgcactcgaagccaccatcgaaacgcgggattcggttttgactgcgttgttcgatggcgcgccgcgtgattgcgaagcagtcaaagcggcgctgacgtgtgatgccctgatagaggaaatgtgggcatgctctgaggagggtgcctcaagtgcactgccgttcggtcagttcttggcagagcatgggctgctgccgatgtacgggatgccaaccagggtgcgtgacctgtacatcggggtagagcaggacggggacgacaaggatttcgcgaccattgacagggacctagatatagctgtttacgagttcgccccgggacgctcgctcgttcgggacaagcgaaagcacgagtccatcgggttttcgccagcgctgcgtaggcccgttggcacgacgaaccgggccttttcctttggctcgtggcgctccgaaacgcggtacattgccttttgttcatgctgcggcgctgtcgccagctgccatgaggagccgttacaggatgtcgcttgcgtcgattgcggtgaacaagtgccatctccaagcttcgtttgctacgttagtcccgtcgcgttcactaccgatttcaaagcaaaatccgtcgaagaaagcgaggatagcccggtcttcaaacgagtcacgacgacagaagcgtcgaccataactatgagggacatcgctaacacgaacacgtcgattggcagtgcgactgacgcacgtgtcttgcggctgaacgacggcagggtcgacgatagtggcacggttcagccatttcgcgttgtgccggtcgcggagcatcgcgtgccgtctcccccagggagggggagatggagcttgccgggtcaatacctaaccgcggatagcttcgtctcgttgtccgcgagtggtctcgcgtcgcggaactccgacctcctcgaggaagacgtgcgtttgatggccagaaagaaaaccgatgccatatacatcgctccaaccaagatatcgaattccttggacattgcccgcgtcggacgtgaattcttccatacggcgactcgcgccgcgctcgtcagcgccacgcatctgctcatacaaagagccgcgctcgagatggacatcgcgcccgaagaatttgaagccctggagccaaggctgagggacggaaagcctttgctgcaaatcgcggattttctcgtgaatggcgcaggttttgccaaccgcttggagagtgggcagactccgcttgttgtcgaattggcgcgctcaatggtggagtcaccgctggcggacccgcttgttgcgtcgtttttcttcgaccgacacagggaggactgttcgcaagcgtgctacgagtgtttgcagcggtacgggaatcggtcgtaccatggcctgctggattggcgactcgggatttcgatgttgcgggtgtttctcgactctacatgggtcgctggtctcgacggcgattggcagcgagcgccggaaacagcggactggcctagagcggccaagaggtgtgctgaagctatagtcagcttgacgccagaccgatacaagcttgctaccgcgggggccttggagttgccgtcgatagagtcactaaaaggcggccgacgattcgtgatggtgcatccgttctgggctcaagctgctgtcgcgcctttggtcagtgacggatttgacgggacaactctcttcattgacactttccaggccgagcgtcggccacagagagtgttgaacgccgctgcggaatatgcaaagcaacaaggcctcatctga

SEQ ID NO: 27685 - DNA, 2784 bp, Burkholderia multivorans CGD1
ttgttggcggttactggccgggacaaaaagccgctgcgacaacaccagtaccgaaaacaacgagagaggccaacgggaatcgaaatggaaacaccatgttccctagctgaacaacaacgggtcgaatccgcgctcgttaagcactatttgcgttccgatgggccgttcggcgctggtgtcctgcgctctatcgacgcatcggcgccgcagctcgccgcagcattggaagtcgacgaggagcgcgacccggtgcgcgtgctggctcgtgcttgcgggggggcattggcgatgcagcgtgtcctcgcaagtgggatgccacgccgaatagcatcggatgacacccccggatttttccgctacttggtgatgacatgtgcaattgtcgcgattgcggacaggaacgaagtaactcaagactttggggtgaacctcgcgctggcctttgactcaccgaatatcttctcgaagcgggaggcattacctcgactgtgggcaagcttacagcgctggtgtaatagtcgccgagatgctggcgagccgatacggagtgtcgtccttccgccaccgggcgcatggaagcatataggaatcactcatgcaatcacttttccgggatggcgagatgcggttcgcctcaaggcgcttgttgaacgacatcgacgcgatgttgtgattgacggcccggcagccgctgcgaaagtgttgtgccctcaggtgcggtacagcccgagattcactcctgccatgcatgacgcatgcgaggagtatgagaagctttatttcgcgaaagcgaccctgcttgcgttacatcgattttggctcgcagtgcggcacgcgctcgaagtcgagagagatacagcgaaagtaccagtcttttccactcaatttcgattgtggttcggctctgatattgaagatgtcgaattacaggccgacgtaatcgatgcgaacggaatgctcgtcgagagtaagaagctcgacgattgcgtagacaatgtgctacgagacttccccgaatggttggtcgagcatggccttagtgatgctggcgctccactaagaacggcctctcgtgcgggcttcgttcctttcaccgaggaaggtttcggcctgtggacctcagccctaagtctccccgattttccctcgcgttgcgtcgtattaatcgccaaggataagggacacctcgcgcagcgatggggaacaaatgctgtttcaattggcgaaaattggctgctgatgggccccctcccgggccgccacactgcatccatttaccagtatctcggcgcgaacgttggcatatcgcacgaacttccgtcgccccagttgcgcgtccgcggtggcgtcaggacgggcggaggctatcttggacgcccatcctttctgccgacaattgtcgcccccggccctggcgagctatcactgcgaggcggccccagtgcgtgcccgttaccgcaacttgtaccgcaagatgctgtttcttggcgcttcgaatcgtctcgtgcgcttgacggtaggtacacggtcgttctcgaagagaatgttttgcaagacgctgagccgcttgccgttgaaaaatcaatattgttcgtgcctgacgcgttggaacacgacaggcttccggatatcgacgatacgcgatggcgcgtcattccagaggagtgttttgagggaggaggcgcggtcgttccggccgccgttttgtccactcgtgatgccgagcaggcagtgcaggatgaaatcgctggacaatttaatgactttttggaagcgctatatgccggcggccgctcgggatggaccacgcaggacctgttatgcctaatgcgtgacgttctcggctcaagcgccccttcaccatgggatattcttcgcggtcttgtcgaagctgagtggcttatcgagacatcaaacgtgagttggcgagctcgtcgttggtggcttcgcgagccaactgtcgcaaagctcgctcttaccgacggcacgttcgcgctattgctacgcggcagcacaccaacagcagttcgcagacgtttcaccgacaccgtgactgcctctggatgcactcttcatgtacgacacggcgtcggtagctactccccattatccatgttggcaacaggtggtcagctggattcggttgagaaggaactgaactggccggtagcaaccgccggctcagtgtcggtcgcagtggcccctttgtgctggcctagcgagtcggtcgatgagtctcgccaccgcctggccggaaaatggaggtgggagcgtggagctttcgagcagagtgtcctgccagcaaacgacgatgtggttcttgagcgttatacgcgcgaacgtggggatagagaggacctgtttgtggtatccgaacgggtgaacgccacgaggtacgtgacaccgtctcgcgtggcggccattactgaggcatatcggcgtatgaaagcacctttctttaggtacaaggaagggctcatgctgcgcgtccctagagatggttacctcgtccggggaatggcatcagaggcaataagacgagcggcacggaattccggtccagcgtttatcgacggtcaatgggtatatgcatatcccgcggattcctacgtcgtgcaaaaagtgaagaaggtcttcggtgcgccattcattacctcggggcttgctgacacggacgaaaacaaactcgaaacttcgccgggctctttgggtatgttaaggcatcgaaatatatttcgtgccgacacacgcggcacggtgctcaagcgtgccgccgggcgctaa

SEQ ID NO: 27686 - DNA, 2103 bp, Burkholderia multivorans CGD1
atggaagacgtgttgtacctgggtaaggtcctctatgcggcagacagggtcgccagacttgagccgttggcggccaagtcagacgggcggtgggtcgcgatagaagacaagcttgctttgtttccgccggaaggaaagatattttgcccgcgtccgcttcgcggggcgttgaaggacgatgtatggacttttcgtcgccgggcgaacgaaaaaatcgagcctggcaaggaccactttcttgtcatcgacgagcgcgaagcgattccggtcatcgacctatcgatgttgtcgattgagcaggcgcgtcagcgattgttcaatcaaggcgtggcgctggagtcgccatacgaaacgttctacgcggtcgttgtcttgaccgatgcgcttttttgcgagctcaagttcaacttgtccgcacatggtctttggaaggctgaacccgtatttgagctcgttccactaatgtcgctaccgcgggaatgggctggcttgcagaccgaaggtgaaggtacgctgcagtacctgccggcagagtcagttcctcgcaccagtgtagtcaagtttgtcaactggtgcagtgaccaggaattcgtcgaacgagtccttgagcacatcaggaaacatactcaagacattgtcgagacaaaatacggccgcttaaccagagaatctgttcaacaaattgctcgagcactttcgcgcacgggactgttgccggaatcggaggatgacgccgagttgaaccttgaacgtctcaaagctgactggccaatcctcgaagcgcgattcgccgcaactgagcgactcgctgagctagtccttgcgtcaactgcggcgaaggacgcgctgagtcaagctgtgctcgatgccgaaaagcgcactgaggaagtcgttcgaccggcgattgaggagcgcgttaggcgtgaaatcgagacgggtctaaccgatgttgtcgctcaacgtgaagtagtgatagcagatatcgaatcgctgacccagcggcggacatctattgagcgcgagcttagtgaaattgaagagcggtgcaccagggggcgacaagaacagcagtccctctctgaaaatctgaggcttgtaacgagacgtttgcgggcagctttccagaacatgccgctccccgagcaaccgtttgcacaagccgttgtcgggcgtatagaacaggccatcggtgagtgcaccgaccagattccaagtctggtgccgtcgaatgtggccccttgggcggtaccaatagaacttccagaaacctcaaaaattgacgaaacgcgcctcctcgtccgcttcggcattgaagcaagagcgcatgcggtgacggccaatgacctatctttgattgacgtcttcgcgcgaggaggagaacttctgttgttacttgggccgcaggcggaactcgcgctgaccgcatatgcacgctgcgtttccggaggagctattacgtcgttgtacgtcgaccccagcacgataggacttgaagatttgtggcgggtgcccggaacgcagcagcccaccgcgatggcccatgcttggaacgccgcagaagctgaacgcgaccgcttgcatattatatgtatccggaacgtcaatgctgcaccattccatctttgggcggcttcattaaatgctgtgttgctctcgccattacgcccacggaatctactgttctttgcaacgacgaccccttttcagccagagcagaccgctttgacgggcgcttccaaggacgcatatcggcaatggctagtacccattgaagctcgggtgcatgaagacggtcccattgcggttcttgggtcagttgtaccaccgtttccgccggcaagtgctttggagcttggtgactgcgatatttccgaggtcgcaacttccgcagagtggttgaaacgaattgccggcttgaacgccggccccgacaccgtggcgcgcgtggcacgcacgacgggtgtcgcccaccaaagttgtaatgaaacactcctgccgcaagtctttgggtgggcggaatttttgtgctcctcggcaggttctgacacactgcctgagtgtttacgactcggctattcagctctcgacaaactgttccattaa

SEQ ID NO: 27687 - DNA, 5847 bp, Burkholderia pseudomultivorans
atgctcgacccgataggcgctacccatagaatccgggaattcttcctgtcgtatctggaaaccgctttccggattcgcgaccagtccgtctcggcagcacggcgacaactgctaacccgacacggtactctgacgacggagcccttcctcgaaccggtgccacgctacgaacaggtgacgcatttcctccaggacctcgtcctgctcgactcggggaatccgctgcgctctttttcgagtgtggcccggcgcgcgtttgtggaactggcactgtccggactgtttcccggagaagcgtccggcagggatgacgtgcggcgaaccagcaatgtgcgcccctacctgcatcaatggcagatgctcgaacgcggtgtgggtcgcggtacgcctggaatcgtgacgtccggaaccggctcgggaaaaaccgaatctttcatgctacccatcttcgcgaccatcgcgcaggaagctgtgcggtggccggcgccatatggcgaaaagctctcgaacgaatggtacaaggaagccggacaggaattcgtcgcacaacggtccaaggaaagtcccggccgacccaaagcggttcgcgcgttgctcatctatccgatgaacgcgctagtcgaagaccagatgacgcggctacgccgcgccctcgactccgacgaagccacatccgtgatggatgaacgattcagcggaaatcgcattttctttggccgatacactggcgccgcaccggttaccggccacctcaatcatcctcgacgggccaacaccgcgcaggaaaagcgcaagcgggcgcgccgcatggagacgatgcgcagccggatgagtgatctggcagccacgcagaaacttgcgcgcgaacatgatgcgcgcgaacttgccgatgcacacgcggctggtcgagatgcccccgaacccacaaggttcttgtttccctcgctcgatggcgcggaaatggtcacccgctgggacatgcaggcaaccccgccggatattctgattaccaatacatcgatgctcgcgacgatgctcgtgcgcgaggtcgacgagccaatcttcacatcgactcgcaaatggctcgaagaaaacgacgatgcctatttctttctggtcatggacgaacttcacctggttcgtggctcagccggaatggaggtcgtcggcctcctgagaagccttttcgccaagctgggtctcgacagaccggagcatcggcacaaggtcaggattctggcatcgagcgcctcgttgcccgatgagggtcccgactcggacgtcagtctccagtatctgtttgattttttcggcagctttggctcggcccgtgaacccggcgacgctggtttcggcacacccgcagactggcgcgatgcaatcgtgcgtggacggcaactcacacagcgattcgacggcaccctgccactcgctaccgagccgttcgtggagctcgccgctgtcctggacgtcaacggggctgattttgctccacaagtaaccgcgcgcacttccgcgctcgacgtcgccctcgcgcgggtcgcaaggtcgttgggaatagacgcaactccgacggatgtcgccgcggctctgcccaaagtgattgccgccgcatcatccgcaatagttcatgcctgcacgaccgacgatggaacggccgctgtgctgcgcgccactgcggtcagtgaaatcgcccagcgacttttcggaagcgatagcgtcgacgccgagagagcggttcgaggattgtgcatcctgcgcgggcttgccgacacggtatcaacgcccgaactctacgacatcgcggttccggacggactgccgagtgtccgccttcactcgttcttccggagtatcgagggcatgttcgccgcaccctatcgggatagcagcggaaaactgcatttcgacgggctctcggttgagcgcggtcacacacacgccctgtgcgatgacggttcgaccaggcgattgttcgagctcgtgtactgcgaagcatgcggcgaactgtttgtcggtggacgtcgaaacgccgacgaccatttgggggcgaccgagctgctgacgacggcgccgaacctggaacagctacccgaagctgccgcgattaccaactacgaaaatctcagctacaacgagtacgccattttctggccgcggcgcgacgagccgaaggacggtgaaaccagacacgaacactggccggatgcgtctcttgacacgcgcaacgcgatggtcacgcccgttgcctcatccgacaactcgcgtctcgcgggacggctcttccgcatgaatcaagcggacgacctggtcaggaagcccgggtcagcttcaccgcgctgctgccccgcttgcgggaccgactacagcaggcgcagaccagggatgggggccatgtcgccgttgcgaagttttcgtaccggtttcgcgaaaacctcacagttgctcgcgaccgagctgttttcggccttgagggtgagcggtcggactcccaagtccgtggtcttttccgacagccggcaggatgcggcccgtgctgctctggacatcgagcgccgacaccatcaggatacccgcaggcagatgctcatcgaagcgctgaagtcggccgttgctgagcggccgaatggcgaagcgcgcgaagagaagaagaaacaggccgacgaggcgctcaagaggggtgacttcctcgaactgaagcggctctccgatgagctggcaaggttgcagcttgcgaccgatccatcacgggttgcacttgccgaagtaatagagccggtactgctgacttcgaatgaactgcgctcttacctgcggcgacatgtcgagcttggcattcatccgacggacgccgcgggtatcggctacatccgcaacgagccgtggaatcactgggtcgtgcccgctggagcaagcgggaaaccagaatggcctgcacacagcgacagcggggaagccggggaggctcgcgccgagattcgtgaggaccaacgtccgctgacgtacgaagtgctgttcgcgaagacatacttcgcgctcgaggagacgggtattggctacccgtcgatgaccgccagccagaccactgattcgaaccggctcgatgcttatctgcgggtattcgcagatgcatatcgtgtagcgggaaaccgttggtccgaggatgcggcccatgtcgaccatgcgcaggagtttagcccacagcaccagattttcaagttcgcgcgcgccagcgtacccacggcgcccgtcgttgaactggacgacgtgctggagaaattcagggccctcgaacacgcacacggtatcgtagagctcagcaaactctacgtcaggctgagccaacggggagacccctactatcgttgcagcaactgtggccgcgttcacctgcaccgaggaaccggcatatgcacgcgctgccgtgacccattacctactgagcgggaaggcaatgtcgaacaattgtgggattcgaacttcctggcacggcgcaccacgcgttccgagcagggcaaagaatcagcgttccggctccattgcgaggagctaacgggacagaccggctcgccggctgcccggctcagagccttcaagggaattttcgtcggagaaaagcagtcgcctgaatttgagctcttcaagcgcatcaacgaaatcgacctactgtcggtcacgacgacgatggaggttggtatcgatattggtgcgttgcaggccgtgtatcaggcaaatatgccgccgcagcgattcaattatcaacagcgcgtcggtcgcgcgggccggcgtggtcaggcattttcaatggtagtcaccttatgccggagccgaagtcacgacctccactatttccgcaatcccaagcgaataaccggtgacgtgccgcctccgccgttcctgaccacgggacatgtcgtgattgttgaacggattgtgcgaaaggcctggctggctgccgcgtttgcacgcctgcgggatgaagacggccccgcttatccgggagatgacctgacggatacgcatggcgagtttccgcccgcgtccagcttctatgccgccactggtaactggcggagtcggcttgagggcgcgctggcctccacgctcgcgacgcggaaccgggtcatcgatgcactgtccgacaaggacacgacccaagccaggaccatgaaagatgcaatgacgccacaacacctgacgcaccaaatctggtcccttgccggagaaggggcgggcagtccattgccactggctcagtttcttgctgaacagggtttgctgcccatgtacggcatgccaacaagggtacgcgacctgtacgtgggcatcgagaacaacgaggaaaagactcctgaattttcaactatcgaccgggaccttgatatcgcggtctacgagtttgcgccggggcgttcgctcgtgcgcgacaagaggaagcacgagtcaattggcttctcgccagcactgcgcgaaccggatgtgcaaccgaatcgcgcgacgtcattcgggtcatggaaagcagaaatccgatacatcgcgttttgcgagtcctgcggggccgtgtcgagtctggcggacctcccggtggaacaggtccgatgcgtggattgcgaaagtaacattcccagcgagagattcgcgagatataccagtccggttgctttcaccactgatttccggcccaagtctgtcgaagaaggagaactggcgcccgtgtttcggcgcgtaacgacaactgaggcttccaatgtttctctcgacagcgtgcccgattcaaacatgttggttggcacgacagcggacgcacgcgttcttcgactcaacgaaggcaagctcgatgattccggtgcggcccagccgttcgccatggttcccaccaaggaccaccgggtgccagcaccaggaaatcggaaatggtcgttggacggtcaactccttagcgaagaaaaattcgccgaactggacttgcgtggcgctgtgcgacgcaacacggacttgaccgacgaaggggtccggctgatggcccgcaagaagacggacgccgtgtatctcactccggtccgggttacggaggggctggatatcggccgggtcggtcgtgacttcggagacacctcggtccgtgcggcactgattagcgcgactcatctgttgatgcagcgggcatccctcgaactggatatcgcacccgacgagttcgaggctctggagccgcgcctgcgcaacggcaagccgttactgcagattgcagacttcctcgtgaatggcgccggattttcaaaccgcctggccaacgggaatcctccgctcgtcgtcaggctcgcgaagtccatggtcgatgccccgcaatcggacagcctcgttgcaccgtactttcacgagacgcatcgcggtacgtgttcgcaggcgtgctacgagtgtatgcagcggtatggcaaccgggcttatcacggtttgctggattggcgactcggactgtcgatgctccgggtgtttctcgacgcatcgtcgatgacgggtctggacggcaactgggccgcctcccccgaactctccgactggccggatttggcctggcgctcggcagaagagattgccggactcagccctgacctatacgacctgaaacgcgttggctccctgcggctaccgtcgatagaggagcgcaatactccgcgtcgatacgtagtcgttcatccgttctggtcgagaaaggccgtgctggaaaaatgcatagacggattttccgggacgacgttgctgattgacacgttccaggcggcaaggcgcccgcaacgcgtcctgttcgccgcacgggagcatgcgcagaagcatggattcatgtaa

SEQ ID NO: 27688 - DNA, 1176 bp, Burkholderia pseudomultivorans
atgagatttgcgggactctttgccggaatcggcggattcgagcttggcctggcgagggccggacatactaccgaactgctctgtgatgtcaatgtcgcagccgaagcagtgctgaaacgccacttcgccgacgtgccttaccatgccgatataacgacgctgaggtcccttccgtccagcattgacgcaatctgcgctggctttccatgccaggacttgagccaagcgggccgcggtgcagggcttgacggtcagaagtccgggctcattgcggaagtattccgtctgctatcgcgacggcgtatccccactgtcgttattgaaaacgtaccgttcatgctgcagctgagcggcggcgcggccatgagggccatcaccgacgagttcgaacgccgcggctatcgctgggcatatcgtgtcgtagatacctttgcgttcggcctgccgcagcggcgcgagcgagtctttatggtggcttcgcgggaaatcgaccccgcagaggtcgttcttgccgacgagaatgtactgccccgtccgacgaccgacgtgggccgcattgcgcatggcttttactggaccgagggactaacgggtctcggatgggcggtcgatagcgtcccgacgctcaagaatggctcgacgattggcattccgtcgccaccggcggtgttgctgccagatggacaaatcgtcaagccgagtatccgcgacgcggaaagactgcagggatttgcaccggggtggacggaacccgccgaaaaagtcgtgcgacggtcgtttcgctggagtctcgttggcagtgcagttagcgtcccggtcgcgcaatggctggggcaacggctggccaatcccggggactacgacaagcaactggaccgcgagtttccgacggccggccggatacctagggccgcgcgctttgacggaagacatagataccaggtagaaatcggcgtcgacccattggggcatcggccgccgtcgctgtcggattttttacaggatgagggtgacccgctttctctcaaagcagcactcggcttcctgacccgaacccgccgcgccaagctcaagtttgacaatgccttcatagctgccgtggaacgtcacgttgagcttctgggtggtgagattccacctcggttagtaaggcagttggagctactgccggcctga

SEQ ID NO: 27689 - DNA, 2679 bp, Burkholderia pseudomultivorans
gtggcagcgcggtgttcggcggcagatcagctgcgcgtcgaagccgcgctcacagcatactatctgcattccgacggagcgtttggtgcaggcccgctgcgctacatcgacgcgtccgaaccgcaactgcgcgtggctttgaaaatcgcgcatgacgcagacccgctgcgattgctggccgcagcctgcgggggtccggccgcgatgaccgacgcgctggccaacggtgtcgtgccattcaagcccaggccgggactgccgggcttcttccggttcctcgtgatgacatgtgcgattgtcgcgacggccgacaacaacgactccacgcaggagttcggcgaaaacctcgcccgagccttcggaacccagagtccattcaacaaccgttcgtcgttgcctggcctgtggctccggttgcaagactggtgcgacaaggcgcgcgccgccggggaagccgtccgacaggtcatacttccgccgccgggcacgggcaagcacctgggcctcaccaacgcgataacgttcccgagttggcgcgacgtcaggcgactacgtcaacttctggaccgaagggcggaataccgctcaatcgttgacccagtgggggctgcaatccagctggcccccctggtcgaaaacgacgccagcttttcatcggcaatgcgtcaggcgagcgcggaataccggcagctatatctgagaaaagcctcgttgctcggcctgcatcgcttctgggtagccttgaccggtctcctgacggaacggcattcaccgacagccgagcaattctttgtaccgcgcctcgagctcagattcggcgcaacgctcgacgacgtggaactgcgcgtcgtcctggctgacatgaaagggaacgtcgacccgcttcaagtcctggagaatttcccggaccttgtcctagcgcaaacggcaccttgggctagccagcgagttgggaaaaacgcaagcgatgcgcttgtttcggccatcagccgcggtagcgtcccgttcgtcgagtcccgcttcggagtatggcattcgactctgctccagccatccgtgcccacccgctgccttctcctcctgtcaaagaaaaaccgtgacgtcgcccgtaaatggggcgtcagtaccgagccgattggagacgagtggagactggcgggcccgattccggcccgcgactgccgctccgtgtatcaatatttgggagggagcatcgggctagcccgcccgccttcccaggccatgatgcttgtcggcgggcacaggaccggctcgggacttctcggccgggacgcacttctcccgcaaatcaggattgcaggtcccggcgccttgacgctacgtccagtgcaggaaaatggtgtgaagtgtcagctccgtcgcgattccgacgacctccattcaatcatcgcgtgcacacctcttgacggaacatacaagcttcgtctggacgaaaacatgattccgtcggcggagcctctcgccatcgaaacgtcggttgtctttttccccgacgcccttgaacacgccgaactcggggacatcgaggaggcgacgtggcggcggcgggaggaagcgcgtgttcgtccgacaggcgggccgattgtcctggcagacatcaccgatgaccacccgcccgtcgacagcgagcgttcagcacggttccaggactgtctggaagcggtgtacgctgggggccgcgccggctggtcggaacaggagcttgtgtcgaccatgcgcaccgttctcggagacaacgctcccccggtctgggacatactgcgcggattgatggagtgcggctggctgaggcccacctccaacctgagatggcgagcgcgccgatggtggctgactccgccctctcttatcagagttaggaatagagaaggcatagaaggattgctgctcgttggcagtgcacccacgaatatccggcgccgcttcgagcaaaccgctcaggccgccggctgtacggtgatggaacgacccggagcaagtgagtacacggcgtgtatgcaactcgcgcggggacccgccctaggcgaggtcgcggaagaactcgcatgggcagtcgccgaacggccgatatgcgcacccatggctgcgccggactgctggccccccgagaacgtcgacgagtcccgacatcggcgcgtggggagatggaattgggccaagggtggttttcgaagccccgataccacaaatcccgggccggtaaaccttgaacgcttccggcgagaacgaggcgaccgcgatgacatcttcgttgtcaccggccccggtcccgcgcggtacgtgaccacttcccgggcagcagcaatcgtcgaggcgtaccgacgcgcgcgaatcgcgatgttcagatgggacggtgcccacctcgtacgaaacagcgaggacggtcacctcgtcgagccacttgcgaatctcgccatgctttcgtcctgtcgaagtcccggtccggcattggtggacgggcgctggacgtatgtctacgacatgactgcagactgcgttggctggatacgctccgtgtttggccaggcctttgtcgacgacatgtcggcgcttgacgcaaagttgagtagcctgtcggcggaagcactcggatggtcccgaaacaggaacgtgtttcgggttcaggaattgatgccgccacttgtcgggcgccagtga

SEQ ID NO: 27690 - DNA, 2124 bp, Burkholderia pseudomultivorans
ttgtcgggcgccagtgaaaatgagggctatggggttgtgatggacgacgagctgtttttgggaaaagtcttcagaaacgaagtgaactgggcacggatggagcccctcgcggtgcgagttgcagggcaatggaaacgaatcgataacactgtggagatgtttcccaaggaagggaaaatattctcgaggcgcggcctgctcaacgccccaactgacagcctgtggacattcacgcggcgtccgaacgagcaacgtgacctacatggtcccgacctcctgctcgccgaggacatcgtgcgtgcgacgccaattctcgacctgtcgtcgatttcactggagatggcacgacgaaggctctttaatgagggcgtccacctcccgcttgaattcagctcggtgactgcggtcgccctgctgtccgatgacctcttctgtgatgtcacgctcacgcgctcggccgatggtttctggcgcagcaacagcctctcgcggcccgtgcaactcaaggaaatgcccaacggctggaaatcgtcaccggacttcaacggactgcgggtcattccagctcaaaccataccgcatgctgccgtcatcaggacggtcaactggtgtagtgaccaggactttatcgagcgcgttatcgaccgcttccgcaagttcatgcagggtgttggagataccccttacgcgcgaccgtcacgggatgccgtcaagtacatttctcgcgcgctccggcaagcggacctcatgccgggagaggacaacggcatcgtgcttgacatggaacggctccggacagactggccgatactcgaagcacgactggaggcgtccgaagaactcgcttcgttgatactcgacctaaagagtaccaaggacaaagtggcggcggcgacggaactggcaatccgccatgctctcgaagaggcaaggcccagccttgagcgtcaggtgcgagaggaaaccgaggcatcatttaccgaagtacgacgtcagcgtgacgaactctcggcagaggtcctgaatctggagcagcgtcgcgcccgggcttcgagcgacctcgcagaactggaaagactgtgtaacgagaggcgagagcaacagaaggcgatgtcggatggcttgtcggcggttgcctcagaattgcgcaccagcctcgcccaaagccccgttcaaggccatcccgcgctgtcgttcattgccgaacgactcgagggcatgctgactcagcacgattaccatgggccgtcgctgattccaccggccatgccgccgtggggaaccgggatgccgagttgcgcctgcgacgaaattggatatggttccttgaccgccgtcatcagcgaggaagcgaagcgccatggaatcgatgaaaacgcgctacgattgacggacattttcgcgcgagcgggtgagttcgtcctgctatgcgggccgcaggccgagctcaccctccgggcgtatgcgcgttgcatctccgccggtgtttatcgaacgatggctctggaccccagcatcatcggtcttgacgacctctggcgggcccccggtacgcaaacaccgaccgcgttcgcacatgcctggcaggcagccttgggcgcacccgattgctttcatattctctgcatgcgcgacattgatgccgcgccctaccggctatggctcgcgtcgtttcagactgtcctccagagcgcctcccgtccgaccaaccttttggtgttcgcgacgaccacgggccgaagtgacgcgcaggctgacgtggggtctcccgacgatagtcggtccggatacctggttccagtttttcccggtgtgcatgaggccggcgcggtcgccgccctggcgagcgccgtcgcgcccgtcccgccgcctagccgcctgtcggttgccccggataccgtcccgactggttccgccgctggcgactggctgacacgggtcgtcacgtttgatttgcctccgggcgtgctcgcccgcctagcaagattcagaaatcagttcatcggcgacgacgccgagcacctgatgacagccgttcaaaaatgggggcagtttctcggctccagggatgcaacaagcctcccgtcggcactgagagacggttatacgtcgatgacgaattga

SEQ ID NO: 27691 - DNA, 5871 bp, Burkholderia sp. Leaf177
gtgcttgatccaatcggcggtttcgcccgcattaagaacttttttatctcctacgttgagacgaacttccgcatctccgacgccgacgccgccgatcatcgacggaccctcctggaaacggtcaacgttcttgctactgaaccgtatctagaacctgtccttcgatatgaatcgcatgaagagaagcttgaggaaatggcggcacgagcagacgggccgcttgcccctctttctggcgagggccgctgcgcgtttgcggaactagcgctttccgggttgttcgaaggagaggatcaagacgggccgatccgacgccggtccaattacgcaccctaccggcatcaagtggagatgctcgcgcgtggactgcaatccggtcgtcccggcatcgtcacatcaggcaccggttcaggaaaaaccgaaagtttcatgctacccgtgcttgctgcgcttgcgaatgaagcggttaattggaaagcgccccacgataaataccttcaagatgactggtggaaaaagccaggctccaaatggtccgggaggcgagcaggcgagacgcgtcctgcggcaattcgagcgctggtgttataccccatgaatgcgctagtcgaggaccaaatggttcgtctacgaagaactttggattccgaagacgcgcgacatgtaatggccgatcggttcttgggaaataagatattttttggtcaatacaccagcgcaacgccggtgacgggtcatgagacccatccgcgactcgcgtctgataaaaaagagaaggaacgacgctcccgtcggggaactaagctgcgtgcggccatgcatgaaatcgagcgtaaccagtccgcggctcgaacgcatgacgaacggcaaaggatacagtcgcaagaaagcggagatcgaagaccggatctcacacgatacatattcccgtccgcggacggaggtgaaatgtcctcgcgctgggacatgcaagaggcacctccagacatattggtaacgaatgcgtcgatgcttggggcaatgctctcacgcgaggtagaagatcctatcttcgctaaaacgcgcgattggcttctctcgggcgaccaatcctatttctacctggtgtttgacgaactgcatcttgtaagaggctcctcggggaccgaggttgcattcctcatcaaggcgcttattgagcgcctaggcttggatgctccggagcaccgctataagcttagaatccttgcgtcatcggcgtcgctcccgatggacggtgataggggcacacaatcgcgcacatatttgcgtgacctattcgctccctttggaacgagtcgaaatgccttggacgcgggatcaacgtcgccagatttttgggccgattgtgttgtgcgaggtgttgcatcagttcctgagtggtcaaaaggcaaactcgacgcaagcccattcgcaaaactttacgagtccgcggcaatcggtgcagacggatttgtggggcgaattaaggatagccaacagcttgaccagcccatccgtgacgccgcgcgtgcagttggcatcgtaagcgaaacaatagaggacgtcgtaaaagagctcgcggtggtcgccgccacggttttaacgcaggcatgtagggacggcgcgggcgttcgagctaccgccactgacatcatagcgaagagtatcttcggtgacgaagttggtgagcgtgctaccgcgctacgtggtctgatgctcgcgcgcgcgctgcctgaatcggatctttggtccgcacggatctcggccgaaacgccggccttccgagttcacacatttatcaggaacattgaaggattgtttgcttctccccaagaagtcggtgggaaagtcgaatttatcaatctgaccgttgagcgaggcatttcgcacgcggcacgctcagacgataccaagcgtggaaagcgactctttgagttgctttactgtgaagcgtgcggcgacctctttatcgggggacagcgcggtcagaagagtgcatctactgccgccacggaattgctgccggcgtcagctgatctggaaaatctacccgaaaaggctgcgtcggaatactacgacagcatgaagttggacgaattcgcagttttttggccaaggcgtagtgattgggcaccttctgaaaaggacttcgacaaatgggagatggctcatttgcatcctgaaacaggggtcgtaaggcgaggcattcctatccccgagggaaacatcggtggatatttgtattttcaaaacgactcggctgtgaccgagaagggcaaggtcgtaagacgcccgtcagcgcaaccgttctgctgtccaaagtgtgggactgactattccaatcgaccagcgtcgagccggtctcgctcccccatccgcgcattcaggaccggtgtgacaaaagcctctcagctcgtcgcaaccgagctgttcgagctgctacacgcgattggcgcagagccgaagggcatcgtattttcagacagtcgtcaagacgcagcgaatcaagcattggaagttgagcgtttgcacctaagagacctccgtcgagaagtgcttgtctccgtcgctcgtgaggcggtaagaaggaacgcagacgaatggatgacggccgaagaattcaccgcgcgttttcaacagttcgcgatcgcgaacaagcaaaaagagatgggtgagctggcaggtcagttcgcaaaacagggcggtggctcttccaggcatagctccaaggtccgactcaaccaattgctccaaaacgacgacggaagccaaagagtcggcgatctcgtgggcgaattcatcagaatggggatccacccgttcgatgaagcaggactggaaaatttcgaacgtaagccatggcatcggctttttgaaaaaaacgagaacggatactctttttcgggaactctctcccatgcatcgagagcgactctaaacggaaaattgcttgaaaagcaatacgaattaacagacgacgttatcttcgcaaacacgttctttgcattagaagagacaggtctcgcctatccgtcgtcctcgagcgaatccggaaatgagatagatgagcttgatgcctggctacgcctgttcgcaagcgcaacgcgggtcaggaacaacaagtttgtagatcacgaccgccttgtagagtggacatcaggaaatgacgttaagcacaagcggacaattcgatttgctcaaaaaatcttcggtaatcttgattacgtcgacggactgtcttcggttcttcaacgtttgtcagataaaggtcacaagagcggattgtttgagattggcgacttgtatctgaaggtggcgaaagaaaacgatccgttctggaggtgtcagaattgtggccgagttcacatgcacttgggcttaaggcgatgcactcgttgtgctgaagacctcgtatcagagccatcaggcacggttcaagagctttggaaaactaactttcttgcgagacgcatcgttcgaagcgacgacgagaatgtgggcaggtttaggctcagggtagaagaacttactgggcagaccaacgatttcgcagcccgactacgtcgatttaagggaatcttcgtggacggtgaaagtgatatccaaagactggcctccgagattgatatgttgtctgtcacgacgacaatggaggtcggtatcgacatcggtgcattgcaaagcgtttatcagggaaacatgccgcctcagcgattcaactaccaacaacgagttggtcgcgctggtcgtcgggggcaagctttttcgttcgttgtgaccttctgccgaggccgcagccacgacgcatattatttcgctcatccctccgccataaccggcgacgcgcctccgcctccgtttcttgccgtcagtcacgatccgattccgcttcggttactcagaaaagtttggctccgggccgcattctcggaactacgcgaagagtgcaaagcgaagggacttttatatcctggcgatttgcttgttccacccgatgtgcacggggagtacgttacgacaggtgactactattttgatttgtcggggaattggcccgcccggttgcgaaatgcgctcgaaaatacgattggacaccgcgacaactatctgcaaacagcgaccttcaattctcaccaacgcgaacgattactttcacgaacatccgtcgacgagatattgcgcgagatcgatttgctcaagccgcaagctcctagcgcaccgttcggattggctcgtttctttgccgagcaagggcttttgcccatgtacggaatgccgactcgcgtccgtgaactctatctgggactgcgatcagacgacgatggttcttcctcggactatgaatggtcgacgatggaccgcgacctagatcttgccgtctttgaattcgcaccaggttcgatattggtcaaagataagcttaaacatcgcgttgtcggattcacgggagctctgaccgaaccacagcggcgcaaaggcggtgccgcggaggtgcgaacagtttcatactggaaggagtccgaaaactacgtagcggtatgccgcatgtgcggctccgcgaagcataccgaccatatgccaccggctgcgttgacctgcgacgattgtggtgagcaaattgaagctgaccattttcaactctacgtgacgccggcggccttccgaacggacttccatccgaagagtgattttgaagatggaggtcgaatggccgtccgtactgttgcaaccgtgttacacgaaggggaacggatcgattggggaggaataacgattaggcgtggtgcagacgcgaccatcatgcaactgaatgacggcgtactgggggaagacgaggttggtctacgcttcgatattgacattgccgaagacaacgcggttcctaccccatttggcactcgcccgattacgataagcggggatcaggcaatcgacaccgccttcttggagaagcaacgcaatggccgatgggcagtacagccgaattcgcgcgagagattcgggttagtttcaaagaaaaaaaccgaggccttatatctcgagcttcgagaattcgatcaacgcttaacgctcgatatggtggctcgcctcggacctttgtcgcatcttccgacccgggcggcggcaattagcgcgactcaaattcttgtacagaaagcggcactagagctcgacgtctccgccgaagaattcgaggcgctggaacctcgattgcgttcggggcgtccaatgctccagatggccgacgcgctaatcaacgggtctgggctttgtcgtcggctcggtgagtcggttagtactggccgaccaccacagattgttgagatgctaagtgcaatcctagccaatgagtctgcgtggccgctacaagattttcttaagatagaccatgacggagcgcatgcggaacgctgccgctcatcttgctatcgctgcattcagcgttacggcaatcgtcgatatcacggtctccttgattggcgtttaggattatcctatctaagagcaatgacgcttccatcttatagctgcgggctcgatgcaagcgatcgcgactacccggaaatcaaaggctggatgaactgggcccatgagatagcgcagacggtgaccgatatgcgtaaaggcgcacttgcctacgagtcgctaacgcgttcagggttaccatgcctcattgagagtgatctgcagggcaatgaaacggcgagaattgtcgtcgtgcatccgctttggcgaattgatgaggctaacatgaaggcgttgcttgcagacgactggtcctgcaccttcaaatatgtcgatacctttaatctggaacgtcgtcccttgagagcgctagcaaaaatttccaacaacgcttcttcagtttga

SEQ ID NO: 27692 - DNA, 1149 bp, Burkholderia sp. Leaf177
atggctagcttttatgagttttttgctggtgcaggcatggcaagggccggcttgggtaccaactggagctgccttttcgcgaatgatttcgatcacaaaaaggcgatgacctaccaggctaattggggcacctctggcgagctaaaaatcggcgatatcaaagagattaagactgccgacatacccggtgacggcgacctcatctggggctcgtttccgtgccaagacttgtctcttgctggcggaggtgcaggtctgaaaggtgaacggtcaggcacgttttatcctttctgggatgtaattaacggattgattgcggacaaacgtgcgcccaaaatcatcgcgctcgaaaatgtttgcggtgccctcacttcccacggcggccaggacttcgcagcgatttgcgatacgtttgctaaagccggctaccgattcggcgccatggtcattgacgcggcgctgtttgttccgcaatcgaggccgcggctcttttttatcggcgttagaaaagatatcgagattgatccagcgttaatttcgcccggaccaatcgaaccattccacacgcgtgggctccgtaatgcattcgattgcatttcagccaaaactcagaaaaagtggctgtggtggaatgtaccaaccccagcacatcgcaattcaacgtttgctgatcttattgaagaacgccccgcaagtgtcgtctggcatacggcagccgaaacttctcagcttattggaatgatggcaccgattcaccgggcgaagctcgaggcagcgaagcgttctggtcgaaggatggttggatgcgtttaccggcgcactagagtcgaaggtggcgtcaaatttcaacgtgcggagattcgttttgacgatgttgccggatgcttacggacgccgtccgggggatctagcagacaagtcattgtcgtggttgatggcaatcgtgtcagatcgcggctgatatccgctcgtgagacggctcgtttgatgggcctggacgagagctataaattgccaaaaaactacaacgaggcttaccacctcacaggtgatggtgttgccgttcctgtcgtccgccacctctcccaccatatctttgagtctctcttgggtgtttcggtcgaagttcagcaacaagctgccgcatga

SEQ ID NO: 27693 - DNA, 2535 bp, Burkholderia sp. Leaf177
atgacttggcagccaccaatcacgttcgacgcgtgggaaaagcatttagttgagcggtttttaaaggtcgatgacagcggcgattcgactgacattcgttccttcgaagtaacggcgacgactctggcggatgcgctaggagcgcccccgaattctgaagccgctgtcgttgacgcatttcaaaaactgcttcaccgcgatccacttctcgtaacatcgctctcgacgcaatcgcagcgggtttcgaatgcaaacgtaccctgttgcttcgtttatcttgccgcgacgcttttcgtcgacagcatgctcgacggcgaagatctcggagtaggcgcatttcgcgaaaaactcgctaaatggctcgacatcgacaatagttttcctcaactcaaaggtattgcgagcatgtgggagatgttgcgcgactggataaatctcaggttgagtctcggtgagccctatagacgggtggtcctccccgatccgggcgcatggactcacatagggtatacgcggcggttatcatttccaaatcgatcggatgctcgggcgcttagacagttcattgcagaccacccgacagttcgagacaggccgctcgcgacaataaacttattcgacaattatcgactcaacaagcatatatcgtggggattgaaccgagcgttcgaggactttagggacgcctatttcaaacagcggcgtgcgctcgccgaccatcgtttttggcggttgatgtgccgagtatctaacaacggcgatgctaaacaaggggtggcggttgaaattgacatgttattcgaggaggacggaagtcgtctcttcgtcagcccggatcaaggcgttaaagatgggcgagcttatcaaaatctaactgacgctttagtcggcgaaaaggcagctcagagcataaatctctcgacgggcgttaaaaagggaatcctgttttttagagcttcgggccttggtcgttggtctatcgaaacggaccctcgcgaatcgtataccggtatctatgtcgccttagccttgagccatgaagcgaagatcggtactcgattggggccgctacgctcagagaagaaatggcttgtcacctccgacccaatttcggtaaggaaggccgtagacgcgctcatttcagctcgcctgcttacctcctcaaacgaccacgtctttcgaacatcggcatctgacggaatccgggttggaggcgcttggctcggtagacctcgcttccttccccggctcgactccgacacggaacgcttcgctgttacgtcgaatgatcgcgaatcggaactacgtgtatctgcagacgggcaattttcgtccgaaggaagcttgaacggatcgttcaccattcggccggcacttgtacacggtgagtctcagccccagtggagtcttcgactcgccttcacatcaaaagcaactccacatgcaaaagcggatggagctcgatatcggcttgatcttttgaaggattggccctctgagtccaaggcgttgcgctcgatcggaatcaatcatccgctcacttgggaagaaggtgagatcgagtgtggggatttgatcgaagctttgtatgccgacggcgctagtggatgggaagaggcggctctgatccagctactagtgcgagcctgcgacagcctcgacggctggtctttgttacgaattttgcacgatgcggggcttgtcgagcctcgcttgcgaggcggatggcgaggccggaattggactctgattgcaccgcatcttcttgtcgttccctcggatgccggaaccttaattgttatcgaaggcgccgtgtgtgaaagcctcgtggatagctttcgctcaattgttgatgcggagggcgggacatgcttccgacgcttaggcgtgggaccatggtccccacccacgttcggcgcggttgatgtttcggccgagaggatagcggaacgcctggactggccgatcgtcacgcggcccgcgtttgcctcggcttatcccctgggatttgaaaagacggaacgtctggctttagcgtacgagcctgccgatttctgggattggagagcgaagcgatttctaagtcgacccattgaacctggaacaacaacactgtctcgtctcgtgcacgtttcccgacgagaccacgacttgttcaaggtggcgagtgacaaccggactgttctatatctatctcgtaccgcggcgatagtggcggcgcatgcggcggcaggcattcctctatttcgtcaacgaggcgaagtgcttgttcgtattgcaaatgacggaggccttcctgacgcacttgcgaacgatttaagacgtcgacagatgcggactgccggtatcgtagagggcgtctacgcttacccgtcagcaaacgaagatgtgcaactattaaggcggctgcttccgaggtgtattgaaagcatcgaaacggttagtgagatatcggcaacgcgattacttggggcgtctcgacgttctgaggggcggactcggcctgtttggcgcaatggaaaaataattttatga

SEQ ID NO: 27694 - DNA, 2151 bp, Burkholderia sp. Leaf177
atgatcgacaataggctgaaccggcccacggactcatcgttacaggtctacgccggtcggtgcacaaatcgacacgatatcatcgcgaatatcgcgattaccgtccgccgcacagattccgtatggaccgcaatcgacaatccgcaaaagctttttccgaaatcgggagaggtcgagatacgtggtgccgaaacgaaatcaattcgcttgcatgattgggtcgcactacaagtttcaaagataggactaggtggccgcgcgcaatggaggggcattcatcattggcgccttttccccattgttgacctgtcacatctatcgtccttagacgacgttcgccgggttttagtagttgacggactgcctatttctggaaacacagggtcctggatcgttcgcacccgagaagacgcggtcacgaaggtagagctggttcgcgccggaaacgtcatgcggcttgcggcaaacacagtcgccttaaccgtattcgcatttgatgcggagtgccagattcaaatgcccgacgttgggacagaggtgtcgctgtacggcatcgccccggatgcgccttcgatcgcagtctacgactggactccggacaatggacatgtgtcacgcatagtccaagcgctatcgggagcgaacgacgtacgtattgacgaaataatcaagtggctcgaactgtattccgataggcgaaacggtcgcttatcggtgaacgggtcagatttggcggaagctcatgaagcgctacggtccggagagctcgcaaagcaattgttagcaaacaaacagttgctcagagcttacgctaacgcgctgcgagcgacgccttccgttgcgtttctgatcgacgaagagatagctgcgattgccgacgaagaacgttcgttaattcgcgcacgcgcggagaaagagcttgccgccgagctcaccaacgcgcgcaaagcgcgactcgtagatctaggaaaagagttggcaacatatgaagaagaagcgaaggcggctcttgaagccaagcacgaagcggcgatcggagaagtcgaaaaagaaattgccgaaatgcgagccgcgaaagagaagcttatcgacaaagatttgcgagcggttaagaaatccttaggccaagacattgaagcgatgtcacagcaaagttctcttcttaaagagggtattgatcggcttacgctcgaagaaaggaacattgaggaacagctcagggcactaacggatctgcacgctatagcatcgaccagattgcaggaagcgttgatggcggaaggcgcgataaaggcattaacgaaagtggcgaagccaacgggatacgttacggcgaaccttccccaccgtgcaaatccagtagcaggctcgcaaatacgcgatgtcattgacgcttgcgtgctcttgacggacgcgggaaaaactctcatggctcactttgtggcgctgatcatggctggagatgtcccaattttgactggtccagaggccaaagatttcatccgtatagcggaagcgctgatttcttcgggtaggtcggcaaggttggtcgctgacccaacaatgatctgttttgaagatctatggacgcgcgctggattacatgtgtcaacgacacttggtcaggcgctggagatgtcatccggagagaatccggtcaccgtattggcggtcattgaaaacgcggaagcatccggcgcgcgattttggtacccggctcttgcggataacgcgcgcggaggcaagttgcctcgacattttttcgtctgcattactgtcggagacagcgcgtgcgaggaagccaaagtgattggtgacgaaggcgtgcagctggatattcggaaagctatagttccgaatgccgccgcgatttcgccagcgttattgggaccggcactgtttcgcgaggttcggccagcggagtggatagtagatatcgccccgggggtgggtgcgattggctcgatcacggcacatctcgatatcgacactgccatccgagcagctcgggccgccctagaggcaatgcgcctaactagttcaagtgccgcagagtcggccgcaaaatccgtcgtagcgttgttcgcacaagaagagtcgcgcggtaattcatcgctctcgttactttcccgaggaaatacaggtgcttga

SEQ ID NO: 27695 - DNA, 5844 bp, Burkholderia ubonensis
gtgcttgatccgattggcggctttgctcgtatcagaaacttctttatttcctacgtagagaccaactttcgtatcgcggatccgaccactgcagagcagcgacgcaagctcttagaggctgtcaacgtgcttgcgactgagccgtacatcgagcccgttctacgatacgaggctcatgacgaaaagatcgaagatctcgcgaacaggaacgacgggcccctcgctcctctcagcaaagcggggcgcgtggcgtttgcggaattggctttgtcgggactgttcgagggtaagcctcactgcggccctattcggcgagagtcgtcctacgcgccctatcgtcaccaggtcgaaatgttgcgacggggcttgttgcccggccatcccggaatagtgacatcaggaaccggatcgggaaaaacagagagcttcatgctgccagttttggcggcgctcgcgaacgaggctgtgaattggcccgcaccgtccttgaactacttgcaatcagattggtggaaggtgccgaattcgcgttgggtgtcaaggcgcgccggtgaatccaggcccgctgctgttcgggcgctcgtgctctacccgatgaatgcgctcgtcgaagatcaaatggttcgcttgcgccggacgttggattcggaagacgccagaaaggtgatggatgaacgcttttctggtaatcggcttttttttgggcaatatacgagcgcaagcccggttacggggcacgaaacccatccccgactggcagcagagaagcaggagagggaaagacgctcgcgacgtggcactaaactccgtgcagcgatgcaagcgatcgagcgcaaccagaatgcggcccgcttgcatgatgacaagcaaaaggagctggcgaaagcgaacggaactcgagtgccggatctgacgcgatacatttttccttcggcggatggcggggagatgtcgtcacgatgggacatgcaagccgcaccgccagatatcctggtcacaaacgcgtctatgcttggtgcaatgctgtcgcgagaggtcgaagatccaatcttcgagcagaccaaaacgtggttgcagtccagcgaagacgcattcttctatcttgttttcgacgagcttcacctcattagagggtccgctggcacggaagtagcgtttctcatcaaggcgctgatcgagcgattgggactcgatgcgccggagcaccgccacaaactgagaatactcgcgtcgtcggcttcgctgccgatggacggagatcccggcattcaatcccgcacgtatctcagggatctgttcgcgcctttcggaaccagctgcggcccctccgatgccggctccacttctcctgacttttgggccgaatgcgttgttcgcggtgtggcagcgattccaaagggggcacccgccaaaatcgaccctgaaccgttcaccgcactctttcgagaagctatcgatccggctagcggttttatcgcgcgactcaaagagaacgctgcgctcgacgatcgaatcaagctggctggacgcgctttgggtgtggatgccggatcgatggaagagtgcgtcaagcgtctcgccgaaagcgcagcggcaatcctgaccaatgcttgtcgcgacggcgacggggtgcgagcgttttccgtcatccatgtcgctcagcgaatctttggaaaccaaactcagaacggcgaagaagcacttcgagggctcatgcttgctcgcgctctgccggaatcagggttatggccggtccgcgtacatcccgatacgccggcgtttcggatgcattccttcattcgaaacatcgaaggactgttcgccgcgccatatctcgtcggcaaagagacgcaattcagacatctgaccgtggaacgaggcctcacgcatgccgccccttcggcggagcgcaagcgtggaagcaggctcttcgagcttttgtattgcgaggcctgcggtgatttatttgtaggcggtcaacgaggccagaagagcagtttgactccggccaccgagctcctcccggcatcggcggacttggagcatttgcccgaacgcgcggcgtcggagtactacgatcgaatgacgctcgatgagttcgcagtgttctggcctcgtcgcgaggagtgtgcgaagtccgagaaagactacgatcgatgggagcatgctcacctccatgtggacacgggcgttgtcacgcgaggtcgggatgtcccctccgggaacattggaggttacttgtacttccagaatccacccgcggtttccggcaaaggcaaaaccgcgggaaaggcaacggcacagcctttctgttgtccgaactgcggtaccgattattcgaaccgtcctgcgacaagtcgatcccggtcccctattcgtgcgttcagaaccggtgtcaccaaagcatctcaacttgtcgcaacggaactgttcgaactgttgcatgcagttggtgccgagccgaagggcatcgtattctcggatagtcggcaggacgctgccaatcaggcgttggaagtcgaacggctgcatttgcgggatcttcgtcgagaggttcttgtcaccgtcgcggaacgcgccgtcgagaatcttcggaaagattggatgacgcaggagcaattctcgcaacgcgtacaacaactgctaaccgaaaataagtccgacgagcttgtcgcactcacaagaaaatatcagcagcagggcggcgacgcgcgcgatagatcgaaggtcaaggtaagccaactcctgcaaagcaatgacgagtcgcaatcacttggcgaacttgtgaaggagttcatcaagttgggcattcatccgttcgacgaagttggcctgaagcgtttcgataagttgccttggtatcgtctcttcgaaaaggacggggaaagctacacgttcagccatcagctttcacatgcgtcgaaggcatcgctcaatggcgagatcctcgaagagcaatacgaactcgtcgatgacgtcatttttgcgaatacgttcttcgcactcgaagagaccgggttggcgtatcccacggtgtcggggaccagtggcagcgatgtggacgaattagatgcgtggttgcgtgtcttcgcgagtgcttggcgagttagaaacaatcgctttgtgaatgccgacagcctgaacgagtgggtctcggggggcgatgtaaagcacaagcgcaccgtaaaatttgccgagaaggtttttgggtcttccggtttcgtcgacggactctcgagggttcttcaaaatctctcggacaaggggcataggagcggcatcttcgagatcgggaatctctatctgaaggttgcagaggaaacggacccgtactggcgatgcggaaattgcggtcgcgttcatctgcatctcggtctcaagcgatgcacacggtgcgcgaccgccctctcaaccgagcataccggcaaagtgagcgagctgtgggcatcaaacttcctggcgcgccgcatcgtgcgtggagcgaacgacgacgtcagccgcttcaggttgcgagttgaggagctcactggccaaactgacgacttcgctgctcgcctgcgtagcttcaagggtatattcgttggcaacgaaactgagatcgagagacgcgcgaccgagatcgacatgttgtccgtcactacgaccatggaggtcggcattgatatcggtgcacttcagagcgtctatcaaggcaacatgccgccccaacgattcaactatcagcaacgggtcggacgtgcgggccgtcgaggtcaagccttctcattcgttgtcacgttctgtcgcgggcgaagccacgatgcatactatttcgctcatccatcggccattacaggcgacgcgcctccgccgccgtttctcgctgtgacccatgaccctataccgcttcgtcttatgcggaaggtctggttgagagcagcattcgccgtgttgcgagataactgtgctgagcacggccgcgagtatccgggtgacttgctcgtgccgccggacgtgcatggcgagtacgtcacgaccgacgactattatttcgatgaaacgttgaactggcccgacaagctacggtacgcgctttcgcaaaccattgcggtacgtgacaagtatctcgaaactgcgagttttgatcctttgcagcgggaacgcttgagggccagcgccactgtcgatggactgcttgaggaaattgcatcactcaaggcgcaggctcccgccgcgtcatttgggctcgcgcgcttccttgcggagcagggtttgcttccgatgtatggtatgcccacccgagttcgcgatctatatcttggacttcgcgatcgtaaagataatgctctggaagacgcagaatggtcgacgatggaccgagatctggacttggcggtgtttgagtatgcgccgggatcgatccttgtgaaggacaaactaaagcacaccgttatcggcttcacgggcgcgctttccgatccgcagccaaggcgtggcgtcgggctggaggcgcgcatggtttcgaattggaaggagtcgacgagttacatcgcgttctgccgagaatgtggctcggcgaaacacagtgaccacatgccggcttccaccgttgcttgcgatgactgccaccgcgaaatcgatgcagacgacttccacacctatgtcacgcccgcagcgtttcggacagacttcaaacccaaaagtgaggtcgacgacgtaggtcgaatggctgtcagaacagttgccaccgtcttgcacgaaggtgaacgagtcgactgcggcggcatttccgtccggcggggagccgatgcgacgatcatgcagctgaataacggcgttgctggtgatgacgatgaaggtcagcggttcaccgttgcgcttgctcagagcaattctcctgccggaggtgtgtccatagttggagatcaagccattgaggtctcttacctcgaccggcaacgcggcttatggaacgtcgacgcgagttctcgacagcagttcggactcgtagccaagaagaagacggaggcgctgtatctggagctgcgggagtttgaccgacgcttgaccctggatagagtagctcgcatcggtgattcgtcgcacttggcaacgcgagcggctgcaattagcgcgacgcagatcttggttcagaaggccgcactcgagctcgatgtctcggctgacgagtttgacgcgctcgaacctcgactgcgctctggccttccgatgcttcagatggctgactcgttgatcaacgggtcagggttgtgccgtaggcttggcgagtcggtcagtcagggacgccctccaaagattgtcgagatacttcacagtatcctggacaacgcagcggcgtggccattgctagacatcttgagcgttgaccgggaaggcgcgcatgctgaaaggtgccgttcgtcttgctaccgctgtatccaacgatacggaaaccgccgctatcatggtcttcttgactggcgattgggtctcgcatacctacgggcgatgtcgaatcccaagtatgcgtgtggtctcgagaagggagacgatgtttttccagagattgatggatggaaagattgggctcatgagcttgcgcagtcggtagcagacatgcgcaagggtacgctccgttaccagtcccttccccacagcggcttgccgtgcctgactgtcactaacctcgaaggagttacagtctcgcggatcgctgttgtccatccgctctggcgactggacgaggactacgcgaaagcgatcttggggaaagactggtccgaggagctggactacgtcgacacgtttgtgctggagcgccgacctttgagggagatcgcgaaacgcacaagcgatcaggcatag

SEQ ID NO: 27696 - DNA, 1158 bp, Burkholderia ubonensis
atgggtcgcttctacgagttcttcgccggcgggggaatggcccgcgctggccttggcgaaggctggcaatgcctctttgccaacgacttcgaccataagaagggcgtgacgtatcgtcagaactggggcgaaggcgaactgctgaccggggacgtgcgccaagtcaaaccggaaaaccttcccgaccgcgcgaacctgatatggggctcgtttccttgccaagacctttcgctggccggcgcgggggccggcctgaaaggcgatcgttcgggcacgttctggccgttctttgatgtcgtgaaaggcttgatcgcggataatcgcgcgcccgacatcatcgccttggaaaacgtcgtcggtaccctgcattcgcacgagggcaaggacttcgcggcgatttgcactgcgcttgaccgcgccggctaccggttcggtgcgatggtgatcgacgcggcgttgttcgtcccgcagtcgcgtcctcgcctgttcgtcatcggcatccgcaaggatctgcccatccctgatgcgctcgtgcggcaagacgcatcgccactatttcacccgaaggccttgttgaccgctctcgacaagctgacggccaaggcccggcagaattgggtctggtggcatctgcccacgccagatcgccgtgaacaggtgttcgcggacttgatcgaagaaagccccaccggggtcaaatggcacacgactgccgaaacgcaaagactgttggcgctgatgagcgatgtcaacctcgccaaggtcgagaaagcgaagatagtttcgaaggcgagcggtcgtcgcatggtcggtgcgatttaccgtcgcacccgacgcgacgaggaaggcaacaaggtgcagcgtgctgaagtgcgctttgacgacgtggccggttgcttgcgcacgccgtccggcgggtcaagccgacagttgattatggtgattgacggcagtagggtccgctcgcggctgatttccagtcgcgaaacggcacggctgatggggctacgcgacgagtacgtgttgcccgagaattacaacgaggcttaccacttgaccggcgacggcgtggcggttcccgtcgttcggcacatcgcggcgaatctcttcgagccgatcctggccgttcaaccgccactggcgagggtcgcggcatga

SEQ ID NO: 27697 - DNA, 1626 bp, Burkholderia ubonensis
atgcccgaggccgagagccgcatccagctatacgatctttctccggaagctgcgcctaccgctgtctacgactggacgcccgacgaggattacataacgagggttctgaagtcactgcccggcgcgtatgacgcccgagttgatgcgctagtgaaatcgcttttggggcatgcggaaacccacgaaaaccgcatcgccgttaatccctcggatgtgctgtcagcgtacgaggcgctacgcagcggcgaactcgccaaagcactgctggcgaaccgcgaccgcattagagaactcgcggaagccctgcaatcatctcccgtgatctcgcgccttatcgagaaagagattacggacatcgcagagcacgagcgagcggcgattcaagcgcgccttcagcgcgagctgcaccaagacatgggggccttgcgtgacaaacggctggcagaaataaatcaagagctgcagacttccgagaatgaatggaaatcaaagcttgatcttcgtatccgcgaagatgaactggcgcagcagcgggcgtttgccaaacgacgaacggacgaggagcagaaactaaaacaagagctcggcgatctgcgtgcgaagcgcgaggtcgaaattgtacgcgaggtcgaagatcgcaaagaccaggcgcagggggttgtcaacgaactgtcgcaacaacgcgattcattgtctaaatctattgccgttctcgagaacgaaaagacgagcctcgaggggacgatatccactctgactgaaaaagtttcagttgccgagcgccaactcgaggacatagaaagtcgtaagggcaaagtttccgcagtcacttcggcaacgctgtcgcgtttcatacttcctgtcgccgcgcccaacagagcagaaccgctcctgtgcaaagacgtacatgatgtgattcaaaaatgcgctttgttgacacctagcggcaagaagctgatggagcacttcgtgacgctgatgctcgctgccgatgtgcccatactgaagggaccgcaggtggatgatttcctgcgtgtcgccgaggtgatgttctcttcgggagcgcgcacatcgttggtcgctgatcccaccatcatttgcgtcgaagatctttgggtgcgcgcgggccttcgcattcccacctcattggggctagccatggatgctcatgcagatgactccgcgccaaccactctggccatcgttgacggtgcggagaattccgccgcccgctattggtacccagcgcttgccgaacaggcccggcgtggaaacctgccacgaaaaatgctcttttgcgtgaccatcggcgatggcgacaacgacgaagcgcatgctatgcagaattccggcgtcaccttggacgtgaataatgcaatcgacggtggctcgcctgcgcttgcggctgtcttgctcagcccgaagctttgtcgggaccttcggccagacccttggataagtgacttgtcagtcggggcgtccttgatgattacgtcgatcgatggcctcacgatcgattccgcaatgcgcgcgacacgagcctgtctcgaggctagtcgtctaagtcagcacgccagcgcttctgtcagttctgtcgcttcgttgtttaaaacatcaaagaactaa

SEQ ID NO: 27698 - DNA, 5844 bp, Burkholderia ubonensis
gtgcttgatccgattggcggctttgctcgtatcagaaacttctttatttcctacgtagagaccaactttcgtatcgcggatccgaccactgcagagcagcgacgcaagctcttagaggctgtcaacgtgcttgcgactgagccgtacatcgagcccgttctacgatacgaggctcatgacgaaaagatcgaagatctcgcgaacaggaacgacgggcccctcgctcctctcagcaaagcggggcgcgtggcgtttgcggaattggctttgtcgggactgttcgagggtaagcctcactgcggccctattcggcgagagtcgtcctacgcgccctatcgtcaccaggtcgaaatgttgcgacggggcttgttgcccggccatcccggaatagtgacatcaggaaccggatcgggaaaaacagagagcttcatgctgccagttttggcggcgctcgcgaacgaggctgtgaattggcccgcaccgtccttgaactacttgcaatcagattggtggaaggtgccgaattcgcgttgggtgtcaaggcgcgccggtgaatccaggcccgctgctgttcgggcgctcgtgctctacccgatgaatgcgctcgtcgaagatcaaatggttcgcttgcgccggacgttggattcggaagacgccagaaaggtgatggatgaacgcttttctggtaatcggcttttttttgggcaatatacgagcgcaagcccggttacggggcacgaaacccatccccgactggcagcagagaagcaggagagggaaagacgctcgcgacgtggcactaaactccgtgcagcgatgcaagcgatcgagcgcaaccagaatgcggcccgcttgcatgatgacaagcaaaaggagctggcgaaagcgaacggaactcgagtgccggatctgacgcgatacatttttccttcggcggatggcggggagatgtcgtcacgatgggacatgcaagccgcaccgccagatatcctggtcacaaacgcgtctatgcttggtgcaatgctgtcgcgagaggtcgaagatccaatcttcgagcagaccaaaacgtggttgcagtccagcgaagacgcattcttctatcttgttttcgacgagcttcacctcattagagggtccgctggcacggaagtagcgtttctcatcaaggcgctgatcgagcgattgggactcgatgcgccggagcaccgccacaaactgagaatactcgcgtcgtcggcttcgctgccgatggacggagatcccggcattcaatcccgcacgtatctcagggatctgttcgcgcctttcggaaccagctgcggcccctccgatgccggctccacttctcctgacttttgggccgaatgcgttgttcgcggtgtggcagcgattccaaagggggcacccgccaaaatcgaccctgaaccgttcaccgcactctttcgagaagctatcgatccggctagcggttttatcgcgcgactcaaagagaacgctgcgctcgacgatcgaatcaagctggctggacgcgctttgggtgtggatgccggatcgatggaagagtgcgtcaagcgtctcgccgaaagcgcagcggcaatcctgaccaatgcttgtcgcgacggcgacggggtgcgagcgttttccgtcatccatgtcgctcagcgaatctttggaaaccaaactcagaacggcgaagaagcacttcgagggctcatgcttgctcgcgctctgccggaatcagggttatggccggtccgcgtacatcccgatacgccggcgtttcggatgcattccttcattcgaaacatcgaaggactgttcgccgcgccatatctcgtcggcaaagagacgcaattcagacatctgaccgtggaacgaggcctcacgcatgccgccccttcggcggagcgcaagcgtggaagcaggctcttcgagcttttgtattgcgaggcctgcggtgatttatttgtaggcggtcaacgaggccagaagagcagtttgactccggccaccgagctcctcccggcatcggcggacttggagcatttgcccgaacgcgcggcgtcggagtactacgatcgaatgacgctcgatgagttcgcagtgttctggcctcgtcgcgaggagtgtgcgaagtccgagaaagactacgatcgatgggagcatgctcacctccatgtggacacgggcgttgtcacgcgaggtcgggatgtcccctccgggaacattggaggttacttgtacttccagaatccacccgcggtttccggcaaaggcaaaaccgcgggaaaggcaacggcacagcctttctgttgtccgaactgcggtaccgattattcgaaccgtcctgcgacaagtcgatcccggtcccctattcgtgcgttcagaaccggtgtcaccaaagcatctcaacttgtcgcaacggaactgttcgaactgttgcatgcagttggtgccgagccgaagggcatcgtattctcggatagtcggcaggacgctgccaatcaggcgttggaagtcgaacggctgcatttgcgggatcttcgtcgagaggttcttgtcaccgtcgcggaacgcgccgtcgagaatcttcggaaagattggatgacgcaggagcaattctcgcaacgcgtacaacaactgctaaccgaaaataagtccgacgagcttgtcgcactcacaagaaaatatcagcagcagggcggcgacgcgcgcgatagatcgaaggtcaaggtaagccaactcctgcaaagcaatgacgagtcgcaatcacttggcgaacttgtgaaggagttcatcaagttgggcattcatccgttcgacgaagtcggcctgaagcgtttcgataagttgccttggtatcgtctcttcgaaaaggacggggaaagctacacgttcagccatcagctttcacatgcgtcgaaggcatcgctcaatggcgagatcctcgaagagcaatacgaactcgtcgatgacgtcatttttgcgaatacgttcttcgcactcgaagagaccgggttggcgtatcccacggtgtcggggaccagtggcagcgatgtggacgaattagatgcgtggttgcgtgtcttcgcgagtgcttggcgagttagaaacaatcgctttgtgaatgccgacagcctgaacgagtgggtctcggggggcgatgtaaagcacaagcgcaccgtaaaatttgccgagaaggtttttgggtcttccggtttcgtcgacggactctcgagggttcttcaaaatctctcggacaaggggcataggagcggcatcttcgagatcgggaatctctatctgaaggttgcagaggaaacggacccgtactggcgatgcggaaattgcggtcgcgttcatctgcatctcggtctcaagcgatgcacacggtgcgcgaccgccctctcaaccgagcataccggcaaagtgagcgagctgtgggcatcaaacttcctggcgcgccgcatcgtgcgtggagcgaacgacgacgtcagccgcttcaggttgcgagttgaggagctcactggccaaactgacgacttcgctgctcgcctgcgtagcttcaagggtatattcgttggcaacgaaactgagatcgagagacgcgcgaccgagatcgacatgttgtccgtcactacgaccatggaggtcggcattgatatcggtgcacttcagagcgtctatcaaggcaacatgccgccccaacgattcaactatcagcaacgggtcggacgtgcgggccgtcgaggtcaagccttctcattcgttgtcacgttctgtcgcgggcgaagccacgatgcatactatttcgctcatccatcggccattacaggcgacgcgcctccgccgccgtttctcgctgtgacccatgaccctataccgcttcgtcttatgcggaaggtctggttgagagcagcattcgccgtgttgcgagataactgtgctgagcacggccgcgagtatccgggtgacttgctcgtgccgccggacgtgcatggcgagtacgtcacgaccgacgactattatttcgatgaaacgttgaactggcccgacaagctacggtacgcgctttcgcaaaccattgcggtacgtgacaagtatctcgaaactgcgagttttgatcctttgcagcgggaacgcttgagggccagcgccactgtcgatggactgcttgaggaaattgcatcactcaaggcgcaggctcccgccgcgtcatttgggctcgcgcgcttccttgcggagcagggtttgcttccgatgtatggtatgcccacccgagttcgcgatctatatcttggacttcgcgatcgtaaagataatgctctggaagacgcagaatggtcgacgatggaccgagatctggacttggcggtgtttgagtatgcgccgggatcgatccttgtgaaggacaaactaaagcacaccgttatcggcttcacgggcgcgctttccgatccgcagccaaggcgtggcgtcgggctggaggcgcgcatggtttcgaattggaaggagtcgacgagttacatcgcgttctgccgagaatgtggctcggcgaaacacagtgaccacatgccggcttccaccgttgcttgcgatgactgccaccgcgaaatcgatgcagacgacttccacacctatgtcacgcccgcagcgtttcggacagacttcaaacccaaaagtgaggtcgacgacgtaggtcgaatggctgtcagaacagttgccaccgtcttgcacgaaggtgaacgagtcgactgcggcggcatttccgtccggcggggagccgatgcgacgatcatgcagctgaataacggcgttgctggtgatgacgatgaaggtcagcggttcaccgttgcgcttgctcagagcaattctcctgccggaggtgtgtccatagttggagatcaagccattgaggtctcttacctcgaccggcaacgcggcttatggaacgtcgacgcgagttctcgacagcagttcggactcgtagccaagaagaagacggaggcgctgtatctggagctgcgggagtttgaccgacgcttgaccctggatagagtagctcgcatcggtgattcgtcgcacttggcaacgcgagcggctgcaattagcgcgacgcagatcttggttcagaaggccgcactcgagctcgatgtctcggctgacgagtttgacgcgctcgaacctcgactgcgctctggccttccgatgcttcagatggctgactcgttgatcaacgggtcagggttgtgccgtaggcttggcgagtcggtcagtcagggacgccctccaaagattgtcgagatacttcacagtatcctggacaacgcagcggcgtggccattgctagacatcttgagcgttgaccgggaaggcgcgcatgctgaaaggtgccgttcgtcttgctaccgctgtatccaacgatacggaaaccgccgctatcatggtcttcttgactggcgattgggtctcgcatacctacgggcgatgtcgaatcccaagtatgcgtgtggtctcgagaagggagacgatgtttttccagagattgatggatggaaagattgggctcatgagcttgcgcagtcggtagcagacatgcgcaagggtacgctccgttaccagtcccttccccacagcggcttgccgtgcctgactgtcactaacctcgaaggagttacagtctcgcggatcgctgttgtccatccgctctggcgactggacgaggactacgcgaaagcgatcttggggaaagactggtccgaggagctggactacgtcgacacgtttgtgctggagcgccgacctttgagggagatcgcgaaacgcacaagcgatcaggcatag

SEQ ID NO: 27699 - DNA, 1158 bp, Burkholderia ubonensis; identical to SEQ ID NO: 27696

SEQ ID NO: 27700 - DNA, 1626 bp, Burkholderia ubonensis; identical to SEQ ID NO: 27697

SEQ ID NO: 27701 - DNA, 5847 bp, Burkholderia ubonensis
atgctcgacccgataggcgctacccatagaatccgggaattcttcctgtcgtatctggaaaccgctttccggattcgcgaccagtccgtctcggcagcacggcgacaactgctaacccgacacggcactctgacgacggagcccttcctcgaaccggtgccacgctatgaacgggtgacgcatttcctccaggacctcgtcctgctcgactcggggaatccgctgcgctctttttcgagtgtggcccggcgcgcgtttgtggaactggcactgtccggactgtttcccggagaagcgtccggcagggacgacgtgcggcgaaccagcaatgtgcgcccctacctgcatcaatggcagatgctcgaacgcggtgtgggtcgcggtatgcctggaatcgtgacgtccggaaccggctcgggaaagaccgaatcgttcatgctgcccatcttcgcgaccatcgcgcaggaggctgtgcggtggcctgcgccacatggcgaaaagctctcgaacgaatggtacaaggaagccggacaggaattcgtcgcacaacggtccaaggaaagtcccggccgacccaaagcggttcgcgcgttgctcatctatccgatgaacgcgctagtcgaagaccagatgacgcggctacgccgcgccctcgactccgacgaagccacatccgtgatggatgatcgattcagcggaaatcgcattttctttggccgatacactggcgccgcaccggtcaccggtcacctcaatcatcctcgacgggccaacactgcacaggaaaagcgcaagcgggcgcgccgcatggagacgatgcgcagccggatgagcgacctcgcagccacgcagacacttgcgcgcgaacatgatgcgcgcgaacttgccgatgcacacgcggctggtcgagaagcccccgaacccacaaggttcttgtttccctcgctcgatggcgcggaaatggtcacccgctgggacatgcaggcaaccccgccggatatcctgattaccaatacatcgatgctcgcgacgatgctcgtgcgcgaggtcgacgagccaatcttcacatcgactcgcaaatggctcgaagaaaacgacgatgcctatttctttctggtcatggacgaacttcacctggttcgtggctcggccggaatggaggtcgtcggcctcctgagaagcctcttcgccaagctgggtctcgacagaccggagcatcggcacaaggtcaggattctggcgtcgagcgcctcgttgcccgatgagggtcccgactcggaggtcagtctccagtatctgtttgattttttcggcagctttggctcggcccgcgaacccggcgacgctggtttcgacacacccgcagactggcgccatgcaatcgtgcgtggacggcaactcacccagcggttcgacggcaccctgccgctcgctaccgagccgttcgtggagctcgccgctgtcctggacgtcaatggggctgattttactccacaagtaaccgcgcgcaattccgcgctcgacgtcgccctcgcgcgggtcgcgaggtcgttgggaatagacgcaacttcgacggatgtcgccgcggctctgcccaaagtgattgccgccgcatcatccgcaatagttcatgcctgcacgaccgacgatggaacgtccgcagtgctgcgcgccaccgcggtcagtgaaatcgcccagcgacttttcggaagcgatggcgtcgacgccgagagagcggttcgagggttgtgcatcctgcgcgggcttgccgacacggtatcaacgcccgaactctacggcatcgcggttccggacggactgccgagtgtccgccttcactcgttcttccggagtatcgagggcatgttcgccgcaccctatcgggatagcggcggaaaactgcacttcgacgggctctcggttgagcgcggtcacacacacgctctgtgcgatgacggttcgaccaggcgactgttcgagctcgtgtactgcgaagcgtgcggcgaactgtttgtcggtggacgtcgaaacgccgacgacaatttgggggcgaccgagttgctgacgacggcgccgaacctggaacagctgcccgaagctgccgcgattaccaactacgaaaatctcagctataacgagtacgccattttctggccgcggcgcgacgagccgaaggacggtgaaaccacgcacgaacactggccggatgcgtctcttgatacgcgcaacgcgatggtcacgcccgttgccgcatccgacaactcgcgtctcgcgggacggctcttccacatgaatcaagcggacgacctagccaggaagcccgggtcagcttcaccgcgctgctgccccgcttgcgggaccgactacagcaggcgcagaccagggatgggggccatgtcgccgttgcgaagttttcgtaccggtttcgcgaaaacctcgcagttgctcgcgaccgagctgttttcggccttgagggtgagcggtcgaactcccaagtccgtggtcttttccgacagccgtcaggatgcggcccgtgctgctctggacatcgagcgccgacaccatcaggatacccgcaggcagatgctcatcgaagcgctgaagtcggtcgttgctgagcgaccaaatggcgaagcgcgcgaggagaagaagaaacaagccgacgaggcactcaagaggggcgacttcctcgaactgaagcggctctccgatgagctggtaaagttgcaacttgcgaccgacccgtcacgagttgcacttgccgaagtaatagagccggtactgctgacttcgaacgaactgcgctcttacctgcggcgacatgtcgagcttggcattcatccgacggacgccgcgggtatcggctacatccgcaacgagccgtggaatcactgggtcgtccctgctggagcaagcgggaagccagaatggcctgcacacagcgacagcggggaggccggggaggctcgcgccgagattcgcgaggaccagcgtccgctgacctacgaagtgctgttcgcgaagacctacttcgcgctcgaggagacaggtattggctatccgtcgatgaccgccagccagaccactgattcgaaccggctcgatgcctatctgcgggtattcgcagatgcgtatcgtgttgcgggaaaccgttggtccgaggatgcggcccatgtcgaccatgcgcaggagtttggcccacggcaccggattttcaagttcgcgcgcgccagcgtaccctcggcgcccgtcgttgaactggacgacgtgctggagaaattcagagccctcgaacacgcacacggtatcgtggagctcagcaaactctacgtcaggctgagccaacggggagacccctactatcgttgcagcaactgtggccgcgttcacctgcaccgaggaaccggcatatgcacgcgctgccttgacccattgcctactgagcgggaaggcaatgtcgaacaactgtgggattcgaacttcctggcacggcgcaccacgcgttccgagcagggcaatgaatcagcgttccggctgcattgcgaggagctcacgggacagaccggctccccggctgcccggctcagagccttcaagggtattttcgtcggagaaaagcagtcgcctgaatttgagctcttcaagcgcatcaacgaaatcgacctgctgtcggtcacgacgacgatggaggttggtatcgatattggtgcgttgcaggctgtgtatcaggcgaacatgccgccgcagcgattcaactatcaacagcgcgtcggtcgcgcgggtcggcgtggtcaggcattttcaatggtagtcaccttatgccggagccgaagtcacgacctccactatttccgcaatccgaagcgaataaccggtgacgtgccgcctccgccgttcctgaccacgggacatgtcgtgattgtcgaacggattgtgcgaaaggcctggctggctgccgcgtttgcgcgcctgcgggatgaagacggccccgcttatccaggagatgacctgacggatacgcatggcgagtttccgcccgcatccagcttctatgccgccactggtaactggcggagtcggctcgagggcgcgctcgccaccacgctcgcgacgcgggaccgggtcatcgatgcactggccgacaaggacacgacccaagccaggaccatgaaagatgcaatgacgccgcaacacctgacgcaccaggtctggtcccttgccggagaaggggcgggcagcccattgccactggcacaatttcttgctgagcagggtttgctgcccatgtacggcatgccaacaagggtacgcgacctgtacgtgggcatcgagaacaacgaggaaaagactcctgaatttgcaactgttgaccgggatcttgacatcgcggtctacgagtttgcgccggggcgttcgctcgtgcgcgacaagaggaagcacgagtcaattggcttctcgccggcgctgcgcgaaccggacgtgcaaccgaatcgcgcgacgtcattcgggtcatggaaagcagaaatccgatacatcgcgttttgcgagtcctgcggggccgtgtcgagtctggccgacctcccggcggaacaggtccaatgcgtggattgcgaatgtgacattcccagcgaaagattcgcgagatataccagtccggttgctttcaccactgatttccggcccaagtctgtcgaagaaggagaactggcgcccgtgttccggcgcgtaacgacaactgaggcctccaatgtatctctcgacagcgtgcccggttcgaacatgtcggttggcacgacagcggacgcacgcgttcttcgactcaacgaaggcaagctcgatgattccggtgcggcccagccgttcgccatggttccgaccaaggaccaccgagtgccggcaccggggaatcggagatggtcgttggacggtcaactgattaccgaagaaaagttcgccgaactggacatgcgtggcgctgcgcgacgcaacacggacttgaccgacgaagcggtccggctgatggcccgcaagaagacggacgccgtgtatctcactccggtccgggttccggaagggctggatatcggccgggtcggtcgtgacttcggagacacctcggtccgtgcggcactgattagcgcgactcacctgttgatgcagcgggcatccctcgaactggatatcgcacccgacgagttcgaggctctggagccgcgcctgcgcaacggcaagccgttgctgcagattgcagacttcctcgtgaatggcgccggattttcaaaccgcctggccacggggaatcctccgctcgtcgtcaggctcgcgaagtccatggtcgatgccccgctatcggacagcctcgttgcaccgtactttcacgagacgcatcgcggtacgtgttcgcaggcgtgctacgagtgtatgcagcggtatggcaaccgggcctatcacggtttgctggattggcgactcggactgtcgatgctccgggtatttctcgacgcatcgtcgatgacgggtctggacggcaactgggccgcctcccccgaactctccgactggccggatttggcctggcgctcggcggaagagattgccggactcagccctgacttatacgacctaaagcacgttggccccctccggctgccgtcgatagaggagcgcaatactccgcgtcgatacgtagtcgttcatccgttctggtcgagaaaggccgtgctggaaaaatgcgtagacgggttttccgggacgacgttgctgattgacacgttccaggcggcaaggcgcccgcaacgcgtcctgtttgccgcacgggagcatgcgcagaagcatggactcatgtaa

SEQ ID NO: 27702 - DNA, 1176 bp, Burkholderia ubonensis
atgagatttgcgggactctttgccggaatcggcggattcgagcttggcctggcgagggccggacatactaccgaactgctctgtgatgtcaatgtcgcagccgaagcagtgctgaaacgccacttcgccgacgtgccttaccatgccgatataacgacgctgaggtcccttccgtccgacattgacgcaatctgcgctggctttccatgccaggacttgagccaagcgggccgcggtgcagggcttgacggccagaagtccgggctcattgcggaagtattccgtctgctatcgcgacggcgtatccccactgtcgttattgaaaacgtgccattcatgctgcagctgagcggaggcgcggccatgagggctatcaccgacgagttcgaacgccgcggttatcgctgggcatatcgtgtcgtagatacctttgcgttcggcctgccgcagcggcgcgagcgagtctttatggtggcttcgcgggaaatcgaccccgcagaggtcgttctcgccgacgagaatgtactgccccgtccgacgaccgacgtgggtcgcattgcgcatggcttttactggaccgagggactaacgggtctcggatgggcggtcgacagcgtcccgactctcaagaatggctcgacgattggcattccgtcgccaccggcggtgttgctgccagatggacaaatcgtcaagccgagtatccgcgacgcggaaagactgcagggatttgcaccggggtggacggaacccgccgagaaagtcgtgcgacggtcgtttcgctggagtctcgttggcagtgcagttagcgtcccggtcgcccaatggctggggcaacggctggccaatcccggggcctacgacaagcaactggaccgcgagtttccgacggccggccggatacctcgggccgcgcgctttgacggaagacatagataccaggtagaaatcggcgtcgacccgttggggcatcggccgccgtcgctgtcggattttttacaggatgagggtgacccgctttccctcaaagcagcactcggcttcctgacccgaacccgccgcgccaagctcaagtttgacaatgccttcatagctgccgtggaacgtcacgtcgagcttctgggtggtgagattccacctcggttagtaaggcaactggagctactgccggcctga

SEQ ID NO: 27703 - DNA, 2679 bp, Burkholderia ubonensis
gtggcagaccggtgttcggcggcggaccagctgcgcgtcgaagccgcgctcacggcttactatctgcattccgacggggcgtttggtgcaggcccgctgcgctacatcgacgcgtccgaaccgcaactgcgcgtggctttgaaaatcgcgcatgatgcggacccgctgcgattgctggccgcagcctgcgggggtccggccgcgatgaccgacgcgctggccaacggtgtcgtgccattcaagcccaggccgggactgccgggcttcttccggttcctcgtgatgacatgtgcgattgtcgcgacggccgacaacaacgactccacgcaggagttcggcgaaaacctcgcccgagccttcggaacccagagtccattcaacaaccggtcgtcgttgcctgacctgtggctccggttgcaagactggtgcgacgaggcgcacgccgccggggaagccgtccgacaggtcatgcttccgccgccgggcacgggcaagcacctgggcctcaccaacgcaataacgttcccgagttggcgtgacgtcaggcgactgcgtcaacttctggaccgacggacggaataccgctcaatcgttgacccagtaggggctgcaattcagctggcccccctggtcgaaaacgacgccagcttttcgtcggcaatgcgtcaggcgagcgcggaataccggcagctgtatctgagaaaagcctcgttgctcggcctgcatcgcttctgggtagccttggccggtctcctgacggaacggcattcaccgacagccgagcgattctttgtaccgcgcctcgagctcagattcggcgcaacgctcgacgacgtggaactgcgcgtcgtcctggctgacatgaaagggaacgtcgacccgctccaggttctggaggatttcccggaccttgtcctagcgcaaacggcatcttgggctagccagcgagtcgggaaaaacgcaagcgaagcgcttgtttcggccatcagccgcggcggcgtcccgttcgtcgagtcccgcttcggcgtatggcattcgactctgctccagccatccgtgcccacccgctgccttctcctcctgtcaaagaaaaaccgtgacgtcgcccttaaatggggcgtcagtaccgaaccgattggagacgagtggagactggcgggcccgattccggcccgcgactgccgctccgtgtatcaatacttgggagggagcatcgaaccagccggtccgcctccccaggccatgatgcttgtcggcggacacaggaccggctcaggacttctcggccgggacgcacttctcccgcaaatcaggattgcaggtcccggcgccgtgacgctacgtccagtgcaggaaaacggtgtgaagtgtcagctccgtcgcgattccgacgacctctattcaatcatcgcgtgcacacctcttgagggaacgtacaagcttcgtctggacgagaacatgattccgtcggcggagcctctcgccatcgaaacgtcggttgtctttttccccgacgcccttgaacacgccgaactcggggataccgaggaggcgacgtggcggcggcgggaggaagcgcgtgttcgttcgacatgcgggccgattgtcctgacagacaccaccgatgaccacccgcccgtcgacagcgagcgctcagcacggttccaggactgtctggaagcggtgtacgccgggggccgcgccggctggtcggaacaggagcttgtgtcgaccatgcgcgccgtcctcggagacaacgctcccccggtctgggacatactgcgcggattgatggagtgcggctggctgaggcccacctccaacctgagatggcgagcgcgccgatggtggctgactccgccctctcttatcagagttaggaatagagaaggcatagaaggattgctgctcgttggaagtgcacccgcgaatatccggcgccgcttccagcaaaccgctcaggccgccggctgtacggtgatggaacgacccggagcaagtgagtacacggcatgtatgcaactcgcgcggggacccgccctgggcgaggtcgcggaagaactcgcatgggcggtcgccgaacggccgatatgcacacccatggctgcgccggactgctggccacccgagaacgtcgacgagtcccgacatcggcgcgtggggagatggaactgggccaagggcggttttcgaagccccgataccacgaatcccgggccggtaaaccttgaacgtttccggcgagaacgaggcgaccgggatgacatcttcgttgttaccggccccggtcccgcgcggtacgtgaccacttcccggacatcagcaatcgtcgaggcgtaccgacgcgcgcgaatcgcgatgttcagatgggacggtgcccacctcgtacgaaacagcgaggacggtcacctcgtcgagccacttgcgaatctcgccatgctttcgtcctgtcgaagtcccggtccggcattggtggacgggcgctggacgtatgtctacgacatgactgcagactgcgttggctggatacgctccgtgtttggccaggcctttgtcgacgacaggtcggcgcttgacgcaaagttgagtagcctgtcggcggaagcactcggatggtcccgaaacaggaacgtgtttcgggttcaggaattgatgccgccccctgtcgggcgccagtga

SEQ ID NO: 27704 - DNA, 1968 bp, Burkholderia ubonensis
atgtttcccaaggaagggaaaatattctcgaggcgcggcctacttaacgccccaactgatagcctgtggacattcacgcggcgtccgaacgagcaacgtgacctacatggtcccgacctcctgctcgccgaggacatcgtgcgtgcgacgccaattgtcgacctgtcgtcgatttcactggagatggcacgaagaaggctcttcaatgagggcgtccacctcccgcttgaattcagctcggtgactgcggtcgccctgctgtccgatgacctcttctgtgatgtcacgctcacgcgctcggccgatggtttctggcgcagcaacagcctctcgcggcccgtgcaactgaaggaaatgcccaacggctggaaatcgtcactggacttcaacggattgcgggtcattccagctcaaaccataccgcatgctgccgtcatcaggacggtcaactggtgtagtgaccaggactttatcgagcgcgttatcgaccgcttccgcaagttcatgcagggtgttggagataccccttacgcgcgaccgtcacgggatgccgtcaagtacatttcccgcgcgctccggcaggcggacctcatgccgggagaggacaacggcatcgtgcttgacatggaacggctccagacagactggccgatactcgaagcacgactggaggcgtccgaagaactcgcttcgttgatactcgacctcaagagtaccaaggacaaagtggcggccgcgacggaactggcgacccgccatgctctcgaagaggcacggcccagccttgagcgtcaggtgagagaggaaaccgaggcatctcttaccgaagcacgacgtcagcgtgacgaactctcggcagaggtcctgaatctggagcagcgtcgcgcccgggcttcgagcgacctcgcagaactggaaagactgtgtaacgaaaggcgtgagcaacagaaggcgatgtcggatggcttgtcggcggttgcctcagaattgcgcaccagcctcgcccaaagccccgttcaaggccatcccgcgctgtcgttcattgccgaacgactcgagggcatgctgactcagcacgattaccatgggccgtcgctgattccaccggccatgccgccgtggggaaccggaatgccgagtggcgcctgcgacgaaattggatatggttccttgaccgccgtcatcagcgaggaagcgaagcgccatggaatcgatgaaaacgcgctacgactgacggacattttcgtgcgagcgggtgagttggtcctgctatgcgggccgcaggccgagctcaccctccgggcgtatgcgcgttgcatctccgccggtgtttatcgaacgatggctctggaccccagcatcatcggtcttgacgacctctggcgggcccccgggacgcaaataccgaccgcgttcgcacatgcctggcaggcagccttgggcgcacccgattgccttcatattctctgcatgcgcgacattgatgccgcgccctaccggctatggctcgcgtcgttacagaccgtcctccagagcgcctcccgtccgaccaaccttttgttattcgcgacgaccacgggccgaagtgacacgcaggctggcgtggggtctcccgacgatagtcggtccggatacctggttccagtttttcccggcgtgcatgaggccggcgccgtcgccgcactggcgagcgccgttgcgcccgtcccgccgcctagccgcctgtcggttgccccggataccgtcccgactggttccgccgctggcgactggctgacacgggtcgtcacatttgatttgcctccgggcgtgctcgcccgcctagcaagattcagaaatcagttcatcggcgacgacgccgagcacctgatgacagccgttcaaaaatggggacagtttctctgctccagggatgcaacaagcctcccgtcgacactgagagacggttatacgtcgatgacgaattga

SEQ ID NO: 27705 - DNA, 5847 bp, Burkholderia ubonensis; identical to SEQ ID NO: 27701

SEQ ID NO: 27706 - DNA, 1176 bp, Burkholderia ubonensis; identical to SEQ ID NO: 27702

SEQ ID NO: 27707 - DNA, 2679 bp, Burkholderia ubonensis; identical to SEQ ID NO: 27703

SEQ ID NO: 27708 - DNA, 1968 bp, Burkholderia ubonensis; identical to SEQ ID NO: 27704

SEQ ID NO: 27709 - DNA, 5844 bp, Burkholderia ubonensis
gtgcttgatccgattggcggctttgctcgtatcagaaacttctttatttcctacgtagagaccaactttcgtatcgcggatccgaccactgcagagcagcgacgcaagctcttagaggctgtcaacgtgcttgcgactgagccgtacatcgagcccgttctacgatacgaggctcatgacgaaaagatcgaagatctcgcgaacaggaacgacgggcccctcgctcctctcagcaaagcggggcgcgtggcgtttgcggaattggctttgtcgggactgttcgagggtaagcctcactgcggccctattcggcgagagtcgtcctacgcgccctatcgtcaccaggtcgaaatgttgcgacggggcttgttgcccggccatcccggaatagtgacatcaggaaccggatcgggaaaaacagagagcttcatgctgccagttttggcggcgctcgcgaacgaggctgtgaattggcccgcaccgtccttgaactacttgcaatcagattggtggaaggtgccgaattcgcgttgggtgtcaaggcgcgccggtgaatccaggcccgctgctgttcgggcgctcgtgctctacccgatgaatgcgctcgtcgaagatcaaatggttcgcttgcgccggacgttggattcggaagacgccagaaaggtgatggatgaacgcttttctggtaatcggcttttttttgggcaatatacgagcgcaagcccggttacggggcacgaaacccatccccgactggcagcagagaagcaggagagggaaagacgctcgcgacgtggcactaaactccgtgcagcgatgcaagcgatcgagcgcaaccagaatgcggcccgcttgcatgatgacaagcaaaaggagctggcgaaagcgaacggaactcgagtgccggatctgacgcgatacatttttccttcggcggatggcggggagatgtcgtcacgatgggacatgcaagccgcaccgccagatatcctggtcacaaacgcgtctatgcttggtgcaatgctgtcgcgagaggtcgaagatccaatcttcgagcagaccaaaacgtggttgcagtccagcgaagacgcattcttctatcttgttttcgacgagcttcacctcattagagggtccgctggcacggaagtagcgtttctcatcaaggcgctgatcgagcgattgggactcgatgcgccggagcaccgccacaaactgagaatactcgcgtcgtcggcttcgctgccgatggacggagatcccggcattcaatcccgcacgtatctcagggatctgttcgcgcctttcggaaccagctgcggcccctccgatgccggctccacttctcctgacttttgggccgaatgcgttgttcgcggtgtggcagcgattccaaagggggcacccgccaaaatcgaccctgaaccgttcaccacactctttcgagaagctatcgatccggctagcggttttatcgcgcgactcaaagagaacgctgcgctcgacgatcgaatcaagctggctggacgcgctttgggtgtggatgccggatcgatggaagagtgcgtcaagcgtctcgccgaaagcgcagcggcaatcctgaccaatgcttgtcgcgacggcgacggggtgcgagcgttttccgtcatccatgtcgctcagcgaatctttggaaaccaaactcagaacggcgaagaagcacttcgagggctcatgcttgctcgcgctctgccggaatcagggttatggccggtccgcgtacatcccgatacgccggcgtttcggatgcattccttcattcgaaacatcgaaggactgttcgccgcgccatatctcgtcggcaaagagacgcaattcagacatctgaccgtggaacgaggcctcacgcatgccgccccttcggcggagcgcaagcgtggaagcaggctcttcgagcttttgtattgcgaggcctgcggtgatttatttgtaggcggtcaacgaggccagaagagcagtttgactccggccaccgagctcctcccggcatcggcggacttggagcatttgcccgaacgcgcggcgtcggagtactacgatcgaatgacgctcgatgagttcgcagtgttctggcctcgtcgcgaggagtgtgcgaagtccgagaaagactacgatcgatgggagcatgctcacctccatgtggacacgggcgttgtcacgcgaggtcgggatgtcccctccgggaacattggaggttacttgtacttccagaatccacccgcggcttccggcataggcaaaaccgcgggaaaggcaacggcacagcctttctgttgtccgaactgcggtaccgattattcgaaccgtcctgcgacaagtcgatcccggtcccctattcgtgcgttcagaaccggtgtcaccaaagcatctcaacttgtcgcaacggaactgttcgaactgttgcatgcagttggtgccgagccgaagggcatcgtattctcggatagtcggcaggacgctgccaatcaggcgttggaagtcgaacggctgcatttgcgggatcttcgtcgagaggttcttgtcaccgtcgcggaacgcgccgtcgagaatcttcggaaagattggatgacgcaggagcaattctcgcaacgcgtacaacaactgctaaccgaaaataagtccgacgagcttgtcgcactcacaagaaaatatcagcagcagggcggcgacgcgcgcgatagatcgaaggtcaagctaagccaactcctgcaaagcaatgacgagtcgcaatcacttggcgaacttgtgaaggagttcatcaagttgggcattcatccgttcgacgaagtcggcctgaagcgtttcgataagttgccttggtatcgtctcttcgaaaaggacggggaaagctacacgttcagccatcagctttcacatgcgtcgaaggcatcgctcaatggcgagatcctcgaagagcaatacgaactcgtcgatgacgtcatttttgcgaatacgttcttcgcactcgaagagaccgggttggcgtatcccacggtgtcgggcaccagtggcagcgatgtggacgaattagatgcgtggttgcgtgtcttcgcgagtgcttggcgagttagaaacaatcgctttgtgaatgccgacagcctgaacgagtgggtctcggggggcgatgtaaagcacaagcgcaccgtaaaatttgccgagaaggtttttgggtcttccggtttcgtcgacggactctcgagggttcttcaaaatctctcggacaaggggcataggagcggcatcttcgagatcgggaatctctatctgaaggttgcagaggaaacggacccgtactggcgatgcggaaattgcggtcgcgttcatctgcatctcggtctcaagcgatgcacgcggtgcgcgaccgccctctcaaccgagcataccggcaaagtgagcgagctgtgggcatcaaacttcctggcgcgccgcatcgtgcgtggagcgaacgacgacgtcagccgcttcaggttgcgagttgaggagctcactggccaaactgacgacttcgctgctcgcctgcgtagcttcaagggtatattcgttggcaacgaaactgagatcgagagacgcgcgaccgagatcgacatgttgtccgtcactacgaccatggaggtcggcattgatatcggtgcacttcagagcgtctatcaaggcaacatgccgccccaacgattcaactatcagcaacgggtcggacgtgcgggccgtcgaggtcaagccttctcattcgttgtcacgttctgtcgcgggcgaagccacgatgcatactatttcgctcatccatcggccattacaggcgacgcgcctccgccgccgtttctcgctgtgacccatgaccctataccgcttcgtcttatgcggaaggtctggttgagagcagcattcgccgtgttgcgagatgactgtgctgagcacggccgcgagtatccgggtgacttgctcgtgccgccggacgtgcatggcgagtacgtcacgaccgacgactattatttcgatgaaacgttgaactggcccgacaagctacggtacgcgctttcgcaaaccattgcggtacgtgacaagtatctcgaaactgcgagttttgatcctttgcagcgggagcgcttgagggccagcgccactgtcgatggactgcttgaggaaattgcatcactcaaggcgcaggctcccgccgcgtcatttgggctcgcgcgcttccttgcggagcagggtttgcttccgatgtatggtatgcccacccgagttcgcgatctatatcttggacttcgcgatcgtaaagataatgctctggaagacgcagaatggtcgacgatggaccgagatctggacttggcggtgtttgagtatgcgccgggatcgatccttgtgaaggacaaactaaagcacaccgttatcggcttcacgggcgcgctttccgatccgcagccaaggcgtggcgtcgggctggaggcgcgcatggtttcgaattggaaggagtcgacgagttacatcgcgttctgccgagaatgtggctcggcgaaacacagtgaccacatgccggcttccaccgttgcttgcgatgactgccaccgcgaaatcgatgcagacgacttccacacctatgtcacgcccgcagcgtttcggacagacttcaaacccaaaagtgaggtcgacgacgtaggtcgaatggctgtcagaacagttgccaccgtcttgcacgaaggtgaacgagtcgactgcggcggcatttccgtccggcggggagccgatgcgacgatcatgcagctgaataacggcgttgctggtgatgacgatgaaggtcagcggttcaccgttgcgcttgctcagagcaattctcctgccggaggtgtgtccatagttggagatcaagccattgaggtctcttacctcgaccggcaacgcggcttatggaacgtcgacgcgagttctcgacagcagttcggactcgtagccaagaagaagacggaggcgctgtatctggagctgcgggagtttgaccgacgcttgaccctggatagagtagctcgcatcggtgattcgtcgcacttggcaacgcgagcggctgcaattagcgcgacgcagatcttggttcagaaggccgcactcgagctcgatgtctcggctgacgagtttgacgcgctcgaacctcgactgcgctctggccttccgatgcttcagatggctgactcgttgatcaacgggtcagggttgtgccgtaggcttggcgagtcggtcagtcagggacgccctccaaagattgtcgagatacttcacagtatcctggacaacgcagcggcgtggccattgctagacatcttgagcgttgaccgggaaggcgcgcatgctgaaaggtgccgttcgtcttgctaccgctgtatccaacgatacggaaaccgccgctatcatggtcttcttgactggcgattgggtctcgcatacctacgggcgatgtcgaatcccaagtatgcgtgtggtctcgagaagggagacgatgtttttccagagattgatggatggaaagattgggctcatgagcttgcgcagtcggtagcagacatgcgcaagggtacgctccgttaccagtcccttccccacagcggcttgccgtgcctgactgtcactaacctcgaaggagttacagtctcgcggatcgctgttgtccatccgctctggcgactggacgaggactacgcgaaagcgatcttggggaaagactggtccgaggagctggactacgtcgacacgtttgtgctggagcgccgacctttgagggagatcgcgaaacgcacaagcgatcaggcatag

SEQ ID NO: 27710 - DNA, 1158 bp, Burkholderia ubonensis; identical to SEQ ID NO: 27696

SEQ ID NO: 27711 - DNA, 1626 bp, Burkholderia ubonensis
atgcccgaggccgagagccgcatccagctatacgatctttctccggaagctgcgcctaccgctgtctacgactggacgcccgacgaggattacataacgagggttctgaagtcactgcccggcgcgtatgacgcccgagttgatgcgctagtgaaatcgcttttggggcatgcggaaacccacgaaaaccgcatcgccgttaatccctcggatgtgctgtcagcgtacgaggcgctacgcagcggcgaactcgccaaagcactgctggcgaaccgcgaccgcattagagaactcgcggaagccctgcaatcatctcccgtgatctcgcgccttatcgagaaagagattacggacatcgcagagcacgagcgagcggcgattcaagcgcgccttcagcgcgagctgcaccaagacatgggggccttgcgtgacaaacggctggcagaaataaatcaagagctgcagacttccgagaatgaatggaaatcaaagcttgatcttcgtatccgcgaagatgaactggcgcagcagcgggcgtttgccaaacgacgaacggacgaggagcagaaactaaaacaagagctcggcgatctgcgtgcgaagcgcgaggtcgaaattgtacgcgaggtcgaagatcgcaaagaccaggcgcagggggttgtcaacgaactgtcgcaacaacgcgattcattgtctaaatctattgccgttctcgagaacgaaaagacgagcctcgaggggacgatatccactctgactgaaaaagtttcagttgccgagcgccaactcgaggacatagaaagtcgtaagggcaaagtttccgcagtcacttcggcaacgctgtcgcgtttcatacttcctgtcgccgcgcccaacagagcagaaccgctcctgtgcaaagacgtacatgatgtgattcaaaaatgcgctttgttgacacctagcggcaagaagctgatggagcacttcgtaacgctgatgctcgctgccgatgtgcccatactgaagggaccgcaggtggatgatttcctgcgtgtcgccgaggtgatgttctcttcgggagcgcgcacatcgttggtcgctgatcccaccatcatttgcgtcgaagatctttgggtgcgcgcgggccttcgcattcccacctcattggggctagccatggatgctcatgcagatgactccgcgccaaccactctggccatcgttgacggtgcggagaattccgccgcccgctattggtacccagcgcttgccgaacaggcccggcgtggaaacctgccacgaaaaatgctcttttgcgtgaccatcggcgatggcgacaacgacgaagcgcatgctatgcagaattccggcgtcaccttggacgtgaataatgcaatcgacggtggcgcgcctgcgcttgcggctgtcttgctcagcccgaagctttgtcgggaccttcggccagacccttggataagtgacttgtcagtcggggcgtccttgatgattacgtcgatcgatggcctcacgatcgattccgcaatgcgcgcgacacgagcctgtctcgaggctagtcgtctaagtcagcacgccagcgcttctgtcagttctgtcgcttcgttgtttaaaacatcaaagaactaa

SEQ ID NO: 27712 - DNA, 5502 bp, Cellulomonas sp. Root137
atgacagcggcaccaactggacctgaagtcgaaggcagccggcggctcgacccgcttgccacattcgagcgactgcgcgaggcgtacttccggtactacaacaccccgttcgggcttgccgacgagcgtctcgagcgagagcgacaggcggcgctcgatcgagacggcggtgtcttccgctttccactgctagagctccggcccgagtacgtcagcgcgcaacgttcactcgcagagtcggtcaaagcggcgggggcgacaccggagctggccgcgtttgcggcggcgggactgattccgccgggtcgagacctctacctccaccaggagcaggcgctgacggccgcgaactcgatgccgggacacatggccatcaccgcaggtaccggctcgggcaagaccgagtccttcttgctgcccctcctctcgacgctgctcgaggaatcgaagggctggggcggcaagccggctgatgcgccgaactggtggacgaaggacggcgcgaagtttgtgcctcagcgcgagggggagaccggtcacgaccaggctgttcgcgccctgatcctgtacccgatgaacgcgctcgtggatgaccaactcgttcgccttcggcgcgcactcgacagcgacgcagttcgcacctggctcgattcaaaccgctcagggcaccgcttctactttggtcggtacacgggcgcgactccggtaaccgggagcccgacgaacaacctcgccgtcagcgagcttcgtcggtacctgcgagagacggaccgtcgcggcaagcgagctcgccaactcagtgcagctcaaggcggcgaccccgacacccaatacttcgtgcctcgcctggacggcgccgagatgcgctcccgatgggacatgctcgccgcgccgcccgacatcctcatcaccaactactcgatgctcaacgtgatgctgctgcgccagcgagacgacagcttcttcgtgcccacgcgtgagtggctcaagaaccccaagaaccgattcacgctcgtggtcgacgagctgcacatgtaccgaggcacggcagggaccgaagtcgcttacctgctgcggtcacttcgccaccggctgggcctcgatgaccggcctgaccagttccgagtcctcgcggcctcagcgtcgctcgatcccgcgcgcgaccgtccctacctgtcgcagttcttcgatgtcgacgcttcggatttcgtgttcgtcgatggcacgcacacacagccctcgaagccggtgctcggttctggtaccgatgcggagcagattcttgccgcgccaacgccgcaagcggccgtcgaatatgcgcgcgcgcacggcctcactgacggcctgcgcgagtcattcgtcgaccaggcgaacacggcgcggagaacgacgatcgcgaagtctggcaagcaactctcggaggcgttgttcccaggcgtgaacgagggcaccgcggagagggcactgtcggccttactgtccggactgacgtcgagctccgccgatggcgacccgaagctgcgcgcccacatgttcttccgcaacgttcccggagtgtgggcctgctgcgacccgacgtgcgcggcggtgcccgtcgaggatcgagtgaatcgcacggtcggcaagctctacgtcgagcccgccactcgttgcgaatgcggtgcgcgcgtcctggagctgttgtactgccagaactgcggcgacgtcatgctcggcgggttcgtccccgaagggcagacgcagggcaaggcagtagacacgatgctgctcgccgacgtcccggaactcgcgaagcttcccgaccaggtcaaccttgagcggaccgcggccaactacctcgtgtactggccgagcaaggacatgactctcagcaagctcgacaagcccgaatgggagtacgaagggggcactgtcaagttcagcttccgccgcagtcgcctcaacccggcctcagggcacctcaagaacaaggaagccgaccacaccggctggagcttccacgtcaacgtcgacaagaaggcgaagcgcgagtcgacagagctcggcccgtttccgacgcagtgccccgcgtgcggcgacgactgggagatcaagtacggcccgaagctgctgccgatcaccgatccccgtcgccaacgttcgcccatccgcacgatgcggacgggcttcgagaagatcaaccaagtcctcatcaccgaactcgcaggcgacatgcgccccgaggaccgcaaggtcatcgtcttcaccgacagtcggcaagacgctgcgaagctctcatcaggaatggcgctccgccactaccaggacttgctacgcctgcttgtcgtcgagcagctcgcagctgccgaagaccctcacgccgacctcgcgctcgccgtcgagcacgtcaagaaccacgtgacgtcgtcagagtcgttcgccgccatcaagaggctcaggccgcgagacacggtcgcattcgatcagctccgggccatctgggagggtgaccccgatgccgaccccaacgatgaagcggccctttccaagcgcctcacgcgcttccgaaccattgcccagttgtcgagcgccgtcactaccgagctgctgaagctgggcgtcaacccgggcggcccacacgctcgactccagtcgacagacggcaaggactcgcgaccgtggacgacgctgtacgactggggcgtcaagcccccgacccttcgcagtaaccccaccacagagcagtcggccctcgccgggcgcatcaacgaatctttggtcaaggagatgctcgatgggctcttctccggcgccggcagggacttcgagtcgctcggcttcgggtggctcgcgctggccgacgacgacgagcctgccgaggcagagccgggctccgcgaacgcccacaccagagcggcactccgcgttctcgctgaccagcggcgcttctccggcttgcgggagggccgctctgacccgaccgcgcgtctcaaggccctttggcacgcggtcgagcattcaactgggccggcgtttgacgacattcgcgaggcggtactgggccgcgcgggcgcggccctgaaggagtacgtcctcgacccggaccacgtgtcgctccgtccgggagcaggctcagcctgggtgtgcccgaagtgcttccgccagcacctcacgcggggatgcgggctgtgcacgaagtgccacacgccgctcccttcgatcggcgtcgcgattgacaagcgcgaggactactacgcgtggaaggcatccaagcgagacggacgattccggctcaacgcggctgagctcaccggccagacagaccgcgtcgatgcgcagagccgacagagccggttccagggcgtcttccttgacgagaccgaagtcgaacttgccgacggcgtcgacctgctgtcggtgacgacaacgatggaggcaggcgtcgacatcggcgccctctcggccgtcgtattgggcaacatgccgccaacgcgcttcaactaccaacaacgggtcggccgcgcagggcgacgaaactcgcccgtagccgtcgctctgacggtgtgtcgagggcgaagccacgacgagtactacttcgaccggcccgaagcaatcaccaatgacccgacacccaagccctacttggcactcgaccaggaaccgatctacatgcggtccctccgcgccgaggtcctccgggtggcgatgcgaagtgtcggcggcaccctgacggccgatccgtcgctcgatttcgagctgacctccaacgtgcacggagcgtttggccgcaccagggattggccagtcctgaagccggcccttcaggagtggctcaacaagaaccgggtgacggtcgagctgagcgctacagcgctcgctcggactacacccttcgcgagcgacgtagcagcgctcgccgggagactggcgggtcagctgatttcggagatcgatgctgccgtcgccgggaagggtcacgaagacctgagccagcgcttggcggagcatggcatcctcccaatgtttggtttccccagcagcgttcgatacctgcacctgagtcggccgcggcgctcctacccgtggccgccgaagggcgtcatcgaccgcgatctggccatggcagtaagcgcattctcgccaatgagcgaggtcgttcgagacgggaaggttcacaccgtcgtcggcatcactgccttcaagcccgtcggcaccggtgcagaaccgttggctgaaccgctcggcaccgagcgagatatcgcggtttgccgctcatgctccttcctccaggagaacgaggaagcgacagaggacgtcgattcggaagtctgcccacggtgcggcgctggtcccgaggcctacgccatcatcccgatgcgtgaaccaatgggtttccgcgcgggcaaggctcgcgacttcgacggcaacttctcctggtcagcgagggcgatggccgcgcgcgctcacaccgacttgagcctcttgccgtcctttgagtccgggaaggctcacatctacgccgggccaggtcgccggttcgtcctgaacgacaacggcggccggctcttcgacctcatcccagcatctgcacccagtgacggctggcctgcttggggcggctacatctctggcgaggcggttcggcgggagttgctgcatccgaaggatggagatggggagccgttcagcgtcgcgttcggtgccatccagccgaccgacttcctcttctacggccctgcgcaacctacagactcagagtcgggtctccggctcaacctctccctcggtgctcggcaaccttctggcgcacgagacaccaccgaggggagacgcgccgcgtggtacagcctcgctttcttgcttcggacggttgcgtcgtcgtatctcgatgtccagccgctcgaactgaacgctggcatctactccggcttggtcggcgacgagccggcgctgttcgcgttcatcgccgacactctggagaacggggcaggcttcagcacccgtctcggctcccccgaggtccatccagagttccgcgaccggctggacgcctaccttctcgagcttgcacgggcggaccatgccgccgaatgcaccgcgtcctgctaccgctgcctacgggactacgggaacatggcctaccacgcccttctcgactggcgtctggctcgcgacttgcacaaggtcctgcagggaggggcgctcgacatcgacgccgccgccgagggcaacgcgatctcccgatgggcaaagtcgttcggtgccactgttgtcgacggcttccccgcagcaacggcccggtttcacggcctcgacggcaactttgccgtcgtagcgaagcatccgcttgaggcctccgaacaagtcctcatctctccgcgactcgccgactgccaagcacaggtggaggttgccatggaagggctcgacggcgtcgtcttcgtcgataccttcacgcttgatcgcgacccacgacgcgtcctcgacatgtgcagagaggcgagcgatggcggtgtcggctga

SEQ ID NO: 27713 - DNA, 1311 bp, Cellulomonas sp. Root137
atgcgtccccgcgagtgcagggagatccggaccgtggcgtttgaggtagtggagatctgtgccggggcgggcggccaggctctcggtctagagcgggcaggcttcgcccacgcgttggcggtcgaactcgacaagtacccggtccagactttgcgcgagaaccgcagccagtggaaggtcgcgcacggggacgtagcggatccggatgtatggaggccgcgcgactacgcaggcgtcgatctctttgccggaggcgtgccgtgccctccattctcgatcgcgggcaagcagctcggcgccaacgatgagcgggacctatttgcttgggccgtcgagcaggtggtcgagatgaagccccgcgcggttcttctcgagaacgttcgtggcctctcgatgccgcggttcgctgcctaccggcaggccgttctcgatcgcctagccgattctggctatgtcggagattggaagttgctccaggcgtcagattacggagtgccccaattgcgcccgcgcttcgtgctcgtcgcgctgcgcgaaaccgacgctccattctttcaatggccggcaccagtggcggcagaggaccgacgaactgtcggccagacacttcttaagctgatgtacgccggcaagtggagaagagctgcagcgtgggcgaaggctgtggataaggtctcgccgattgctcccactatcgttggcgggagcaagaagcacggtggcgccgacttgggtccaacccgtgccaagcaagcctggcgagcgatgcacgtcgacgcgatgggtctcgctaacgccgccccagatcgtgattggggggacttccgagtgcgcccaccgaaactcacggtggaaatggtctctcggctccagggctgggatcctgagtgggaatggaactttgcgggaggaaagactgcccagtaccgacaggtcggcaacgcatttcccccgcctttagctcaagcagtgggggagagtattcgaaaggcgctcgaccacgagagtgaggagtcgggggccaggacgctggttcagcgctcggttcacgacgacgtttatcgcacgctccgtgaagctgatggcttcgttacgctcgaccagcttgccgaacgcctcgccagtaagtacagcgtggccgagttgcacgagagggtgacgggcctcgagcgcgacttcgaaatcatccggcgccgaaagcgctcgggcgaagccgtgatgctaggtcacttcaaggcattcatcggacaggaagaccatcaccgccatgccgcctttgccgaggcggcggctaggtcacggatcagctaa

SEQ ID NO: 27714 - DNA, 2079 bp, Cellulomonas sp. Root137
atggacatcagcgatcacgaagatccgaactacgtcgactggcagcggcgcctggagaccgcgttctttagcgatcccgacgggctcgtcgtcatgtttgtcgacgatgacgtgcttgcgcggattgcccccgacttccccgatgcgtcgctggatctcgcggcggcggtcatggcgaactccggacagagacgctcagcggacttgtttccgcacctgtctgcgctgcatgacacgtgggccagcaccgggcgggtgggactgccgcccacgctccctctactcgcactctcggtcctcgcggcgagccggatgcgcagagaccagaacgttgcggcgaacaactactacctgcggctcgcagagctgatccacgaggtccagccggagcatggcattgaagagacccgcgtcgcgctgagctcgtcgttccgctccgtcgcgcgaatgtggatttctctcgatcgactcctcgacgagaccaagagctttggcgcgtcgaccatccgtgaccatccgaagtacacactcatcggctatcccttgtctcaggcgttgatccgcggagccgatcgagcgcatctcactcgcttcttcagtcggctcgacctcgagcacgatggggtaccagccgaagcggctctcttgaaatacctgaagatctgggcggaaaggccccgagggctcagtccggccttcacgaacgcgatcggcaatgccgaactctctgccctgatcggcccactcatccaccggttggcagagacttgggacgggcgcgtcgcgacggtcgaggggaaatgggagctgccgctgcgcattgcgctcgacctcgaggagtttcgtactcattggatagtcgacctgacgccgggtctcgacggcgaagtcctaaccggagcgacgagcgcgggttctgtctcggtcacgatcgatacgtcacacggactgtcgtactactcgttcgacgacgacctccctctcgctggccgtgactgcacccgcggactcgagctcagcggaacgcgggcgctagctaggtttcgcggcaccgaggttctgctcttctcgaagagcccggcaacaggtacatggctgtcttgcgacgccatcgtgccgttcgaggagcacgttctggccgccaccgggcagtcggtggaggcggttcgagcactactcgcagacgccggtgacacgggatggaggccgctcgcacaacagcgtggcggtgcggcgctattggacgggtacacggtatttatccgggcgacgttctcggacgaggacactcttgagcgtgcgctgcgtggctcgattggactgaaggcaccgacccttcggccggagccaacgactcgcccacgcttctcgaacggcctccccattgctcgcaacctgagccgcaaccactacctcgtcggcggcgcgccggacctgctgatcccggcgagcgaaacggcccagacggtgaccgccaacctggatggcgccgagagccgccttcgtgcccgcggctttcccgttccgctgcgcggtctgtcagatctcggacctgggcagcacagggtggaggtcgacggcgatgcgctccgcttcacgctgctcgatggcgaccctgacgccgcggcaccgagcgggaccggctcactggcgtggtcgctctccgcccaacttggcgcagccgaagaagcaagcctcgcctgtggtggaatcatcgctcgagtcgacattctcgagccattgcttgctcgcaggggccaggacacaacgctcgtcgtgcacacggacggcacaatccaacgagtggacgaacccgcagcgccggccttcctcggcgccgaatcccacatcgcaaccagtcagtacttcgaggtgtctgcgggaaacgccgtcgcatggcttctgcagtgccggaaggggcgctggacgatccgaaccgtctcgaacgagcgcccgtcattcgagcgccgcaatctgagcggggaggtcaccaaactctgggactcgctcgaggcgatcgacgccggtgacgacccgcgatggcagcagtacctgcgcgcggcgggagttgccacatga

SEQ ID NO: 27715 - DNA, 5664 bp, Chlorobium phaeovibrioides DSM 265
atgaaggatcttgttggctcatatgagcgtctcaagctcatttatcgcatgtatatcgaaagtgcttttccttttaagaatgaaggaatgcgcgatgagcggaggaaattgctagatgaaagtgctttgcttgctcaggagccattggttgagccgagtccccagtatctctcatccgggaaaacattaagccaagttgtcgcggagttggacaaggaatacgatgggttgaaggatcttggcgggcccattatggggggcttcgagctttatgaacatcagcgggaaagtcttctggccactcttagggaccaccaagatattattgtgacgaccggcaccggttctggcaagacggagtgttttttgctcccgttgctcggtgagctggtaaaggagtccagagcatggcctgaaagtcccaattggccggatcgccgtgattggtggaatgatcggccattggcatggcgcccacagtgggctcattctggtaggattgcgactggatcacatgctatgcgtgcgatgattctatatccgttgaatgctttggtcgaagaccagttgcgtcgcttgcgtttggctctcgattccgaagactcacatacttggatggatagggcttgtggaggaaatagggtgctttttggccggtacactgggagcgcacccgtttctgggccgatgccagacggaaatggtcgggctcccggggtcaagaaacttgccgatttaatgaaaagggcacaacatgaagatgcccgcgtgagggaggctgtacatatcgatcctcaggtgcgctaccactttccgaaccttgatggtggtgagatgtggtcgcggtgggatatgcaggcaacccctcccgatatcatgatcacgaactactcgatgctcaacatcatgcttatgcgtgagaccgaggatatgatattccagcagacccggtcatggttggcgtcggatacttcgcatgtcttttccctgattgttgatgaacttcattcataccgcggcacatcaggctccgaagtggcttatatccttcgtttgttccttgagcgaatcgggttggatcccgattcgccacaattaaggatcatggcaacatcggctagtatggatgaaggggcgggtggcaacttcctgcaggagttcttcgggaggggtagggatcggttccgggttatatcagggggccctcctgaatcgcctaaggctgttccgcaaaacctatcaccgcacgcaagccttttcgcaggattttctgcgcagacgcatgaagctgttctggatgggcttgctcctgttgaccaaaaagttctggatgaggcgtctcgagcctttttacagcaagtcggtattgatggacaaaatcagggccttgccccctcaatgggtataggcatggggaaaataggggttgtcgatgcccttcggaacgcatgctcgggtgatgatgggcttcctagggcgacccgcttggggcttatcgacaaacggctcttccctgatgcacaagttcctgttggcagggcggcatccgatgaactgcggggcttgttgctcgccttatcctgtgccactaccccgcatggcatatcggcacttcccttgaggagccatttgttcttccacaacctgcaaaatctctgggtctgctctaatcctgcttgtaaccataatggtgttgaggcgaacgggcgcaatgtcggtgcattgcatggctatcatcgggttaattgctcatgtgggggcaaggtccttgacttgctagtttgttctgtgtgcggcgaggtgtttctgggcggatacaaatatgggatggaaggtggtcatggaagaaggtatttgacttccgacatgccggcaatagagaaaatgccagatgcggctactgcacggttagtccatggggagtacgcaatattttacccgaaaaaaggcaatccaataggggcaagggggcgcaatgacgggactaggtatgaatggagacggggcggtcaaactgttcgttgtggatggcgaaacgcgtggctagaggtctataccggatcattagccgattatgcgacccaagaaggtcaagaagttgaggggtggctgtacaccgttgacaatccggaatcgcaagctttaccgccggtttgcccgagttgcggtacagaccaacgaaaggcatcaagctttccgacaccattgcggtcacatagaactggtttccaaagggcgagccaagtgttggcctcgacgcttgtccgcgaaatcggccctgttggcgatgctgcaaaaggtaagttggtgcttttctcagacagtcggcaggatgccgcaaaactatctgccggcatggaactcgaccattatcgtgatatggtccgtgttgcgatgattgatgcgcatagtgattttattacacagttcgcagcgacattgaggtattggatcaatatccataatcggcgatctggggagttcaggagtttggtcaatggcttgaatgatggattcccattagaagaggacacgaccagtatagcaacagatgacgaagaactcgcatatatgttccgagatatgcacagcagctactatgacgcccttatggatatggctgccggagcatctgggcgagttgatcctgaaacgcaatctgacataaggtggataatagggcagtatccgcatgaagtcccgttccgttcgctgtgcgacgccatttttgtccgcttggccagtgttggcatatgtccgggggggccccgttatgaatattcacggtatccgagggagaggatggaccacgaatggtgggaatgctttagctgggatgtcccggggagaatccgtgaaaacgcaacccctgaacagcgtgagcatatactgaagttgaaagattctttgttgcgtgaacttaccctgaccctcttctcgaactcggtcagaaccttcgaaagccttggacttggctatgcgactttcaggccggttggtgaaccggacgataaattagtgcaatgcacaaatgcgatcattcggaatacttgcctgaaaagaaactttcatctttggccctatttccagagggatggcggcgaactggaattatggccgcgacatattccatattgcgacttgagtggtgtcgagccgaatgaagtcctccggcaacttcgggagagctgtgtcggcttgcgtggcgagcatgccaaccttggtattgatcctgaacatctttggcttcatttatcagaccaagatctttctccaagaagtggcttcaaatgccttaaatgcggcgcctattatatgaattatgctggtggatattgcatcgattgcataaatgagccgcttgttcaggctccgttggatgcgcatatggattattaccgatatctcacaggtgcttccggtggtgcattccggctccattgcgaagagctcacagggcagacggacatgtcagataagagtagtcggcagcggtggttccaaggtatttttttggacggagaagccaaggaaccacagggaatcgatattctcagcgttacaacgacgatggaggctggtgtcgatatcggctctctcgtggcggttgaaatggcaaatatgcctccacggcgcttcaattaccagcaaagagtggggcgcgccggtcgaagaggtgcgccgttgtccatcgcattgacattttgccgcggcaggagccatgacgatttctattaccagcgaccggaagagattaccggcgatccttctccagcgccctatctcgacatgactaggaaagaaattgtcaagagggtcgtggctaaggaggttcttcgcagggctttcagtgcatcattccccgaagggattcctgatgtggcaggggaaaatggtcgcgaacgcatccgggaaagtgtccatggcgcatttgggacagttggcggatggcgtgacgcaaggaaacatattgccgaatacttagctgcaatgcaagtcaaggatatcaatggcatcgcaggttgtctctcaaaagggacggaatttcatgatgattcgtttttttacgaatggctgaatgggtatgtcaaagaaacgcttatagcagaaatcgacagggtggttggaggtgcgataggacaacttcctctatccgaactgctggcctctaaaggtttactccctatgttcggtttcccgacaaatacgcgcctaatgtttactgaaaggcctatgcgaggcaatccatggcctccggaacacggcaccgtagatcggcagcttgatattgccatcagccaatttgcgcctggttcggaaacggtgaaggataagcgggttcacaaggcgtttggcgttgtggattttgtcccagccggcaatgtggttagtatccgatccggtttcaggccttcaattgtcgagggtaacgagaaattcgcaaggtgctctaattgtatggcggttttgccaagaaccgagccggaaggagcaattcccgctggggaaatgttggaagaagaggaatgcccaatatgcggagccaactcattgcgattagtggatgctcgggtgccgactggtttcataagcgactttgatccaaaggcattcgagggctcattcgaattcacgccatatgcaagcaggccgtccatttacatcgatcaaatcgaattaaacgaagtgccgggaacaaacataaagacggcaggggattcgatcgatctggcttctgttaacgataacggaggaaaaggtgggtttgacttcatcgaatacaatattcctcgaatgaatggccaaggagcattcagggtcaaaaacattagtcaggacgaggtcgagggcggttatcggatagccctcttgtcgaagaagactactgacgtcttccttatggatatccagcattggcctgttggtgtcttcgccgatcccagagaaattgaaggaagggcggcatggttctcgttttcatttatgctccgggttgccgcggcgaaacagcttgacatagaccaacaagagctgtcagccggattcaggactgtcatgggcgagaatggatggccaacagcccaagggttcctcagcgatgctttggaaaacggggcgggatactgccgctggattggagaagaggcgaacataaaacaagtccttcgcttatgtgatcccaccgcagaatcatcaataggtacccattggctggcgtctggccacgctgaagtgtgcgatacttcctgtaataggtgcctacgtgaatattacaaccttccctatcatgggctgctagattggcgtctggctctcgatatggttcgtatggctgtggacccggcagccacaatagatctccatagcccatgggcagtaaacgcaaacccttggaagaatgtgttttatggagatgattgcttggcagggaagatcctttctgaattcgggttcatccgtgacgaagcctcaagcagtttgcctttgttcgtttctcagggaagaggcaagatcttattgccttcacacccattatgggatatcaactcaaaccaatcctaccttgcggctagggcagaggctattgaaaaatatggtataaacaatgtctccccagtcaaccccttccgccttctcaggaggccggttgacttattgcattag

SEQ ID NO: 27716 - DNA, 1404 bp, Chlorobium phaeovibrioides DSM 265
atgccgatccccaataaagaagcaatatctcacccccagcattccgccccaaccaagcgattttattcagcaatggatctcttcgccggctgtggagggctttcactcgggcttgaaaatgctggtttcacgccgattttcgtcaacgaactcaatgaagatgccttggccacctacttgatgaaccggcaccataccctaggcggattgaaattttcagacaacgccaacctgcgatgcaatgacgcccatgagctggacaataaccggctagcgaggctgaaatccgatcttgaaaacataccagaggccaacataagcttcaacaacccgaaaacccctaaaaatggcggcggcgggacactagatatcattgccggagggccaccctgccaaggattttcaggaatcggacataggcgttcatattcagtcgacaaggaacagctcccatccaacctgctatacgcaaggatggccgaaataatcaggaatctccgcccaaggattttcttgttcgaaaatgtcagggggctgctgaactcaaaatggaccaaatgcggaaatgtcagggtctggcccgatgtactaaatgcattccgccgtattcccggctatgaagtcaggtggaaacttgtctacgccaaagattatgggattccccagaaccgccctagggtgttgctggtcgggctgaggaaggacatcatcaagaacaacccaaaactagaccctaaagccgaccgagatgatgcggtcaggtgcggattccttccccaagggaaaaacaccccgccccccgatttggtcgacctactgggagaccttgtggatccatctattatggaatatctccgatcagggaactatcctgccggagtatttgccagcaatgagtatagcaaagcaccagagaccgaagtccagaaagccctgcgtcgtccggctccattcatgcttcctgatgccatcgttggattaacggaacaacaatacagcaaacataacccgctggtcgttgaaaaattcaggcatatgatcgagacgaagggcgagatccctatacagttcaagaccaaaaaattcgcgcagcgagccctgcctgaaagatgggggccgcttggcccgacaatcacggctacgtcaatgcctgacgattatgtccattactcacagcctagggtattgacagtacgggaatgggcccgcctccaactcttccctgactggtacgccttttcaggaaaacgaacaacaggcggcatccgtcgagcaggaaaccctgttgccggcatttatgagcgggaagtcccgaaatacacccaaatcggcaatgctgtgcctgtcggcttggccgaatacattggcctgcacttcaagtcgatccttgatgcagccatctaa

SEQ ID NO: 27717 - DNA, 1746 bp, Chlorobium phaeovibrioides DSM 265
atggcggactatgcacaatggaatgatgcgataatagggttccatacccgcaacgtgccaaaaggtgacccagtctacttgactgtcaatgaatcagccatcggcatggtcggcaaggctatgcttggcatcagtggcaatgatgctgcttatgctgatttcatcgcggcagtcaggcagaggtgcactacatggccccaagaacgtcgctcggtcctcattgatgggctagaggggattgacgaggataccggcttgcccaagggggttgcattcctttccgcaatggtccttgccgcccataagatggccagtaaagagggggctgataataacaattactttgttcgcttaaggcaggtgttgggtttgaacgacacggcgccgggaaggccggaaggcttggatcctggtgtcgaagagccttgttggaagagctgggggatgtggcttgattcaaatggatggctcaataccgccgagacggtcggggacgggccgatgaggtatatcagctaccctatagggcaagcattgctccgtgatgacgatgtggtttacctgagaaggctgttcaaggaaaagattggccatccgtctctagacgaggcccagcttgccgggtggctgctccgccaagggtttagtcgaagccatttgcgctcgggatttgaaagtcccgatccgggacgggcgtcggcattcttcgatgaggcctacaaagtatatcagggagtcgactggtcgcaggacggcgctagtgtcgttgcagggcaaagcaggccgaataaaatcgttgcaggcatcctttgccagcactctatgaacggtggtgaggtatttcggttgttgccgaggattcctatgcactggcaaggagatgaacttgtcgccaaagggccgaacggggatgatgcggcattggtgccataccggccgggcttgttccggcctttatggcaggttaatccgttccaagaagatgcattgtcgttcagggtggaaggctcggatagcatagaagagattgtaatgccctcaagggattattggatcttgacacccgatccccctgatgatccccatggcgcattggcgacatgggataagtaccctgcattgatgggggtcaagttcaggctcatggtgaagggtgctcaggatggccgcttggcccaagaggtagtgcgcttcaaggattaccggttgggagggcaggatgcaggactcattggatgggacagcgggccgatcgatgtcagcggctggactgaattccatggctgcatggtcctttcggcagcttgggattccattatcccccacgaggatgcggcagagctttttgaggcacttaagccaagtctcagggctacgattgccctgtccggcggcctgagggactcaagcaaaggcgcttggattgagggctgtcctccttccgcgaaaatttacgggtttgatgatgaattcggcttcaggatcgtcaaggatggggcgatcttacacgaaagcagatatacggcgcaggctccgtttcagttggatgagtgcaagaagccggggctttaccgtctagaagccctttgggacaaaagggtcgtggcgggcaaggcccttcgggttatcccttgggatttgctagaggtcgatccaattgatggagcaaaatgggttgatattgggtcagaaagctttatatctggcccacgaagaatagcaagcaagggggtgcgtgatgcttga

SEQ ID NO: 27718 - DNA, 6030 bp, Chryseobacterium kwangjuense
atgaaagacccaataggttcgtttgaaaccataaaagaaaattttatacgctatgtaaaaacagcgttcgggacaaagtttgaaggcgttgaaaaagagcgttatgatttattgaattacgacaaagttctttatcgtaaaccttgggttgagccattgcccgactatgtttcaagtggcaaaaaaataaatgacttaacagccgaagatttaggaaatgctttgaacgaagcagaaactaatacattcaaaggacttgtaaataccggacttgttgggaattttcctctgcattcgcaccaagcagaaatgttgaaacaagcgttgcttggaaataattgcataatcacttccggcacaggttcgggaaaaacggaatcgtttttacttcccttgtttgcccaactttcaaaagaacttgcaaattggacagcacccaaccaacaatctacaagcataaatacttggtggcgtgaaaatggtggattttctgcaaggcaaattgtcaatacttcaaatttcacgttaagcaacgatgtcagacaacgcaatcacgaagcacgaaaagccggagtaagagcattgattctttatccaatgaacgctttggtggaagaccaaatgagccgtttgcgtaaagcgttagattctgacgacacaagaaattggttgagtgaaaacacaaacggaaataaaatttattttggacgatacaacggaagttcgcctgttgccggtgagttgaagaaaataaaagatgacggaagttttgcaatcaacaccaacaaagtaaatcaactcaaagagcaattacaacaaattgaaacagattcaaaccgtgttgcacaatatattcaacaaacaggtaaaacagaaagcgaagcgaaagatttaaaatcattttttcaacgcttggacggtgctgaaatgagaagccgttttgatatgcaagttgcaccacccgacattatgattacaaactattcaatgttgagcataatgttaatgcgtgatattgacaaaggaatttttgatgaaacgaaacaatggttggaagaaaatccaaacaatatttttcatttaatcattgacgagttgcacttatacagaggaacgcaaggaacagaagttgcgtatttactcaaacttgttcttaaccgtttaggactacacccacaacacccacaattacgcattcttgcttcaagtgcttcgttagaagccggagacgaagaaagtaaaaactttgtgtgtgatttttttggcgtgaaccacgaacattttaatcaaaagttcaaaatcattgaagggaaaaataatccaattactgcatttcctgaaaacggaagaaaacttccaatcaatcctttcaaagaaattgcagaaaaattttcggaagtaaaagaaaatattgctgatgaaagttttatttcaacttgcgaagcaagtgcaacacaacttgcaacagcgttcaatttatcacaatacgaaaatggaatttcaaaactactttcagtaataatcaatccaagttttcaattaaaagaacgtttgttttcgccttgccaagattacaaagcagtttgttcatcacaagcaatcggtgatgatgataacggaaaatattttgctgaagcaatttttgaaacaacaagcaacaaagaagatttagaaaacgctttacgtggtttgttgattgcaagggcaatgttagacgaaaaagaatttgaagacattgcaaaaacaattcctgacgatagaaaattaccacgttttagatttcattatttctttagaaacattgaaggaatttgggcttctgtcaaacccgatgaagttgatgaaaaatattcagacgtaaaaagaaccgttggaaaattgtattcaactacacgaataaactctgaaaaaggaaatcgtgttttagaattgctttattgtgataattgcggaacaacattgtttggtggtagccgattagttacaagaaatgaatcgggaaataattcatttgaaatgcttccaattagtccaaacattgaaggtattcctgaaaaaacgcctgcaaaattggttgaaagaagaagttaccaagaatacgctgtattttgggcttgtggcaatcaacaatacacgtcacacgatgcggaagcaggaattccgcaagttggttggcgacagccaacaatgaacggttttaatcaaactgattttcttgcagattggattcctgcttcgctgaattgtatttcaggtgacattgataattcgcacaacaaagcggacgataaacctgaacaatggattaagggatattatttcatcattacaaacaattcaaatcgtgatattgctttgcccgatgcaaatggaaacatttctacgattgaaacacacaaagcattaccaagtgtttgtccgggttgcggtgtaaatcatcaaaaaagacggcaggattggaacaaaaacaaaacttcttctattcgtggttttagaaccggtttcgccaaaacgacacaaatgtttgcaaaggaattaatgtatcaacttccaagtaacgaagcggaacgaaaattagttgtgttttctgatagccgggaagatgcagcacaaattgcaaacggaattgaacgcaatcacttttctgatttaatgcgtgaaattttagtcaaagaattacattctaatttgatgttccgttttcaaattgtagatgcttttgacaaaggaaatacaacaagacaacaagtattaaaagagcaatctcaagcaatttttgatgaaattgaattcttagttgaaaattccgcttacataggaacaaacgcaaaccgcatacgtgaaaaacaagaagcagaaataaagttaaacgaaatccgttcgctgactttaaatgtgagaagtttagttcacatcacaaattcattaaatcttgcaccactcattaaacactttgttgagttgggaataaatccaggcggtaatgatatttccctacaaacaagattgttgaacaataattttgttccttggtatgaccttattgatttcacaaatttccaatgggcagacggtgcaaaccaagattatattgacgcattgaaagaaggttcatttgacggacttgctacaatgtttttcggttcgttgttttattcgtttgaatcttccgcattgggctatgtgagtattaaccctgaattgcaagtcatcgcagaccaagcaagaactgttggcatttcaaaaaatgatttcttccaaattgtaaattccacaatccggattttaggcgataagtacaaacataacaaagttgaagatgcaagtccgttcaacttcacgcaatacaatgatttccccggacaagtaaaaaaatacattcgtgcagtagaaacaagatattcaaaaaatccgaatgaaattggtgaagccgttttcaatacactttcaacaagcagtttattgagaggcgataccggtattcaaattgaaaatctttttattaaagttgcacgtccaacggattcaatttggacaagtcaaagaggaagccgtccacacttgcattttagcggtggaatttgcacacattccgttacagcattgcaacaacaaccagacagaatttgtgatgacgtttggaaagaaaattatctttcttacaacgccataaaacaacaacgtgagccaattcgtttgcattgcgaagaacttaccggacaaacagacgaccaatttgaacgtcaaagacattttagaaacattattttgcccgatgaaggtaacagacaagtaaaaactattgacttattaagtgtaacaacaacacttgaagttggtgttgatattggcgcattgcaagccgtaatgttgggaaacatgccaccacaacgtttcaactatcaacaaagagttggtcgtgccggacgtagagggcaagcgtattcagttattttgacgttttgtagaggtagaagccacgatgaattttacttcgctaatccgcaaaaaattacaggcgatgcaccgccaacacctttcttgacaatggggcaagaaagaattttcagacgtttgcttgcaaaagaaattttacgtagagcatacgttgaaaaagaaattgatattacttctgatgacaaatcaagtgttcacggagaatttggttcagttgatagttggacgatttataaacttgaaattgctaattggataaatgaaaataaaaaagcgattgaacaaactgtcgatgctttgcttacaccacaattacaaaataaaagagcagaatttataaattgggtttctgatgtaacaacagaaaacggcttaattgaaaaagcgcaaagcataatcagcaacgaagaaattgcatcaaacgacatttctgaaaaatttgccgaaggtggaattttgccaatgtttggaatgccgaccaccgttaaaaacttgtatcacggcatcaacagaagacttgaaccgctttcaatagacagagcgcaagcaatggcaatttatgaatttgcaccgggtgcacagaaaacaaaagataaagcaattcatcaagtaattggttttacaagcgattttatcaatgttcacaatggaattaaaaacgctgactcagccaatcaacttcccttttcccttaaccgttggtttgtgcgttgtagagcttgcggattttttgaaacgtattcggaagaacgaaaatcagaattggaaagtcaaagtcaatttgatgtttgtccaaattgtggtgaagacaatccgaataaatatcaacctccatttaaactgaaatcgccaagagcatacagaacaaatctttcaaccggaagcgacacaaaagatgattcagaatttttgctttcacggccgccaatttttgcagaaaaaataggtttagcaaacatagaagcaataagcaatgctacaatttctatttctgacaatgatgttacttggcgtgtgaatacaaattctgatagatttttcacaggacgactttacaatacaaataaccgtttcccttttaacgctaatggttattggttcaataatcaatggttattaaatgactttgcgacaaacgttcctgatgaaaatggttattcaatgactattcaacaaatcacagcaagcgcagacgagcaaattgcgttagcgagcaataaaaacacggagatattcagaattgcaccgacaaatgttccgtatgaacttgacttgaatatgttttttagcgaaacagatttagcacacgtcaaagcacaaagtaatggagtgcgttccggctattattccgcagcgtttttgcttcaaagaattttggcagataaacttgacgttgatccaaccgaaattgaaattgccgacatttcaatgaaagttcttgatgacggaacaaacaggagaattgccgaaattattttgactgatgaattaccaaacggttcgggcttcgtcagatacttatacaataatctttcaaacattctttcagaatcaataaatccaagcaatgcgaatagttatttaggaaaaattcattcgccaacacaccaagaaaaatgtgatgatgcgtgttacgattgtttgaaagtattccggaatatgaattatcacagtttgcttgattggcgtttaggcttgtcaatgcttcgtgtaatgaatgattcaacttttgtttgtggtgctgacggaaatttcaactttgttgaattgcgagattggcttgcttttgcaacagaattgagaaatggttttattcaaagttttgggttctcacatacggcagaaataaaaggcttgccaattattaaatttgggaaaaatcaaaagcacatcataatgattgttcacccattttggaatatgagaaatttcacggaagcaaattggttggcggaaatttacaatgaaataaaagaacatacagaaggtaacggaggaaaaattagcataattgacacgtttaacttgcatcgcagaccgggatggtgttatgaaaaattgattgagagatga

SEQ ID NO: 27719 - DNA, 1134 bp, Chryseobacterium kwangjuense
atgtttaaagagataactaaaatacctgttctttctttttattctggcggaggttttctggatatgggttttgagcaagctggttttgagattgtatggtctaacgagtttgatgacatttttgcaaaattacatgcggctggtattacttcttggagaaaatctaatggtaatgatattaaagcggaaatttttaatactaaatctattacagaaattagttcagaacaaataatttcagaagcgtttcctaatggaaaacctgaacattttggaatgattggtggaccgccatgtcaagatttcactttgaacggaaatttgcaaggttttaatggagaaagaggtaaacttaccgttgtttactttgataaaattttagaattaaaaccaaccttttttgtaatggaaaatgtaactggtttaatgaaaagaaaagaaacaaaagagtatctgcaaaagcttttaaaacgagttgagaaagaatattatgttgatcatgaaaaattaaattctttgaatcatggcgttccacaacacagagaacgtgtgttttttgttggtattagaaaagattgccttagcaaaaaagcaattttacaaacaccttttggaaaatggtttccttttccggtaaatgaaaaatatcataatgcggcgacaaaatataattggggaaaacaagttccatttggaaaatcattgaaaaaaccggaaaatgtgccttttgaattatgtgtagaaagttgtttggttccaaagcagaagttaaatagaattccaaatgcgaatgaaattttcactttatataaacctttaaatgacttagaacaaattgaagaaggcgagacaagcaggccttctttcaaacgacttcatcgttttagatatagcccaacagcttgttatggaaataatgaagtgcatttacatccatatatacataggcgcttatcagttagagaagcattaagaatacaaggtgtccctgatacttatatcttgcctgtagaattacctttgtctaaaaaatttaaaatgattggaaatggcgttcctgtacctttagcaaaagctattgcaattggactatacaattttatagtaaaaaacaaagtaattctagtagaatag

SEQ ID NO: 27720 - DNA, 2847 bp, Chryseobacterium kwangjuense
atgatgaaatatttacaatggaataatgctatatcagaatatttatttaatccggctaatagtggtagggatgtttatttatatttgactaagcccgatattattttgattggcagtatatatttcgacattgaaacagaagaagaaatttggaaagattttatcaattctattaaacgaggttttccaggttcaaatggaaatattattgcaaaagcaaaatatgctcattctaaaaataatcttgtaggtaagaatagatcagatggaacgccagctacaatagaagatattcctgtcttgtatccaccatttatttcctatttaatttttttaatactaccattagtagaagatatagatgatactaatctaagagcagatgcttattatggtagacttaacgcttttctacaaagtcatctgataaatgaaaatattggttcagcagattttcgcaataatcaaattaattgtttgtgggaagatttagcaaattgggctaatgttaagaataatggagattttggcttgtttaatgttattccatttacaaatgagaactggatttatgttggaaaagttttttcgcaatgcctggtaccaccaaaatttttaaatcggttgccagaattgtttcaagttatcggtttagttcctgatactttttatgaagaccgttttttacaggaaaaaataaaaaatagtagaacggatttaattcctaaaagcacgttagactttttgaaaaaagatgatgagttatctaactctatcattcaaaccatacaacgccaatacaaaaaatggacaggtgaaacacatgaggaaattgaagaaggaacaacaacaagaaagaaaagaaattacaccgttgcaaatttgtttcttcaatttagagtaaacacaaacgatgaactcatttcgttttcttacagaatgtactcgtcaaatgattatccagaagatttgaaatttggcgaacacgaaaacttgtatgaaataaatgggtggtctaaaacactactgcttgaatttaatgaagggcttgaactgaaagatagtttcaataaatggattgcgaaattcccaaaccgtgatgtaagattatttgtaagtgcaggaatatttcagttgagtaacgatttttggattgaaacggactttctttcaaaaacagacagaatgtatttgttatgcaaaaacgagaagcaagaacttattaaagattggggcaaaacatttggcaacggaaattttaaacaagaagattttgaaggtttgcctgaaaattattctttgttttggtttcgtaatccaaaacaaagtcttgctggcctttcaattcttacactttacaccgaaaaacgtattgaattagttggtgggttaaaaataaatttcagaacctattcaaatgaatttttaccggaagttgaaattgtaaattcagacggaaacgaaaatgtgtatttgcaatacaaagatacggacgaaaaaatatttctttctaaaaaaacatcgctcaacaaccgttggttattaactgaaaaaacagcaataaataccgattttcacattaaagttgaagatgaaacattttcagggaatgcacttgcatacaatcttgtttcgtcagataatacagcaataaaagttgacggctcaaacttaccgaaacgagatgcatttggacgaaatgttacaacagatgcggaacaattttgtttgggaagtaacattgttaatccaaataaatcaagccaaagatatttttctacttatggctcattatttacttctacaattcaagatactctaacaaatattacgactgcaatttttaataatcacaatggaaataatctttgcaattttctatcattgaaaagcgagcttacaacggaagattttttcaaagcgtttgaatttttctattcaaaagaatttcctgaatatcaagcaagcacaaactacaatcttacaaaactcaaaaaagtgtcattgaatttttacgatttcacaggaatacttgactacgattatgaaacgaaaaagattgttttaaatccaccgcaatttattttcataccggcagaaaaagggagaaaggttttactgattggagcaagagatactgcgttaattgaaaaaatcataaccacagcaccaaagtacaatttgcaagtagaaattacaaagcaattttcttcaaacgaaagattgcttttacctgatgtaattaccataagggcttttcaacaagtagatgattcctatggtgaaaacagtattaaagcatttgcaaacgaattgaatataaaatttacaacagattattatccgcaagttgcattgcaagatttttctgcaaccattgcggactacgaagaaacattacaagaaactaatgaaaatgattacgattgggcgagatacattttcaatcctgaaacgttagattttgacaaaaatgaaacgcccacttttgacaaatcattttcattggttagatacaaactgaatgaatatacttatgagttcaaactttggaaaaataacaaatgttataaagttgatatgaattggggaagatttattgcattgaaacatttccaaaaggaagttattttgtttgacaactcaagcaataaagttgcaattcctattgcaacgcctttgccaagattgttgtcagaagcaattatgttgttaagtggaaaagcacccgacttcaaagaaattaacggaaagaaatacagagtttatgaaaatgtagttggcattttcactcaaaacttattcagattaaaattaggtcaaacagcaataaatacaacattatga

SEQ ID NO: 27721 - DNA, 5949 bp, Citrobacter freundii
atgaataatccactggaaacatttgaatcaataagagatttttatatttcgtaccttgaaacagccttccgtattgattcatcagacatacagtctgaacggcgagcgttactggaacagcaagggacattatgtgccgatctatttcttgaaccgatgccccgatatcagcattatggcttaactatcagcgaattacgaaatgatgcttatggtcagacatggttgccagggtttaatgcgcaacaaagggcggcattcatcgacctctgtttaggtggacttctgccccacaataaaacggattcaactaagggacgttttaatctttatacccatcaactggacatgctgaaaagaggggtacagccagggaaaccgggcattgtcacctccgggactggttccggtaaaaccgaatcatttttactgcctgttctggcacagatcgcaaaagaagctaccggctggccgcaaagcccggcgttgaagtgctggcaaccgtggtggcataaggttgcggataaacagcccagcttcatgcgcgagcatgaagccgctgctcgtccgaaagcggtacgcgcgctgatcctctacccgatgaatgccttggtagaagatcaactggtacgtatgcgacgggcgctggattccagcgaagctcatgatgtcatggatacgcatttcggcggcaaccggatcttctttggccgttataccagcgcaactaaagtaactggctggcttaaacatccccgactcagtgaagaaaaaaatgagaaaaagcgcgtggctaaaaaaatcactgagctgcgtgaatatatgcaattaacggaagagacccatcaggaggcggtacgacaagcgcagcaggacaaggataacgaattatcgtttaatttcccccgaaccgctggcggagaggttctcagccgctgggaaatgcaaaagacaccgcccgatattctgatcaccaacaccagcatgctctcaacgatgctggttcgcgaggtggacgatcctatttttgagcaaacccgacagtggattgagcgcgatcctgatgcctatttttatcttattcttgacgaacttcatctacagcgaggaaccgctggtactgaagtcagctacttgcttaaacatttgatcaaccggctggggctggatcaggaaaaacaccgacacaaactgcgcattctggcctccagcgcctctttacccgttgaaggtgctgaaggtgatcaaagcgtcgaatatttatgggggatgttcggtcagcggggattacccgcaggtgcctcttccaacgactggagagaatgtattattaaaggtgacccccttcccccgggcaatatgtctcttttccagggggatcgggaggcgttttatcacgcagtgcttcagttacagcaagcaccacttacctcattacaacactggcagaatgtcgcccgcagcatggaaatgacagccagtgaagcctctacagaacaactagcgcaacgtgtcgttttacaggcgggcaacctgcttgaaagtggctgctatacggacgatctctctccgagagctacgtcaatcaaaatgcttagttcacgcctttttaacgcccaaccccatagtgacaaagcgctccaggcattaatctggttacgttcgactgagggagattggccgcaatggttttcacatgcctttcctgatgatatcggtgcgccacgtttccgcgctcatgcttttttgcgcgctcttgaggggttatatgtcgcgccattgcccgtccctagcgctgcatctgcgcaagaaattaatcaaagatattttggcgatcttaccgtggagtccggcttacgttacggcaaagataaaaaatcgcggcgtgtcgaattactctattgtgaatgttgcggtaatctcttttgggggggtaaaccttcggtcttttccggttcagaaagtcgaattgaacttttacccaacgaccctgatacggaacaactgcccgaacacgcaaaatcagtcatggtagaacgccgatctgctgaagaatacgcgctatttatgcccgttgtcgaacgtttctggccgaaaggaaatgaggagctaaacagcgataatgacaatacttttggtacttgggtaaaagccagctacgatccatttaccgccactattcaacacccagtatcgctcttaaaaccgctaccggaaaaccatatagcgggctggttctattacgtcaaacccggtgaatttgcctcctcggaaagaggccagtcatccagacagtcacctggaacggcgctaccttttcagtgtccggcgtgtggtacgtcctataaatacggcaaaggtaagctctccccaatccgtagctttcgcgtcggtttttcgaaaacgacacaactactggccagctcgctaatggcggaactacagcgatcgggtaaccgtgagcaactggtaacgttttcagacagtcgtcaagatgccgcaagggcggcgctcgatctggaatcgggtcaccatgacgacgtcagacgagaaattgttgtccattcgctacagactattgcggctgataaaccgtcccataaccaactaaaaatacgccaggcagagatagagaaccggaacaaaacactagttaacctcagcgtaaggtcggatgaggaagaggatgaattggatcaacttgctgatgaacgaaagaaaatcagagggttattatcaaagcctgaatctgacagcatacctctgcgtgaaatcctcgaacctgaatcaccggatgcaggtcaaccgcttggcccgctgttaagggcgcaggtagatgcaggtattcacccttccgatcgtactggcatcgcgcctgttcccgatccagaaaaacatgaagaaggcacgctgacctttgcatggcaacaactctttgaaaagaacacgcagggggagtggtgctggaaggcgcttccatcctatgaagacaacctgcttgtggcacgacaggagatttcacgcgatctgaaacggctggtgggggaaagcgtattcagtaaaacctacttcgcgctggaagagtccggttggggttatccctgccttcccattaccggaaacgactcacgggaacatctcgcgatttatgacgcaatgtttcgtgtgttggcggacgcataccgggttaccccttcacaatatacaaagccagaaactccatggagttcagcgcgcgatgtcaatcgtagaaaccgcctgtaccgttttacacaggagatatgccagtgttcaggaggcgagcctttatctttaattgatagttttctccggcgactagagctggcgggtcatcagggcggtattattgatattggtaaaatgcattttcgcctggcggaacctacagatcgcgtctggcgctgctcccgctgtgggcgtatacacatgcataccggcgcgggaatctgcactcgttgctactctcctttaccagaaacgccgtgcagtgaggcaaaaacgctccagatgcaacactatctcggcaaacgtctctcacattcttctggtattcacaggatgcgctcagaggaactgactggaatgaccgaaaatccggcggcaaggctacgccggtttaaaggtattctgattgccgacgacgatgatattttaccggaaggaatgaaagattttgcgcccgatagagaccttgaccgggcagctcgcgtggtcgatgtgctttccgtaaccaccaccatggaagtgggcgtggatattggtgatttacgcgcggtctttcaggccaacatgccaccacagcgctttaattatcaacagcgtgtcggacgtgccggacgacgtggacaggcgttttcattcgtcttaaccgcgtgtcgcagcaagagccacgatctgttctacttccgccacccggaaaaaattactggcgatctccctccgccaccgtttctgaccacaaatctggaaatgatctgccagagactggtacgaaaaatctggctggtgtcggcattcaaatggttaaggcagcaaacggaaaaagccgatcacccatggccggttgacgactacgcacacgtccctgataaccatggtgagtttttcccggtgcactggctgaaagaaaaccaaacggactggctgccaaaaatccggcaggccatcgaagcaaccatcctggcgcgcgatgaatttgcccggaccagcacacagcaaaacccatatttgttccagaaaattattcagcctttgacgccggaacagctgattcaggatatcaacgccgtactgaacgacagcgcgatggaggcgaaaggactggcagaagcgttggcggaacacggtaaattcccaatgtatggcatgccgacccgatcacgccttttgctgacaaggccagtcagcacaggtgaaaaagaaatcgaattcgccagcatggaccgcgatctggatattgcgatacaggaatttgcccccggaaaaattctggttcaggataaacgacgctactttacagcaggttatagtggactgcttaaacagagcagaaaaaatccacgatcattttattcaaatgcctgcgaaccgggtgaactcagaacaatgaccgcctgtccagtgtgcaacatctgggctccggcaaactctctggccaccgaatgtactatctgcggtgccgttatggataaggcagagcgctatcaatgctatgttccttatggatttatcaccacgctggagcccaaatcggccaaagaggattttgatcagatcctgaccacggccagtcgtgtatcaattgcagaagcctacactttttctgccacgccagagcctgacgttaatgtggcgatacagcttcagccgcagacatgtctgcaccgcctgaatcggggaatttataccgataaaacatggcgtggtttcagcgcaacacaggggagcctaacggtccctttcagaaagcaggggacctaccagccgctttgggctaaccgggtttggatagatagtcaaattattgaggccgacctgttagttaaaaaccgctttaacgatcggggagaaacccgaaacacattttatcttgccgcgcctaaagtgactgatctacttgcgctgatggttgcccaaaccccgccgggtctccggctacagtattccactctaactccggcattcagagctgctgcgctctcggcgtcttttatcattgttaactatgcatcaaaagagctattggatattgatcctgaagaaattgaaattctggaaccccgcgttcaaatgctgaaaaacggtaagtcggtaccagttctgcaaatggccgatcgtctggttaatggttcagggttatgtgaacggctgcagcagaaggacgcatccggttctctcattatacttgaggtcatgaagaagattttaaataacaaaacggcttacccgctggctgagttcctgcaatccgatcatcgcgaacgatgctttcaaggatgttatcactgcctgcaccgatacggaaaccagccgtatcacgggttgctggactggcgtctgggactggatgttattcaacttcttctggatcaaacctataacgccgggctgaacggtgattttacatctccgggcgtgtctgactggccggaaaatgccctacgattagctaaagaggccgcttcgctatacagcgacagtgacgtaaaagtgatggggaatatacccgtgattcgcaccggtgacgggcggtgggccgccgtactacatccattctgggatcccgatgctgcatttgctgcaaaccccgaacttgaggcattttcatatgaggtggacgtagacgcaacgaatacttttgcgttgtcccgccgcatggggactgaaatggcgaaattacggactcaggcgtcctcatctctggagtga

SEQ ID NO: 27722 - DNA, 1086 bp, Citrobacter freundii
atgaacagtgttttcgagagagagaacgataatatccgggtactttcactattctccggttgtggtggtatggattttggaattacctcagctggtggagacatcgtctttgccaacgatgtcatagagaatgcctgcaaaacattagggaactatttcccagatactgatatcaggcatagcgatatctctcaaattcagtcttttccagatgttgatattgttgttggtggctatccctgtcagtcattttcaatggcaggtaacagaaaaccaaacaatgacgacagaacaaacctttataaacactttctacgggtattagagaccgttcggcctaagtattttgttgctgagaatgtttctggcttgaaacatttgggagccggtagttttctggaacaacagctcacagcatacaaagctgccggataccaggtcagctatcatatggtaaacgcaagggcttatggcgtacctcagtcacgcaagcgtttgtttatcattggtgtcagaaacgatctggggcaatactttgaatttcctgctgaaacacatggcaaagcgacaaaaaagaatcctcatttaaaaccctatgtttcacatggtgaggctattagggatttaccactatggcctgaaggtgagttttacgaacgaccacatgatcctgaagggcatttctcatggtatttcatgtcccgaaatcgtaaagctctatgggacagccctgcttacaccgtcgtagctaactggcgtcatgtgacattacatcctgccagcccggtgatgaagttaacatggtcaaacctggaggatggctggaagcagcgctgggacttttctgatgaatatgagcatctaattgttgatacttctcgtcccaaactggaacaggcaaggcggttatcatggcgggaatgtgcacgaatacaaacttttccacagggttttgagcctgtaggagacgtcgagtcaaaatttacccaaattggtaatgctgttcctccactgctggctgaggtactttttcggcatttattttctggtactggtttgaaaatgatgacagcgaacggtaattag

SEQ ID NO: 27723 - DNA, 2766 bp, Citrobacter freundii
atggatgattctttcccggttactttagaagaatggaatgctgaactagtaaagatcgtctttcttgagtcttcgcatacgggctcgactttaagccgaattgatactacgggccgcatttttgagcaacttgcaggtccacgtagcaaagaggatgctaagcgaagtttcctgatttcgtttggaaaaaaagcgtctaaaatccaggatgctctcagagatgagtcgcgattagacattttagcgcaaataaaaggataccctacttattttgccgttttatatttaacattacttgctgccagtgctgatgatgaaacacatgacgaaggggattttcgggttcgattttctgtgctgcttggctttgataaaaataaaaaatttgtttttactgaattacccaacttatgggaaaggttagaaagatggagtagtaaaagacaaaactgtacccgtttaatcttgccaaggccatcaaagcatgaaagattgattgggtattccaagagaattgcttttccctgctacaaagatgaggtctttttacggaatattctcatcgataataaactagataactattcaacttttgaatcagttaataaggtagtacatcaatatatatcttattttagcgagttttttaaccaagagtttattgagttcagaacattactttcaaaggctgccatgcagcaggcttatgactctcctttttggggcgctgttcgtgatatcactgtacatacggagagagaacaactcaaagagaatggtaagtattgtattcacatggagtttaatgattcaggtaatccggagatttatcttcttatggatgacgctgctgctacagcctcagaaatccagcattatgactccttgcctaatgaaatagagaactataataatatatattacgaacgagacataggcaccacattaaattccttggatttattattaaaaaaacggaagggttatttctataaatcacgagtgggagtcgcactacggtctgggtgtttaccgctttttcgtgatgatttttgtcatattagttcagaaggagaatgttatgaagattctccaacctatttaatacttcatcatacatatgcagacagtgttttcactgtcttgaagaaggttggcgaaagagtacaacgtcgggatattaaatctaccaaatggtcgatagtttcttccgataaagttggcaggcaaacgctggataagattgcccgtttgttaccagaagaagcccgtcgttttctaatacagggatggcagccggctcgacctcgtatgtcaggtgcagcgcgatttggacaggctatactgcttaaccctgccagtacaccgataattcatatgcctgaagtactaagaggatgctatgtcatcagcaataaagacggagaagaattaactcatggttcgctatctcagggagctgaaggattattcattccaccagaggcgttgatggaaatatctggtcaggcattttgtcgctacgaacttacgttagcgcattcagatatcccagtaaattttgatgtgcacgtgttagatcatgcgccttacgccacttattgtaaaatttcagagccacatgattggctgactgatggaccatcgggagtattaatggcgttaggggatacggcagtgatccccccactgaaacgcgaagaaataacgccattgagtggtgctcagatgttatggcagtatgaaaatggctttcctgtaacatgtcaatatactgaattacataatatacccgcagcatttgactggatcgctgaagcgctggccttgcgttttcaacgccgtagcacattgccttttggtgaattaaaaaaacatattgaaccggtatcacaggtaacgaggatacccgaatggcaattgcgtcgcatgctctttgccgctgggtggctttgtgtagtacaacgacgtcatgcgccatattcgttagtctcattggctgaaagaaccatttccgttgatgtcactgagcagggaattgttgcccgaattctggggatgtttacaagaagtgaacgtaatcttctacaagaagcacttaataacggtgagcgaatagggcgtcggttagttgaggataacggctgttcaatgggttgtattgaattgcatctgtcagccagagagcgtgtccatgctttcattgaacagtttgggttacgtttggttaatcacgacgatttccccgtaaatgctttgagcggagtattgctaccgatgtctcaaatgcagtttaccccggctttacccccggatctccatgtgtcgctatggcaagctgaaaaataccaatggtcagaagaacagcggattactcaaacggcaaataatctattgatacggtgtcaggaaaaacagcgttatcgttattttattaggcagaatgctggatactggcaaaccgatagcttctcctgggccttaatggctcagatgatatgttcaggagaaacggttggtgtgcaaaaaggcgatagtggctggtgctggtcaacgaaaattattgcgttaccgccctccgttttacagtggtggatccatgttgcccatggatgcttgtcgataacagataacggtggttacttatttgcaggggggaaagttccactctgggacaatgtaatgaccttcccctcctgtcaacgagcgttggcacgacggaacagagcgctgacaacacgcaagttgcgcaaaaccttacagtaa

SEQ ID NO: 27724 - DNA, 2781 bp, Citrobacter freundii
atggctaaaaagaaaaatattatcagcgaccggctgggccaaatgtactacttcggtacagaatctcatgaattgatcagatgcttgcaagagtgcaagcaaagactcaccagaaatggcgctaaagcggataatttaccgaaaggaccggagaaaaggttacattttctccgtacgttaccacctaaggccaaacctgttgtgtctgattggcttcgtgaaaatttaacgttttctgaacaaaatgacccacaaattgttcttagagatctgttagaagcagaaagtaatgcagaagatattgaactctgtaaaccgttatggcgcaccattctgggattctatatttcttctgactgccctgaaattataacgaaattcctgaatggtgaagaaattgatttaccccaacatggtgtttctgactccttgacaattaatttcactgacgaagacattgaacaatgtgccttaattagtcagggtaaagaaatttctatgccagagcgcactattccactgtttgttgggggattggttgacgcacttaggggaacgcgtatagccgataatcgatggcggacaaagctatcagaacattctttaccgctggcgcgaaaattgggtgaacttatcgatcagtttgaagccagtcacgaccttaaaaaaatggatggtaccagtgtaatacaggctcctcccgttgtttccaaagaaatcgacagttcgatggacgaagttatgttcattggaaaagtgttagcgttaaccgcgtccggcgctttttttgtaacgccgattagtctattaattaatggcaacctacgagacctcccggaggaactggtaaaagatcttttccctcatggtggtgaagccattggttttgagaatcatttcagcaaaaaatttactcggggtgaaattgcaatatggaaagcccgatatcagccgtctgataaacccgcgcagtatgtcattactgactacctgtcgcgcgtttatcctgtcgtcgcgctgcctcatgcctctgatgaacctgatactgttagagagtggttactcaccagctaccaaccgcaaaacgatacgtcggtcatttttcagctaagtgatggagtatccctgagattaccgggtgacttgtctgatcctaaaaaatatgactttgatatgccgctggagagttatcgtcaggttcctcagacattacttggttctcatgccctcacggtgatcactgaactccctcaggtgagtgaaaagtatgattgtgctgaagctgctacgtggatcaaacgcctgcttaaacgaactgattcagcaaaagacttccctcaattcagtaaagggcagctacaaaacttaacccattttattgctgaacatgaatctgataatgaggcatcctatcttcgtgcagtatctcatctggagcagatagcagatacaagatcctttcttaatgatacgactcaacagttactggctttacctgaggttgaggcgcaaattaatattgagaaacaggaaatactgactcgttacgaagacgaacagtatcagattaaacaatcaataatggtattatctgaaaagaaaatccagcttgaaaatgaaatagccgatcagaagaaaaaactgaaaaaagagaccgatcgaattaataaagcactacgtcagcaagaaaatgagctggaacaacggattaaaaagaccttcgaagccgcatctcaagcgggagtggaaacgctagcccagacagcgctactgcgggcgattatcaaaaatgaaacagcgcaggaacaacctgtccaacaacggataacaccagaacctgtagccgaatcagtaaattctaatttcccattagcagaggtgagcatcctgactcgcaagcatcaactatcattggctatcgaaaaacaggcacaggcaacgggactaagtgaatctttattatccagcctgattgccactgcgagtatcacacccgcgatcggattgatgggaaaacagacaaaacagactatcgcttcattagcgaaccttttagccggtaatgtttggggggaagtatcggtacatagcgatcattttagcttcagcgatttaatgaactcccccacgctgatccgcttatccggcgatactcataccatgacactgggcgattttttgacccaacaacaagaggcagggctggcgagcattattgaattgcgtggttttaaccgtactccgccagaaacgcttctccccgaactccacgagtgtttattcagaactccccatcctgccgcatgcagttggacggatcggcgacaggctttgcgacatttgcccatccggcacccaatactttttttactcacattcaccaccgggaaaagcacgtttccattacaggctcctcttgcttaccagttacctctgtttctggcagagaatatatggtcggatgaacggccatttgagcaaaatactgacatcacgccttctcgtattgccccagaactatggcagacaatctatgtggacaaccaccagccagagcacccggcttgtgcgccatgggaagcactaaaagcagcgctactctctttacttcctgatgaacaagcgcaagccgttgcccgtctggcttacggtctcggtcgtagtacaacacaagatattgcgaccacgattgacattcttgcaccggaattagggccatatgttcaggaaatgactagcggtgaatcggcaagcgtacttgagcaccttttccagttataa

SEQ ID NO: 27725 - DNA, 5844 bp, Citrobacter sp. 30_2
atgttagatcccattggcggttttcgccgcatccaagacttcttcatttcatacatagaaaccaacttccggattgccgatccttctgtcgcgatttcaagacgcaatcttctgaacagtagcggggaattcgctgcagaaccttacattgaacccgttttacggtatgaatcgtcgggtaaaatgcttgaagatcttgtcgatatcgacggcgggccgctgaatagcttgtctcccaaaggccgtaaagcgttcgtcgaactagcgttatccggtctgttcgattctaaacctggtgacgaagtctggccgcgtcgttcggtccatgcgccgtatagccaccagactcaaatgctggagcgcggtattcgccccggctgccccggcattgtgacatcgggaacaggttcgggaaaaacggaaagttttatgttgccgatactggctgcagtatcgaatgaggctgtcaactggcccgcgccttgcgatggctatttgcaaaatcagtggtggaatggcgaaaaaacaaactgggtctctcgtcgcgaaggagaaagacgccctgctgcggtcagggcgatggtactatacccgatgaacgctctggttgaagatcaaatggcgcgtttgcgtaaaacactagattccgacgatgcgcgagaggtcatggagcagcgtttcgccggaaacaagatcttcttcgggcaatataccagcgccacatcgattaccggctacgccagccatcctcgtctttccggcatcagttcggaaaaaagtcgccgggcccgtaatcttgaaaaattacgtaaggcgatgaagcgaattgatagcgatcagcaggctgcgcgcgcattcgacgaaaaagaaaacgcttcggaaaagacccgatatatatttccttcgacagacggcggggaaatgatgtctcgctgggatatgcaggctgccccgcctgatgttctcgtcactaacgcctccatgctaggggcaatgctttcgcgcgaagtcgaagacggtatttttgatgccacgcgcgaatggttgatgaataacaacgatgcgtacttctatctggtattcgacgagctgcatttaatgcgcggttccgctggaaccgaaaccgcaatgttgattaaattgctgattatcagacttgggcttgacgatccgaaacatcgctacaaactgcgtttactggcgtcttccgcatcgctgccgatggatggcgctgatggagaacaatcacgtaaataccttcgggatctctttgcgccctttggtacttgccgcaattctctggatcccggtagcgataagcctgatttttggcgtaactgcgtcattcagggaaaaccttatataccgttgaagccagaaggaaaaatcgccgtgcggccttttgccgcattaatgcgggtagcgcttgagaatcagggaaatgtcattcgcaatctgaaaatgacggacgcgctgagtcaggctttgtctgatgtattcctggctatgggcgtaaaagcgcaaaatgatatgcaaggcattaaacaagcggcagaaaaagcggctgcgctattgaccaacgcttgtatagaagaaggcggcgaattgccacgagcaatgcctccaggatttatcatagataagatttttctgaaggaaggctcggataaaccagatgaattggaattagcattacgtgggttaatgctgatgcgtgcgctgccggaatccggggtggcttgcgagaagccagccaacgtgactcctgcttttcgcgtgcatacattcgtcagaaatattgagggttttttcgcctccgtatcaccgggagagcaaaaggcgaaattcgccgatttttgtctggaacgtggtctgtcacacgctccatcaacaccagacggaaaacgtggccgccgtttgttcgaaatgctgtattgtgaagcgtgcggcgacttgctgctcggcggtcagaagggacaaaatgaaggcttgacgatagagctactgccatcagcgaccaacctggaaaatcttccagaacgccccggctctgaatattacgatgatatgacgctggatgagtttgcggttttctggcctgtcgatagagttgataaaaatccggcagtctgcgaaaaaggttgggatgcctgggaaaaggcagctcttaatcctgttaccggtattgtgactgtcggacaagacacatcggcagcgaatgccgattcggttcgcggatatctctacttccagaaaactgccccgagcaaaaaaggcgaaccagcaaaaaaaccttccgcgcaacctttttgttgccctaactgcggtatcgattactccagtcgcccagtcagcaatcgttccagaacccctattcgcgcattccgtacaggtgtgactaaatcatctcagctcgtggcgacagagttatttgaattgcttcatgcgatcggcgcggaagccaagagtattgtgttttccgatagtcgacaggatgctgcatcgatggcgctggaaatcgaacgattgcatttacgcgatctgcgcagggaaattttggtcgcaaccgccagagagatgatccaagaggctgaaaacgagtatatttctgaagacagtattgatgaacaaatggatttagccctacaagttaaagacatgaaggaatatgttcgattacatgaactcaaacaaaaccaagcgggtattgctgatttgtgtaagtacaggcgggtagaaatcgataaattgctggaacctgaagggggttccatcggaaaagtatcttccgaactagctgggctgggaatatcaccttacaaatatcgctcaagcgctgatggggatggcagtgacatctggcataccaattttatcaaagataaaaatatcgttaagtatcatgaaaagctttctttatcagctcgattagatctcaaaaaaaagatatttgatactcagtctgaattggttgatgacgtcatcttcgccaataccttcttcgcgttggaagagacgggattagcgtatccatgcatttcaaataaagaggatactgatactgccaagcttgatgcctggttaagaatatttgctggtgtttatcgcgtcaaagaaaataaatattttgatcccgaacatgccgtcgaatggaatgcaggaaaagacgttaccaaagagaaggtaaaacgtgtcgctaaagctgtatttggcgaagataattatcaggataatttgacgcaaatattagatgagtttgctaaccgagggcattcaggtggtttattcaatatcggtaaattatatctcaaggtagccaaaccaggcgatccctattggcaatgcagcaactgcgagcggatccacttacatttcggatttaaacgttgtacccgttgcgcgaaaccgcttgatatcaaacccagaggcgtcgttgaaactctatgggcagacaattttcttggcaaacgtatagtccgaggcgaacgggatggcgttaaacgctttcggttgaacgtcgaggaattgacgggacaaacggatgatttctcagatcgattacgtaaattcaaggggattttcgttgatgagatgagcgagcttgaaaaactggatgctgaaatcgatatgcttgccgtcaccacgacgatggaagtcgggattgatattggttcgcttcagtcagtatatcaggctaacatgccgccccagcgatttaattaccaacagcgcgtcggtcgcgcaggacgacgcggccaggcattttcttttgtgatcacattctgccgcggacgaactcacgatgcttattactttgcgcatccgcatgcgatcaccggcgatgcaccacctcctcctttccttgcagtggatcacgacgcaattcctcaaagacttttgcggaaaatatggcttaagagcgcgtttaacgatttgcgcgaagaatgccacaaaaacaaaacgactttccctggcgataagctcattccgcctgatattcatggtgaatatatttcaactcatgattactattatgatgataaagcggattgggccaaacgattgtatagcgcgctgaaaaaaaatcagaacatacgagaacgttttattgaagcagcaacatttgctcccgatcagcgtcgacgcctttattctacaattaacgctgaaagaataattgaagaaatcgaaaaactaagaccttccgcgcctgacgacaatacggggctcgctcgttttctggccgagcgaggtctgttgccgatgtatggaatgcctactcgggtacgtaatctttatctgggattgcgcaaaacaaaaggggtaaatggccagacggagtacgaatggtcaacaatggatcgcgatcttgatctggcggtttttgaatatgctcctggctcggtattaattaaggataaaaaaaagcatcaggtgatcggttttaccggcaactaccgagaacctcaagtccgcgataatcgagtttcagatctctcaacggtatgttcatggaaagaatcgagccactatgttgcaatttgtcagtcatgtggttccgctaagcttgaacaaaatcaacccgttaataacattaattgtgaggattgcgatacgcctattggcccagatgaattcgaactttatattacgcctgccgctttccgtacggatttcgagccaaaagatgatatggacagcttcactcgtatgtcgttaaaaacaacggcaactgtattgcataaaggtattccagaagattgtggcccatttaacgtacgacgtggtggcgttactatcttgcgtcttaacgatgggccaattagcgagaaggaaggcgaacgatttactgttgatttagctactgaccaaaaggttccgattcctttagctacctactcctcaccaattaaagggacccaagcgattgattcaaactgggctggattacacaataactttaggtggcgatgtactggcgagaagcaaaactttgggcttgtatcaagcaaagagacggagtcgcttcacctggaattaatgcaatatgatgctcgccttaatctgaatatgatcgctagatacggcgaattcatgaacttgcctacacgtgcggcggctatcagcgcaacacagatattgacgcataaagccgcgctctatctggatgtttcgccagatgaattcgaaacgcttgaaccccgactccatcatgagaaacctatattgcaaatcgcagatgcgttgatcaacggttcaggtctatgcagacggcttgctgagccagtcgtcgttgggggcctgcctttgatagtcacattattgcatgagattctggaagataagcacgtctggccaatggttgattttcttaagaagaatcatcccgctcagtgtcaaaccgcttgttacaagtgcatacagcgttatggcaaccgccggtaccacggcttactggactggcgtttaggtatggcttacttacgggcaatgatcacacctgaattcgcttgcggtttgaacgatggcgactggattcatcctgaaatgatcggatggcgagacagagcatttgagctggcggaagacgtcgaggcgttacggcctggaaccatcaaattgtcaaaagagtactcattaccagttcttaccgaaattcaagatggaaaagaactctggcgcgcagtcgttacgcatcccctgtggcaatggagagaacctgagcgaaacgctctgattgactccttggggatagatgatgggggtccttcactgcggttcattgatacattcgagctggaaagacgaccgctgcgtgcgctggcgaaccttaaacagagttaa

SEQ ID NO: 27726 - DNA, 1236 bp, Citrobacter sp. 30_2
atgagtggtaaagccatcaaggacggcgatcgttcaacagaaccgcacgatacggaatttagtttctatgagtttttcgcaggcggcggtatggcgcgggcaggtctgggaaatccgtggcgatgcctcttcgccaatgacatggatccgataaaagcatcgacttacatcgacaactggggcggcgaacatttcgacacccgcgatgtacgcgaaatcccatctaatgacctgccgcgccatgctgatttaacctgggcctcattcccctgtcaggatctatcactggctggtaatggcttgggaatcggcgacagagattccagcgctgacgagattacgcgttccggcgctgtgtggccgtttcttgatttgataggcaaactcagtgaagaaaaccgaaagccgccacttcttgttctggaaaatgtgcttggattgctaacgttggatcaaggcaggcatttcgccgcgatatgccatcagctaagtaaaacgggttaccgctatggcgcaataatcgttgatgcaaaacactttcttccgcaatccagaccgcgtgtttttattgtggcagttagtcgtcatatatctattcccacaaatctggtttcagaaaaaactcttcctgaatggcattcgtcgtcccttattcgtgcctgtgatgcactagcagaagaagttcatgacgactgggtctggtggtcacccggtattacgcccgaagccaaaatgaaggaactgactgacataatagattgtaacgacacaaatgcgctatggcactctgctgatgaaactcaacggcttattcgtatgatggcacctgcaaatcaggcgcgtttggcgaaggcgcaggaatcaggtgagacgatgataggcagcctttatttacgcatgcgcaaagaaaaaggcgtcaatcaacaacgggcagaaattacattctcgacggttcttggctgcctgagaaccccgaaaggcggagcttctcgtcctcgcattattgttgtcaacggcaaccaggtgaaaacgcgtttgttgtcggtcaaagaagcggcggcgttaatggggttgccggatgattttattctcccggcagcgtatcaatcggcatttaaagttatcggcgacgggcttgctgttcccgcagtccgttttctggctgaacgcatactggaaccgctggcaatagctgtccgaaatgatgagcgccggagggaggacaaacacaaatga

SEQ ID NO: 27727 - DNA, 2565 bp, Citrobacter sp. 30_2
atgaagtggacgccgcctgttacgcccgatggctgggaaagtaagctgatcgattattttctccggttcggtaccgacggcgatgcgcaggatattcgctggtttgaagttacgccgtcgacgcttgcagcggcattcgccgacagcggcgtcggcgcggatgaaatagaaaaagcttttcaggcatgtatgtcgaggataccggatctgccgctgcgccttgaaagtggaatgatggaaagatccaatgacaagtctcccggatattttacttatcttgtaatgacgctacttatcagcagtcaattcgacgctccagaagaaagtaatgatttccgcctgaagttacagaactggttgcaaaccgggcatagctaccagaatttggcaggcgtaaacgctatgtgggaagcgctagctggatggcttgaacaacggattcagaaagaggagtcttaccgtcgtctgattcttcctgaaataccacccagttggagtcacatcggctacaccctacggctggcttttcccggaaaaacagacttgcgcttgatgacccgagttcttatgaaccaccagcaagctgtatccagcccccgactgttaatcgactatttccaattcgcgattcaaaaagaaaacacatcttacgcaatgagtcaggcgtttaacgagtttaaaaacgcctggtttgctggacgtaggacgctcgccgatatgcctttctggcgcctgcgtcagcgagctatggcgcagatctccgatgttgaaatgcgtaaagcgattattgatatgcgggtcgatttcgacgattcgcggtgttatttcagctcctctgatgagaacaacgatagtgttttcgctccttcgttatccgaagcgctaatttctgcatctgctggacacagtgaaaacctgggaaaagccgtgcagatcggcttaatcttttttcatcaagtcggccatggacgctggagagcaatcgcagttcccgataaatgttcctcacaattttacatcgcattatcctgtaagcactccacgcgtataagcaaataccttgacgatgcagttatagaaggtgactggattttgaccagacgccctcagagccatcatctagcaatggatatactccgtgtgatgaaagcgtcgtcagattcgccggatgaacagattacccgtcctctgatttacgacggaataagagtaccggggggatggctggggttgcctgcatttctgccattcatcaaatcagacgcgcgaaattacagggtttatgctttggggaaaaattgcgcaaaaatcgatgtcaagaagatagatgggcaattaatatcatccatgccactcaacggcgagtttattattgagcctgagttggaagcagacaagaaaatgccactatggcggcggcgagtgcgtttttttgatcgcgctgttccacatccagcgctaggtgaaagcgcaaaatatcatctcgaacgtcttactgaatggaagatttcgcaactgaaaaccccggtattctgcgccaacgcgcccttgttaatggaagatggcgatgtgcgttgtgaacatcttctggaggctatttacgcaaccggcgccagcggctgggaagaggttgaactggtctcacttctccagcgcgttgctgatggtatcagcatatggcatctgcttcgctgtctgcatgatgcaggtctgattgagccgcgcttacgccagtcctggaaaggtcgggtatggacgctagttaaaccctcgctgtttcatattcgctatggaaaaagcagtctggtcattgtagaaggtgccatctgctctaggcttatagatgattttcaaaaagcggtctcagaactgggcggaaaatatttccgtcgtggcggcgtaagtgtctggtctcctcctgtattcggcgcggagattgatgatcctgtcacgttatcccggattatggaatggccacttgtcgaggcaccgtcgaagtcagatatgatgcctctcgcatttatgtcaacgctccgcaccgccgaacttcacgttcaggcggcaacctgggactggaattccgggcgtttcctgccacatgtggattcagatggcgaaacgacgcgtttaacgcgccatgttcatccgggtggacgcgatcatgatgtgtatcgtgttgttacccaccgaaaaacggagttttttttatcccgaaccgccgcaattatcgccgcgaacgtggatgctcgccgccctacgttcaggaagatcgctgataaccgctttatttgcattaccaacgattgcggcttgcctgacgcactggcgacaggattgcggcgcaacctgctcagaaacggcggcccgacggaagccggatatgcttaccctctcgacgacatatctttccgttggctaaaccaactgcttcctggatgcttctattcgctctcgtcggatgacgataatagcgtcagccagttagtttccgcagctcgccattccggcggaaaaatgcgtcttcaatggcgaaacgggctcctagcgttatggactgggaaataa

SEQ ID NO: 27728 - DNA, 2091 bp, Citrobacter sp. 30_2
atgaaagatatcccttggtatattggtcaatatgaccgcagaaattaccagtcttacttcaaagttgtcgcgcaggaaaccctggatggctggagtgtgatcgacaatcctaagaagaaatttcctcgtacaggggaagtcgagtttcacggaactgacattttacaatttcgcccgcaagaatgggctgcttttcaggtgggtccaggccctcgaaacaagactcaggcgaaacacacccgtcgtatttatccttattatgatttatcttccgggcagtcgctgctggaggcgcgtcgtcgattaagtttcgatggcataacggcagacggcgaaccgggactatgggctatccgttttgggcctgacggatttattctggcgaatctggctgagtcaaaatcaggttgtctgatgctgtccagaaaccagagcgtccatgaatatgctttcaacgaaaacggtgtaattagtgtatccgacacatctgaatgcggaaaagcattttatatgtccgatactgatgcttcacccgctagagtccatgactggacgccggataagcagtacatcgaaaacgtcattcaacttttttcctgtgcgggttcgacaacggagctcgcttcatggcttcgggtgcattcagacgagaaaagcggaaaattaaactccggcgtcaatgatcttctggctaccgctcaatctctccgctcaggcgaactggcaaagaaattggaagacgaagattgcctggcccgtcagctaactgaatcactactcagtgacggcagaatcgctgacttgctcgaacgtcagatacaacgtatcgctgaagaagagcaagcgacgttgcgcgctgagcaaaaaaaagcgctcgaagacgaattttccgccgaacgccagcaacgtcgagatgttcttgatgcggaaatggctacttttctggcaacccaaaagaatgaaatcgaacaccaaatcgcccaattacgacaacgcgatgaagaaaaattacaggctgattttacagagaaacaagcaaaaatagagctgacgctaaaacatgagaaatctcgcctcgaaagggaaattgatcgtctgaaagacgtcatcacggatttatgcgctcagaacgaacatcaacgtcaaacgctggcttctctgaccagtgagcgtgaagcgttagtggcttctcttgctgatgtcaaagaacattctgctcaggcgcaagccgaactcgggcatatgaatgctgctattgctgaaaaagctcgccggatggcgtattcagctattcctgaagtacgcctcccgccagaagcgaaaatcgtgtcctgcaatgagttcggtggttgcgtcagagagaacaagttgctgacatccgacggaaagatactcatgatgcaatttctggcgttgatgctggcaggcgagtgtccgttgctatatggtccggaaacacaagacttccttgctattgccgaatcactgatttcttcgggtcgctccatccgacagatcgccgatccaacgctgatttcctgcgaagatctttgggttcgtgcgggaaataatatggcaacgccgctttatcagggattattgttgagcgaggcttcccgcccccgaacgatcctcgccgtcattgaacatgtcgaatgttccgccgcgcgcttctggttgccagcattgaaagaccgattgcacagcggcgatttgccccgacgctttctgatttgcggtaccattgaaaacgaagattgtgaagaagcggagaaaataaaggaacagcatcttcgcctgcagatggaaaatgtcgtcattcaaaatgcaattgcattatctcccctgcatctttccccggaaaatcatagcgaactggatcctggcgcggcaccgttgagtgagatcccggacaaactcataatcgcgaataaaatgtcagctgggcgtctaaatctggcaaacactctacgggcgatgaggacggcgcatgaagccgggttgctcgacgatgataacaaagtgatgcttcagaagcagttagtcgatttatacgccgatttacagaataacgagctatacgcccaataa

SEQ ID NO: 27729 - DNA, 5841 bp, Citrobacter werkmanii NBRC 105721
atgttagatccgattggcggctttcgccgtattcaggatttctttatatcatatattgaaaccagtttccgaattgccgatccgttcgtagcagcgtcaaggcgcgaattgctgaacagcagcggagagttcgccgcagagccctatattgaacccgttttacggtatgagtcttcggataaaactcttgaagatttggccgatatggaaaacggtccgttaaagagcttatcgcaggaaggccgaaaagcgttcgtcgaactagcgttatccggtttgtttgattcaaaatccggcgacgcgtcttggcggcgtcggtcagtccatgcgccttatattcatcaggtgaaaatgctggaacgaggcattcgtgccggtcgccctggcatagtgacatccgggacgggatcgggaaaaacggaaagctttatgttgcccatactggccgcattatcgaatgaggcgatcggttggcccgctccccgcgacagttacctgcaaaatcgctggtggcataacgcggaagcgaactgggtttctcgtcgtaaaggggaaaaacgcccggcagcaatcagagcgttagtgctttatccgatgaacgctttagttgaagatcaaatggcgcgtttgcgcaaaacgctggattccgatgaagcgcgacagacgatggaacatcgtttcgccggaaaccgcatcttcttcggacaatataccagcgccacgccggttaccggttatgccagccatcctcgcctttccggcgatcgtacggagaaaagccgccgcgcccgtaaccttgaaaaattacgtaaggcgttgaaccgaatcgattgcgatcaacaggccgctcgcgcattcgacaaggaaaaagaaaaatcgtcggagaagacccgatatatctttccttcaacagacggcggcgagatggttactcgttgggatatgcaggccgctccgcctgacgtactcgtcaccaacgcttccatgctgggagcgatgctttcgcgagaagtcgaagacgctattttcgacatgacgcgcgaatggcttatgagtaatgaagacgcttacttctatctggtattcgatgaattacatttaatgcgcggctccgcaggaacggaaaccgcaatgttgattaagtcgctaatcattcgactaggactcgacgatccgaagcaccgctataagctgcgtttgctggcgtcttccgcgtctttgccgatggaaggcgcggatggagaacaatcgagaaagtatctacgcgatctcttcgctcccttcggcacttgtcgcgatccccgggatgaaggcagcgactctccggaattctggcgtaactgcgtcgttgagggtactcccttcatacctgaaccagaaagtaaagttgacgcgcggccttttgccgccctgatgaggatggcgcttacagggcaaggcgacgttgtccgccgcgtaaagatgacagacgagtttgagcgagctttagttaacgcttttcaggctcttggcgtaaaagagcgaaatatccgtcaaggcgttaagctggcggcggaaaccgcagccgcgttattaacccacgcctgcattgaaaaaaaaggcgacaagccgcgcgccacgtctcccaagcatatcatcgacaaaatttttctggcggaaagcctggaaggagagaaggaatctgagctcgcgttacgcggattaatgttgttacgcgcgcttccggattccgtacttgactgcgataagcctgacgccgctacgccggcttttcgcgtgcatacgttcgtcagaaatattgaaggtttcttcgcgtcggtctcgcccggagagcgaaaagcgaaattcgccgatttttgcctagaacgtggcctgtcgcacgcgccttcaacctcacaagaaaagcgcggtcggcgtttattcgaaatgctttattgtgaagcttgcggcgatttactgcttggtggtcagaggggacaaaattgcggaggcgctacggtagaactattaccctcgacgaccaatcttgaaaatcttcccgaacgccccggcgcggaatattacgatgatatggcgctggatgaatttgcggttttctggcctgttgaaaaaacgcccgccgctagtgaagccagtgaaaaaaggtgggatgtttggcaggaggcgacgctgaatcctgtcacaggtattgcgactgtcgggcaagaaacatcgccattgaaccccgaggcgattcgcggatatctctattttcagaacccgcccccggcgaaaaaaggagagccggtaaaaccgccttccgcacaacctttctgttgccctaactgcggtatcgactattccagtcgaccggcaactaaccgcgccagaacgcctattcgcgcattccgtaccggcgtgacgaaatcatctcaactggtagcgacagagctattcgaattgctgcatgcgataggcgcggatgcgaagagtattgtcttttcggatagccgacaggatgcggcttcgatggcgctggagatcgaacgcctgcacttacgcgatttgcgcagggaaatactggtcgcggccgccagaacgatgatcagcgaggcggaaaaagaatatattccagaaaaagaatttaaagaaaaaagagataaagcgatacaagctggggatgatgatgaactcgacaggctgtatgagctcaaaacaaggcaaaaagatattgcgagcctttgtaaattccgacgggtaaaaatagatagcttattggagtcagaaggagactccatcggaaaaatatcctcagaattagctgggttgggaatatcaccttacaaatatcgcccgagcgctgatggaaacgacaaagtcgtttggtacgaaaactttgtaaaagataagaacattgttaggtaccacgaaaaactttctttatctgacaggctggcgatcaaacaaaggattatagacgatcaatctgaattgatagacgatgttattttcgccaatacttttttcgcgttagaggaaacgggtctggcgtatccctgcgtctcggataatgagaatacgcccgaactcgacgcctggttaagagtgttcgcaggcgtttatcgcgtaaaagaaaacaaatatgtcgatcctgaacaatccgacggctggtacgttggagaagatattaaaaaagcgaaagtcaagcgcgtcgccagagccgtattcagcgacgacaaatatctggataatttgacgctagtcttaaatcagttcgctgatcgagagcatacggcagggctattcaatattggcaaattgttcctcaaggtagcgaaatcaggcgatccctactggcaatgcggcaactgtgggcggatccacttacatttagggtttaaacgttgtacccgttgtgcggaaccgcttgatatcactcccaaagattctgttgaaacgctatgggaacagaatttccttggcaaacgcattgtacgcggcgaacgggacggcgttaagcgatttcgattgaacgttgaagaattgacagggcagactgatgacttttccgatcgacttcgtaaattcaaagggattttcgtcgataagatgagcgaacttgaaaaactggacgccgagatcgatatgcttgccgtcaccacgacaatggaggttggtatcgatatcggttcgcttcagtcggtttatcaggccaacatgccgcctcagcgtttcaattaccagcagcgcgtcggtcgggccgggcggcgcggtcaggcttattcttttgtcattacgttttgccgtggacggactcacgacgcctattatttcgcccatcctcacgcgattacaggcgatccgccgcccccaccctttttggcggtagatcacgacgctatcccattaaggcttttgcgtaaagtctggctcagaagcgcctttaatctattgcgtgaagaagatcgcgagaacgggatagattttcctggcgataaacttgtcccgcctgacgttcatggcgaatatgtttctacgcatgattactattatgacgataacgcgaactgggctgaacgattgcagggtgcgctggaagcgacgcagagcatacgcgaacgttttatcgaagcgtcgacgttcgatccggaacaacgccagaatcttcattccgcattgaatgcgaaaaaaataatcgatgaaatcgccgacctgaacgcttacgcgcctgacgacaacgtggggctcgcccgttttctagctgaatgcggaaaattgccgatgtatggaatgccgacccgggtacgcaatttgtatctgggattacgtgagaaaaaaggtctgaacaaccagactgaatacgaatggtcgacaatggatcgcgatcttgaccttgcggtattcgagtatgctcccggctcggtattaattaaggataagaaaaagcacaaggtgatcggcttcacaggaaattatcgggaaccgcataatcggaataatcgcgtgtcggatctctcgacggtgggctcgtggctggagtcatccagtcatgtcgcattttgcccggcatgcggttccgcaaagctggaattgcgtcaaccagacaatgaaattcaatgtaaggattgcggcgcgcctataaatcctgacgagttcaaactctacatcacgcctgccgctttccgtacggatttcgagcccaaagacgatctggatagttttacccgcatgtctttaaagactaccgcgacagtattaaacgaagaaactcctacacactgtgatcccttgatcatacgacgtggagaagtcactatactgcgccttaacgacggtcctattaatggagaaaaagaaggagaacgttttactgtcgacctcacaagcgatcaaaaagcgccggttcctttcgttgcttaccgctcgccgattaaaggcgagcaagcgattgattctaattggttaaaagagcaagataattcacgttggcggcgtaaaggcgagagcagaaatttcggtctggtctccagtaaggagactgagtcgcttcatctcgaattaacaaggttcgatcctcgtcttaatttgaatatggtcgccaggtatggcgagcatatgcacttgcctacgcgagcggcggccatcagcgcgattcagatattaacgcataaggccgccctctatctggatgtctcgcctgatgagttcgaaacgcttgaacctcgattgcattttggcaaacctatactgcagatcgcagacgcgttaatcaatggctcaggattatgcagacgtcttgccgaaccggcggttgccggaagttctcccttaataatcaaattgctgcatgaaattctgacagatgaacgcggctggccgatggttgattttctaaagaaagatcatccagttcaatgtcggacagcatgttacaaatgtatacaacgctacggaaaccgccaatatcacggcttactggactggcgtttaggaatagcctatttacgcgccatggttatgccggaattcgcatgcggcctgaatgttgaagactggaaccatccagaaatgaaaggatggaaagaaagagcgtttgaacttgcggaggatgtcgaggcgttacgaccggggactatcaaattgttaaaggaacattctttaccagttcttgaaataaatgatggaaaagatctttggcgcgcggctgttacacatcccttatggcaatgccgagacgctgaacgtgatgccctaattggttcttttggattagataatataggagcgccattacgatttatcgacacctttgaactggaaagacggccactgcgcgctttggcgaaacttaaccgaggttaa

SEQ ID NO: 27730 - DNA, 1188 bp, Citrobacter werkmanii NBRC 105721
atgcgcgaggcggaattcggtttctatgagtttttcgccggtggcggcatggcccgggccggcttaggaaaaaaatggcgatgcctgttcgccaacgatatggatccgataaaaacggcgagttatatcgaaaattggggagccgaacattttgatggccgcgatgtacgtgaaataaaaccagacgatttaacaggatccgcagatttagtctgggcctcatttccctgtcaggacttgtctctggctggtaatggacttgggatcggcgaaatcgacgctagtgaggatgaaaccacgcgttccggcgcgatatggccttttcttgatctagtagacaaacttgaggagggaaatcggaagccgccgatactgattcttgaaaatgtccttgggctgctgacattggatcagggacggcatttcgctgcgatatgtcgccagttaagtaaaatgggctatcgctatggcgcaatgatcatcgatgcaaagctctttttgcctcaatccagaccccgcgtgtttattgttgcgattagtcgtcagttctccgttcctgcatctttactttcaaaagaacctctaacgcaatggcattcttcttcgcttcttcgcgcctgcgaagcgcttccagcggagacgctcggcgactggatctggtggacgcccggcgatgcgccgggttcgagaacaaaggaacttaccgaccttattgattgtgaagatcaaaacacattatggcactctgccgatgaaacccaaagactgatcgatatgatggctccggcgcatctgacacgtttggcgaaggcgcgggaatcaggagaaacgacaataggcagtctttatcttcgcatgcgcagagaaaaaggcgttaaccggcaacgagcagaaatcacgttttctcctgttatcggttgtctgagaacgccgaaaggcggcgcatcccgcgcccgtattattgtcgccgataaaggcgaggtgaaaacgcgcctgctgtcggttaaagaagcggcggcattgatggggctgccggaagatttcatccttccgaccgcgtatcaatcagcgtttaagatcattggcgacggacttgccgttccttccgtccgttttctggccgagcgcatactagagcctctggcggcatcggtccgaaacgacagccatcagacggagaacagataa

SEQ ID NO: 27731 - DNA, 2559 bp, Citrobacter werkmanii NBRC 105721
atgaactggacgctgcccgtaacacctgatggttgggaaagtaagctagtcgattattttctccgtttcggcgccgacggcgacgcacaggatattcgttggtttgaagtgacgccgtcgacgctctcggcggcattcgcaggaagcggcgtcggtgcggatgaaatagaagaagcatttcggacctgtatgtcgaacataccggatctgcctcagcgccttgaaagcggcatgatggaaagatccaatgacaaatcgcccggatatttcacttatcttgtcatgacgctacttatcagcagtcaattcgatgcccaagaaggacacaatgactttcgcctgaagttacagaactggctgcggaccggacatagctatcagaatctggcgggcgttaacgccatgtgggaagcgctggccggttggcttgaacgacgagttcagaaaggagaaccttatcgccgactgtgcctaccggagatccccccaagctggagccatatcggatataccctgcgtctggcttttcccgggaaagcggatgtgcgcttgatgcgccgtgttcttacgagtcatccgcaaaccatttccagtccacggctgttaatcagctattttcaggtcgctatccagaaagagaacgcctctcacgctcatgcgctgaaacaggcgtttagcgagtttaaagacgcttggttttcaggacgcagagcgcttgccgacatgcctttctggcgtttgcgacagcgggctatagcgctgatctccgatgttgagacgcgtaaggcgttcatcgatatgcgcgtcgatttcgacggttcgcgatgttacttcagcgccgcaagcgagaatgacgaaagcgttttcgccccttcgttgtctgacgcgttattatcggcttctgcgggaaatagctataatttgggcatcgccacgcagagcggcctgctctttttccatcaagtcggtcatggatgctggagagctatagccgctcccgatgcgttttctttcaaatttcacatcgcgttatcctgtaaatacgctgcgcgcgcgagacaatattttgacgatgcggtcacagaaaacgactggattctgacgtcgcgtccgcagagtcgtcatgcggcgatggaaatatttcgtgcgctgaaaacatcatcgactacgctggatgaacagatctctcgcttacagctttccggtggcatccgagtgccgggcgggtggctgggactacccgcttttctaccaaccgtccattcagacacgcaaaattacagaatttactcgcctcagggaaacggcgcgaaagttagcgtcagggaagaagatggacgcttgacgtcatcaatgcctcttaacggcgagtttattatcgaacctgagctggaaattggcgagaaaacgccgccatggcgacaacgggcgcgttttttcgagcgcgccgttcctcgccctgcgcaggaagatagcgccagatatcgcctcgaacttcttaccgattggaagacgtctcccctgacaacgccggcattccacattgaactccccctgacgacagaaaataacgatgaacgtctcgaacatctccttgaagcgatttatgcaagcggtgccagcggatgggaggaaatcgaattggtcgcgcttctggaacgcgccgcagacagcgtcaatgtgtggcatttgattcgctgtttgcatgacgcaggtctgatagaaccgcgcttacgccaaggctggaaaggtcgggtatggacgttagtcaaaccttcgctgtttcgtatccgcaatggggataacagcatgatcgtcgtggaaggcgctacctgcgccagccttatggatgattttcaaaaagcggtctccgggctgggcggaaaatgctttcgtcgcagcggcgtaagcgtctggtctcctcccgtatgcggcgcggagatcgatgatcctgtcgagttgtcccgagttatggaatggccgcttattgatatatcgtcaacgcctgatatgacgccgctcgcgttaacctcgacctgtcgtaccgccgaattccaccttcaagcagcagtgtgggactggcgttcagggcgtttctctccgcatgcggcctccaataacgcctcgacgcttttaacgcgccatgtccatccgggcgggcgcgatcatgacgtatacaaggttgtttcccggcgcaaaatggcgtttttcttatcccgaaccgccgcgattatcgccgcgaatgtgagtgcgcgccgcccgacattcagacgcgtcgggaatcatcgctttatttgccttgtcgacgattgtggtttgcctgacgcactggcgatgggattacgacgcagcgtgctcagaaacggcggcccaacggaagccggatacgcttatcctatcgacgacgtcgctttccgttggctaaatcgactgcttcccggatgcttcgctccattcccgccggatgacggcgatgacgcaaatcgtttagttgcggcagcgcgccattccggcgggaaaacgcgcctgcggtggcaaaacggacatctggcgttatag

SEQ ID NO: 27732 - DNA, 2097 bp, Citrobacter werkmanii NBRC 105721
atgaaagatcttccctggtatattggccgatacgatcgacgaaacgatcggttctcgtattttaaagtcgtcgctcagcaaacggaaaatggttggcacgcaatcgacagccctaaaaaaatgtttcctcgtacaggtgaagtcgaacttaccggattcgacgcgtctcagcttcgtccaaacgactggatcgtctttcaggtagataccaatacgcgcagcaaattgacgagagcgaaacatcctcgccgtatttatccttattatgatttatcctcggcacagtctcttcagaaagctcgccatcgtctgagcctggaaggcatcgaaacgtgcggcgaaccggggcaatggactattcgcttcgagacgggcggagccattctggcgaacctgacagagtcgaaaccaggtttttttattttgtcacggaatcagtacgttgccgaatatgcgtttaatgacagcggaatcatctccgtatccggtctgtctgaaaataacaaaatattttatatgccggacgcagatgcctcgcccacgcgacgccatgactggacacctgacaaacattacattgaaaatgccgttcaacttatcgccggaaccgactcgtcaacgcagatcgcttcctggcttcgcaagcatgtcgacgagcaaaacggaaaattgaaatccggcgtcgacgatctgttggctgccgctcagattctccgatccggagagttggcgaaaaaaatagaagaagaggacgcgctggcccgggaactctcccaggctgtgttgaatgacgagcgtatcgccgctcagcttgaacgccagatacaaagcatcgcggaagaagaacgggacaggttgcgcgccgaacaacaaaaagcgctcaacgaagctttttgcgccgagcgtctgctccgtagcgaagcgattgaagcggaaatgacggtctttcagacggagagaaaaagcgagatcgaacagcaaatcgcgcaattacgtttggacgaagaagaaaaattacaaaaggaattcgaagaaaagcagttaagcatagaaaaaacgttaaaacatgaaaaagacgctctcgaaagcgaaatcaaccggctgaaaaacgccgccgcggatttatgccgtcaaaacgaaagtcagcgccggacgttgtcttctctggagatcaaacgcgaagcgtcttcaggcgcgcttcgggaagttgaagagcgcgttgcgctggcgcggatcgaacttgagaaaatcaatgccgctattgctgaaaaagcgcgtcgaatggcgcattcggcgatccctgcgatatgtcttcccgccgaagctaaaacagtttcccgcgcagaactgggacgtatcatcagtgaaaacaaactactgacgcacgaaggaaaaatactgatggagcaattcctggcgttgacgcttgccggcgaatgcccgttgctctacggctctgaaacacaggactttctggctatcgccgcgtcgcttatttcttcaggacgcgctatccgacaaattgccgatccgacgatgatttcctatgaggatctgtggatccgcgcaggaaataatctggcgacgccgctttatcaaggattgttattaagcgacgcccatcgtccccgaacaattcttgccgtcatcgaacgcgtcgaatgctccgccgtgcgtttctggctgcctgctctgaaagaggggttgcgtaatggcgatctgccccgacgattcctggtgtgcggcacaattacgaatgaagataacgaggaagcggaaaagataaaggaggaacatctttttctgccggtggaaaacattgtcgttcgaaatgcgattacgcgcgcgccgctttatctctccaccagacatcatagcgaactaacgcccgaagccgcgccgccagaatcgcttgaggaaaaacttgccattgcggatgaaatgtcgggcgagcgtctgaacgtggtaaatacgctgcgggcgacgaaagcggcgctggaggtcgggttggccgtcgacgaagacaaaacggcgcatcaaaagcgattagtcgatttattcgcaaatttgcaaaatagcgaaatctgcgctccataa

SEQ ID NO: 27733 - DNA, 5745 bp, Clostridia bacterium BRH_c25
atgattgatccgatcagatcttatgaagctgtaagagataatttcattctttatgttaaaactgcatttggtacgagatttcaatcaatagaagaagaaagagaaaaattactacataaagataaggtaatgagtcaggaaccttggatagaaccgttgcctaaatataaatcaagcggaaagtctattgatgatgtgacgggcagtgacctacctagtcttacatcaaatgaggtgttaacctttaaggagatggtaaaatgcggactttttagtccggagtttcctctttatagccaccagtataaaatgttaaggaaagctttagaaggatttaattgtgttattacttccggtacaggatctggtaaaacagaatcttttcttttaccactattggcacaattagcaaaggaatatagcagctggagtactgccggaccgatgcacccaaatttgaatgattggtggaaaaataaacagtggaaagatagctgcaaaacaaatggaaggcttacaaaatcgtatagagtttcccaacgtcagcatgagacccggcctgctgctgtaagagccttaatcttatatccggttaatgcattagtagaagatcaattgacccgtttaagaaaagccttagattctgataaagcaagacaatggtttgctgaaaacggtaagggaaaccgtatatatttaggacgctataatggatccacacctgtaccagggcatgagctgaaaagaaatgggaatcctgatacaaataagattaatggattagcagaaaagttaaaggaaatggatgatacatcacaaattgcgagaatgtatgctaatgatccaaacaataatgaccctgacaaacgtgatgttatagccttctttccccaaatggacggagctgagatgagatcaagatgggacatgcaagactcacctccggatattttaattacaaatttctcaatgctaagtattatgcttatgagagaagctgataaagatatatttgagaagacaaggtcgtggattgcttgtgaggatttacctgaatgtaaacgggaagaagcaaagaatactagggtttttcacctgatagttgatgaattgcatctttaccgtggaacagctggagcagaggtggcttatttacttaggttgctacttttgcgtcttggattgcatccagatcatccacagttacgtatacttgcatccagtgcttcattgggggcagacgatcctaaaagtcatgaattcttaagagatttttttggaagcaatacttttgaaattattgaaggtagtcttgctcctatgcctgaagtaaaagaaaataactatttaccatataatccttttagaataattagtgaaaatagtagcaatcttacagatgatgttttttatcaagtacttcaaaatatgggggtagaatatcatggaagtgagccatgtaaagcattactccaaactttagaatcgccggaatttaaagttgatgcgcatatggtatgtgcatgcaatgtagaaggtaaattaagagctgtatcgttaactgactttggtaaaaaaatatttggagatattcctttagacgaaattcataaagctactcagggcttattaattttaagatcactatatgatgagatgggaatgaggacttctcttccatcttttagaatgcatttctttttccggaatattgaagggctttgggcatcaacaaaacccttatcaggatcaacagatggacgtccagttggtccactttatgcgtcttcgaaaataataggtgataaaaatattggtgatgaaaaataccgggttttagaactgctatattgcgagcattgtgggacagtgttttttggaggtagtagactaaataatctggaaaatggtattaccgaaatgctggctacagacccggaaattgaggggattccggatagaagtcctgcaaggtttgtagaaagaagaacatataatgaatttgctgttttctggccgcaaggggagcaggaattcaagacagatgcatctagatggtatcaaccaaggattgatgctcctgaccaaagtagctctaatcatttttcagatcaagctagatgggaagaagcctgccttaataacaggacgggttacatggttttaactcatgagaaatacgatgaggatccagaccaatgggttaagggttatttattttcaattatacctgataatgatgaagatttagagaatcatagggctttaccttgtttatgtccttcatgtgcagctgatcatacgcggcgtttaaggaaatctcctataagggggttccgtacaggttttacgagggtgagtcagatatttacaaaagagttattctaccagcttccagaaatacctcaaagaaagcttgtagttttctccgatagccgtgaagatgctgctcaaatttcaaatggtgtagaaagaagccactattcggatctagtgcgggatatagcaattgatgagctgcaaattcaagcgttgggagagccaagcgtacttgatgatatcgaaaacaacagaaactatagtgattttgcacaaagataccttgagattaatcctaatgcagcggatgagatgcagaatttattagggctaactaaaagttcaatccctcctggcttgcctcctgcatttcaacaagtattggaggctcaggtaaaagaagcaaatgaaaagcttgatagtatacgaaaaagagggagaactagaattgtgtcagtggctacaatactcccccctgttgataacctatcttcttgtggaagattaattgaaagattaataaaactaggtgtaaatccttcaggaaatgaaattaggttacaaaattttaaatgggatgatgtatggcaccactggactggactttttgatttggaaagtaataaatggaagcaagatttaccgcagacgtcacagtttgcgagagacaggattcatgacaggttattaaggtctattgcagaattgtttttcggtaggctatattttggtattgaatcttcagggcttggctggccaacattgactttgcaggatgacttactgcaaatatatgcatcaagttccggcgtacatgttgatatatttagacagatttgtgactcttttataaggattttaggagataaataccggtatgaaccttctgaacatattcctattgattaccctgattatagtagtctgactgctccattaaaaaggtatatccgtgctataaccagtaaatataatattgatgaagaaacacttggacagaatgtcatccaagcgctacaaaacggaggtcatagtggtgcgaaaattaatacaagattattgcacgtacatgtatcccaagcagatgatacagtatggacttgtccaatttgttcgcggtaccatctccatgcctcaactggaatctgtacaaactgttgtacagatttaaatcctgatccagatgagatctgtagggagatatggaatcagaattatattgctaagcctgcttctgaaaagcgtaagccaatccggttgcattgtgaagaattaacggctcaatccgatgaccaagcggaaagacagagacactttagaggcatgatagttaattttaatggccaacaaagggtgtatcaccgcattgtagatgagatagatgtcttaagtgtcacaacaacaatggaagtgggcgttgatattggtagtttgcaggcagttatgatggctaatatgccgcccatgaggtttaactatcaacaaagggtaggacgtgcagggagaagagggcaggcctttgcttttgttctcacattatgtagaggccgtagccatgatgaatactacttcgcaaacccagaaaagataacaggtgatccacctccagtcccatttatcactatggggcagtctaggattgttaaacggcttttagcaaaggagtgtttacgtagagctttctggagtgccggtgtaaggtggtgggatagccctgttcccccagatagccatggagaatttggccttgcagtggacccagataatcaacgtgggtgggtgcaaaacgaaaattccgtagttccatggcttaatagtcaaaaaagtgaccaagctgaaataataagggcacttataaataaggatgatgatagcttacttgactgggtttcgaatgaactccccgcgcttatttctagttctgtgaataaaccagagctttctggtgacggtttggcagagagactagcggaaggtgcaatattaccaatgtatggaatgccttcaagaacaagaaacctgtaccattatgccaaagggcaagtaataaaagctattgatagggatttggagctgtctattacggagtttgctcctggagcacagaagacaaaagacaaagcaattcatacttcaataggttttacccctccattggtaaaccacgggtatagatggatgcctgcaacaaataatccacttccgtatagaagatggatgcaacgatgtaaaagatgtaacaatattgacacaagtgaccttccattaactgataaaagttgtacatactgtgggcaaccggaagatgaagaccgtaatttttttcaatttgaaattgctgtaccgcaggcttataggacagatttttctccaggtgaagatgccaaggaggatacagatattttaaccggtgcgccctcactacttgcagaatcaaacacggctataatagagtcaaaacaagttgggaattgtgacttatcagtttcggataatgggcgtgtatggcggataaatgataatgctggcaggctgtttgaaggatcaataattacttatgatggaatggaacaccagtggatttcatcaaaatatgggggaagtccaattgaaagtatagctttggcggcaggaaaaacaaccgaagtgttacgtctgcaaccagccagtattccttttggcttgaacattgatccactatactcctatggtgcagtcaatggtgcagttaaaggagctatatattctgcagcttttttactgagacgtgtacttgcaagtgaacttgatatagatcctgacgagattgagattgcaaatttcacacggaaaggggatactggtgagttagcgtatgctgatattgttatgagtgatagattgccaaatggggcaggtttcgtaaagtacctttatgacaactttgaaagaattatcaaagaaacttgtgaaccagtaccaggctcaaagacatatgctgaaacaattatatctcctgctcaccggtcatgtgattctgcctgttatgattgcctaaaagtttaccgcaatatgacttaccatggtttgttggattggagattagcaatctcttatttacggatcttatcagatgcaagttatttatctggggtagatggtaactttgattatcctgagttagataattggatggatactgcagtaatattaagagataattttatttcatattttgatagttatcagccaaaaacatggggcgtcctgcctggatttaaagctggtagaaggcagtatattattgtacatccattatgggatagaaataatccacaaggtattttagcaaaggcaattgcagcaatggatgctgagccgggctttatagatacatttaacttgctgcgtaggccagggtggtgccataggaatcaactgaggtga

SEQ ID NO: 27734 - DNA, 1137 bp, Clostridia bacterium BRH_c25
atggcgatttcacttttttcttttttttctggtacaggattattggatctcggttttgaggataatgatttagattatgatatagtttttgtaaatgaatataagcaggcatttttagatgcatacatgttttctcgtcaaaatcataatattgggctacctagatacggatatcattgttgtaatattaatgattttttaaacatcaatctagctggtatactgcaaggctatttgcaggaacaacgtaacctgaataatattaccggatttattggtggacctccatgtcctgatttttcagtaggtggtaagaatcttggtaggaatggtgaaaatggtatactagcacacagctatgttaatctgattattgcacagcggcccgatttttttatttttgagaatgtccgtgggctagtaaaaaccgcaaaacatagggagtattttgatgaactaaaacttgctttacgtaatgctggatatgttatttctgatattcttctaaactcattgagttttggggttccccaagacagagatagagttataatgataggggttttaaacaaccagggactggatttacctataaatgatgatggagttttggatttcccttggcttcaatatgctatggccggcgccgatgctgatgttattaaacaattaccttggccgacagaacaaccatatgaagaaaatagccgaagagattttcaatatcatgttcaagagaaccttacagtacaatattggtttaccaaaaataatgttagaaatcatccaaatagtggagatatttttcaggtaagggcgggaagaacaaagatgttgcagattccagagggagatacaagccgtaaatcatttaaaaggctacacaggtggagatattctccgactgctgcatatggaaataatgaagttcatttacatccgtatgagacaagacggttaagtgtatctgaggctatggcgatacaatcgctaccagcatggttttgtctaccagaacacatgacattaactgataaatttaaagtaattggtaatggtgtaccatatcttatggctttggggattgcacgggcagtaaatgaatttctaaatcaaatatttgatgaggtgaactaa

SEQ ID NO: 27735 - DNA, 2028 bp, Clostridia bacterium BRH_c25
atggactaccttgattggaataggcttatttcccagcattttttcaatgaggagatggctggacgtgatgtgattctatatgtggacagttctctacttgacaaattaggggaaagctatggtgtcggtgttgaagattttattgaagcggttgttgatggaccaagtcaggcttatgaaaaaggattcagcaataaggcattatgggcattaggaagaagcagggtcggtggtagttgtagaaatggatatcctttatatattgcttacctagctttttttgtttttgctgtagatactgaaggagatttttctgaccatgcatactatccgagacttaatacccttttgggaaagtatggagagaaagtacagccagggtcttttatggaattggatgaattatggtttgacttacaaatatggagcatagaaataaaaaatgaaaagcttggaaggtttacaacaaaaccagtgggatcgtggcggcatgtcggcttacctatttcacaaacattgcttacttccgaggaacgcgaaaagctacccatattctttattcaaaatggttttgatccgatgttattaccagattataacacgctttcaaagaccatttgtgagtctccatattttaagaaccgtacaaaaaagttaattttatctgatgataatgagcataaacatttgatggttgccttgcttgtacttgtccagactgctcttgttgaatgggatggagttgcaccagatattgaagacagtgatattcaacaaaatggatggataaattcaatgttgaggttgtgtatagagctagacaattttgccatgctgataaaagcgtcagtgaggtttaaatcaaactgtgaattccctgatgatgaatttgagtttataagacaaagagatgcgagcttatggaagagtaagggctctatacgtaattggagtaaagctcttgtgggttattaccaaaaaaatactactgatgcaactttactatgctggagcgaagaggaagtttttattgataatcaactaagatggagggtaaagttaaagccttcactagtacgtatatttatttctggaaaatatgaaggtttgaacggttggatagaaataaataggatcgagcctggcatagattgtttaatagcgtgtcacgaatctcatgccgagagtattactagttggggaatgaattcatgtgccgggttttcaaatttagattatgagggaatacctcctctatggagactgtatatggtgaaaaatattagaaagcctcaccctgaaatagatacactaaaatttccgttatcatattcgatccggtttgaaggtggtgtcaagtcaggtaaagggaactcctattttagacttgctccgccaagaatctgtattgatggcattcacggtaatgaaactgttgcagtaaatagcgggaaaattacaaatcacctggataacatctggcttttaccagaaaatgttgaagtcaattccccccttaaaattgagcttttcgatggtagtacttgcgtgatgtcacgcattttaatacttgaagagggctgtatgggttctaggtacagttcacctattagagacaaatatggtgatattacaacacagcagcagattttttcggtatcaggggcaaatgtatttggcgtaagcttaaaatatataccggcatataaagagcatccaccaacatatatgtcacataggattatttttattggtaatcatcccgacctttactgtgaatggcctgatgaaaatttgccagataactgggatgcagtttgggccattgcgaaagttaagcgggatagatggaaagcatattttgtgggtagagacctatcccaatgtaccttaaccgaaattaataaatcgtggcctctttggaaaaagtggaagaaggtattagtgaatttgagtattgaacctcccaaaatccaaaaactttatgatttatggaagatatacaaaaagggggcacaaaaactatga

SEQ ID NO: 27736 - DNA, 5916 bp, Collimonas pratensis
atgcttgatccaataggcggctttggtcgcatcagagatttttttatctcctacgtcgagactagtttccgtatttctgaccctgacgtaagcaagatacgtcgcaaattacttgaatcttacgatactttggctacggagccgtttctcgaaccagtgctgcggtacacggggcatcctaagttgctagaggatttagcaatggatgacaatggccctctcgggaatctatcaattgccggaagacgggcattcgtcgaactagctttgtcaggattatttgatggagacattgctgattcagagattaaacgaaaatcgcgttacgctccatatcaacatcagatatctatgcttgagcgcgggattaagccaggtcatcctggtatcgtcacttctggcacgggttctggaaagaccgaaagttttatgttgcccattctagcggcaatcgcgaatgaggcagtgcagtggaaaaagccggatgcatcatttttacaaaaccggtggtgggaaagcgatgatgcgtcttggcgagctatgcgccaaggtgagaggcgtccggcggcaatgcgagcattgattctctatccaatgaatgcattggttgaggatcaaatggtccgattgcgaaaaacgcttgattcagaagaagcgcgaacggtcatggacgaacgatttgacggcaatcgcgtctttttcgcgcaatataccagcgcgactccggtcactggttatgagactcacccacggatggccgatgacacggacgagaaaaagcgccgctctcgagggctacgcaagctgcgctccgccctcaagcgggccgagcaagatcaacaggccgcgcgtaagcatgatgcaaacgctgctgccgaagcagctttatctggagaaaaaataccagacttaactcgctacatttttccctccatggatggcggcgaaatgctatctcggtgggacatccaagctgcacctcccgatctaatggtaaccaatgcttcgatgttgggagcaatgttgtccagggaagtagaggaaaagatctttgacaccactagaaattggcttatctcgaatgacgacgcatatttctatttggtatttgatgagcttcacctaattcgaggttcggctggtacagagattgcgtttctgatcaagacattaattcaacgtcttggcttagatcagccgcagcatcgatataagttacgtattctcgcttcatctgcgtcgttgccaatgattggtgacgacggcgagcaatctcgtacctacttgcgagatctatttgcgccatttggaaccagtaagacagcaaacgatcctggctcaacggattcgactttttggaaaggctgtgttgttgaaggtgttccaagtattccaatatggaaccttgaggccatcgatccggctccgttcgttaagctaatgcagatagcgcttgctggcggtgcggactttgttgctaagatgaagttttctgatgagctacttcttgccgtgaaatctgcggcgtctgcactagggattgctggccaatcagaagaagacactgtaaaaaatctcgcagaggcggctgcagctgctatgacgagtggatgtagagatggtaagggggttcgcgcgacacgtctcactgaagtagctaatcgaatatttgcagacggcggccctgatcatgaactggccctgcgaggtttaatgctcgctcgggctttgccggaatcggggttatgggataagaatcgagctggagtcgcacttaccactccagcatttagagttcatacgttcattcgaaatatcgagggtctgtttgctgctcccagcccaaccgcagacggagtcgaatttagcaacctcactattgagcgcgggctttctcatgcccgtccagacgctaacacaaagcgcgggaagcgcttgttcgaacttttgtattgcgaggcatgcggagacttgttgattggtggccagcggggggataaaactttaactgcgacggcgactgaattgctcccatcttctggcaaccttgagaatcttcctgaaggtgcagctaatgaatactatgattcaatgaagctagaagagtttgcagtattttggccacgtaggaccccacccttattacctgagcgcgactacgatgactggcagctggcccatttggatccacattcaggagtagtattcacccgactcgatgccgaggtaccagacgggcatgtaggtggccatttgtaccgtcagaaagagaatgcagttagaaatgtaaaaggccgtgttactggtccgcgttctgcacagcctttctgctgccctaaatgcggcactgattattcaaggcggccagtcactaaccgatcacgatcacctattcgcgcttttcgcaccggtgttagtaaagcatctcagctagtggcgaccgagctcttcgaactgttgcttgctataggtgcggaacctaaggggatctgtttctctgacagtcggcaagatgccgcgaatcaagcgctcgagattgaaaacatgcatttacttgacgtgcgtcgcgagatcctcgtggccacggcccggtcttatgtagctaagcaacgcgctgagtggattagcccagaggaatttgaaaaacaaactacggcgctaatgaatgaaaaaaaattcgctgaagttgcggcatatggagctcgctacaatgcgcaagggtcggagggggaaaagcctcccgctgagggacgtattgttccgctcgcaaaacttttacaacataaggaaggccatggccatgttggtgaattggttgctgagttcgttcgtatgggcgtccatccgtttgacaaagctgggcggcagaaatttcgcggccacgaatggcatgaattgttcgtgcctgcagggacgaatggcaacgatatagcgtaccacgaggaactgaccggagcggaccgtttaaatttggccggattgattttgagtcagcaatatgagttggtcgatgatgtaatttttgcgaacactttttttgcgttggaagaaactgggctcgcgtatccatgtgtatctgatcgcgatattgctgggaaggacgaacttgacgcctggttacgcgtattcgctggcgcgtatcgaattcgcgacaatcagtactttgatgaggatgccaagaaagaatgggttctaggctttgacatcactaacaatcgagttaaaaaggttgcgcagaaggtattcggggacacttccgttgttgagaaattgagctcagtcctcggccgcttatccgcgattggacataaaagcggctggtttgatatcggcaatctgcatttgcgtgttgctgaagggggagatccatattggcgctgtaagacttgtgaacgagtccatatgcattatgggatacgtcattgcacacgctgtggagatccattggccctcggagcaagtggtaaagttgaagatctgtggcaagagaattttcttggcaagcgaattgtgcgaggagccaaggatgaggtgccgcgattccgtctccgcgttgaagagcttaccggtcagacagataacttttccgataggctgagaaaatttaagggaatttttgtcgatggacagagtgagacgaagaagcgagctactgaaatcgacatgctatcagttacaacgactatggaggttggtattgatattggctcgctgcaaagtgtgtaccaggccaatatgccgccacagcgattcaactaccaacaacgtgttggtcgagccgggcgacgcgggcaagctttttctttcgtagcgactttttgtcgcggacgaacccacgacgcatactattttgcacaccccaaggcgattactggagatgctccacctccgccatttcttgcaataaatcacgagccgattccgctgagactattgcgcaaatcttggctgcgcgcggcatttaaaatgctgcggcaggagtgccaccaaaacagcaagccatatcctggtgatctgttgctgcctcctgatattcatggcgagtacgttactatggcggactattatttcgacgatgcggcgggttggcctcaacgccttcgagatgcgctgcactcaactatatctgtgcgagatgaatttttgcaggctgcaacgttcagcgtcgatcagcaaacagcgctagcgacgcatgcaactgtggagcagctgatgtcggaaattaatggtcttaaaccaaatgaaccaaccggtaccggattcgggttggcgcgctttctcgccgagcagggactactgccgatgtatggcatgccgacccgggttcgaaatctctacttgggccttcgagaagatgacggtaaaggcagcgacgaatatgaatggtcgacgataagccgtgatttggacctggccgtcttcgagtttgctcccggctctgtgctcgttaaggataaacaaaagcataaggtgataggttttaccggaaatctttccgatccggtgaagcgcgcgggaggtatcgcggtccaagcggtatcagactggtgggagtctgaaacatttgtcgccatatgtgatgcctgtggctctgcgaagcactatgaaacattgccgacaacagagcttgagtgcgatgactgtcgtgaacaaatttcgatagcgaacttcgcagaatataaaacgccgacggctttccggacagattttaatcctcaagacagcggtgatgtagtcgggcgcatgaatcaacgtactgttgccacagtactgaaagtaggtgagccaattgtgcatcgaaacattgttgtgcggcgcggggccggagccacaattatgcaacttaatgatggggtagctaattcagacgaggttgctcagcaatttagagtcgatgaggtgtctgatttacgattgcctttgccaggagcatctaaatggctcaaattgacgcgatcacaagcgatcgaaacgagcattcgtgaaaaatctcaggcgagtcgatgggagcttaatggaaatttgggtatgaagttcggattaatctctcgaaaaaaaacggatgctgtttatttagaattgagaaaatttgacagccgtttaaatctgaatcatgttgctcgtaaaggggaattcttcaatatagcaactcgtgccgccgctgttagtgccacccaaattctagtgcaaaaagcagcactcatgcttgacgtatctgctgaggaatttgaggcactcgagcctcgccttcgcggtggtttgcctatgctgcagatagcagactcattagtcaacggatctggtttgtgcaaacgcctcggtgatccggacgtgtcggggggcgtgccatatattgccaagttgcttgaggaaatcttggaaaatgaaattgtatggcctttacaagatttccttggcacagatggcgacggtgcgcatgcggagcaatgtaagacgtcttgctatcgttgtattcaacgatttggcaatcgtcgatatcatgggctgcttgattggcgcctcggaattgcctacttgagggctatgattcaggataactattcagctggcattgatacaaatgacaggaatttcccagaaatagctgaatggcatgaatatgcgcatagtttggcagagtcagttgttgcaatgcgtccgggaacgatgagctacgttgttctcgcagcttcaaaattaccctgcatcattgcacggtctctggcaggagatgagttgttccgcaccgtcgtggttcatcctctatggaggaaagacgaatcagtgatgtccaagatcttgggtactgattgggcgaatgggctcacttttaccgacaccttcaacttagaaagacggcctctgcgaactctcgcggagatgcataacaagcaggcaaatatagaaagcaaataa

SEQ ID NO: 27737 - DNA, 1140 bp, Collimonas pratensis
atgcgtgttgtggatcttttcgccggatgcggcgggttgagtaagggatttgagcaagcgggctttgagcttacgctggcagtagagcattgggctcctgcgcgggaagtctacaaggccaactttgatcacatcgttaaagacctggacttagggcgggtaactgacgccactcgcctaattcgtcctgagaggccagatctgattatgggtggcccaccctgtcaggaattttcggttgcaggcggtcgcgttgaaagtgatcgagccgaactgacactgaagtttgcgaaaatcataagcgcagtgcgaccgcgctggttcatgctggaaaacgtaccaggtgctcgcaaaagtgtcgcttggcagtcaggacgtagtgttttggaaaaagccggttatggtattactgagtgcattctcaacgcagcgtacttcggggcaccgcaaaataggaagcgtttttttgccattggctgcataggcgaagaacatgacttcctgtttgatgaaattcaaatggggagttcagaaaatcccctgtctatacgcaactttgtcggcgatgaatttggcatcgatttttactatagacatccaaggaattgggggcgtcgaggagtgttttcgctagacgagccttctccgactattcgatcaacgaaccggcccgttccaccaggttataaaccacaccctgacgacgctggtccatgcaaagaagctcggccactatcttcgtgggagcgagcaagaattcaaacctttcctgagaattttcagttttccggaacaatgactaatcagagtacgatgattgccaatgccgtgccagcctccttggcagagcatgtggcggccgcaatatcccgttatgaggagcagcgttctatgttcagcgacccaaattttcgtgagtggttatcttctactcaagagtacacccctcgcaccatcagcaacgtaatttcgagaattaatcgtgcttcgcgcatcttgcatgcccgccaactctctaatgatccgttggatataattcacgctctcgaacgtaaaggcgagttcgccgaactatcatccagcgtgcgttcgcaaattaaaaaagctattcgtttacgcgcagagtttcaagggcgttga

SEQ ID NO: 27738 - DNA, 2583 bp, Collimonas pratensis
atgagaattactgagccgccaagcactttggacggatgggaaaggcttctcgttaaatacttcctggcagtaggaggagacggggattccagtgatttgcatgctttcgaggtgtctaccggaacacttgcaattgcatgtggtcttgacactcaggaaatcgaagttgaaaaagcatttcacgaggtgctggttaaggatccatcattggagaacgttctccaagttggtgcccatcctagagcagcgtcggaggtgcctggtttttttgtctatttagtactgactttattcatcgatggtctcttggatgagcaccaaagcatcagtggtgcatttaggaaaaaactagcgtcctggcttgggatagatcgtagctttaatgaccttcaaggcatagctactatgtggaaggctcttgaggcgtggctggcgcaacgcgtggccgcaggtgaaccatttcgccgcttggttctgccagatccaggaggatggcaccaaatcggtcatacgcggcgcctttcctttcccactcgccatgactttcggatagttgagaattttgtttcggaaaacagtattggtttagatagcccgacggcgttatttatcgcctttcaaccattggtcaatgatgtatcggatgggttgaaagatgcatttgaagatttccgacgttcttattacttgcatcgccgggccctcgcggatcatcgcttctggcgcctaattacccgtgtacgaagctctgcaaataacgaaccgcgtcagcaagctattctccaaatgacgttcaatgactacggagagtctgagtttcgacgatctatatatcaaagctccgaaatgcaaagctatgtcactttgggagctgcgcttgcggacactggtatcgcatccagttcgaactttgtgaccgcaattaatcagggttatctatttttccgtcagatcggcatggggctttggcaagccgaggccaatttgacgcgctgcaatgagcgtgtattcgttgcactctcgaccaaaattcaaagcgtgatgggcatgcgtttgggatctctattgggtgactcaacctggcgaatgacgacggaagccaagtcaattaatgcagtggaaacagcattcgctcaagtacgccttctcgttgacgctggcgattcaatttttcggcccactgtattcaacggaatccgtgtctatgggcgatggctgggattacctggcttcctaccttcgattgagacggactcaagtcagattacgctagcagctgaggtcaatgacgcacctgttattgattgcaatggtgtgggtaacattgtgcggcttgttgccgaagaacctttgaacgggacctatagcgttgaacccgagctgcgtcgcggcgagtatttctcaccttggcgattacgacttcaatttatttcacatgctttgcctcattcctcgctaagtcgcactcgtcagagattgcaacagttgaaagattgggatggagttgtgaaggtatccgctaaatacgatgctgatgagagtcctgttcgcgagtttggaagctcagcgatgaaatggctattggaggccgtatacgctgatggttgttctggatgggacgaggcagacttggttagccttgtgcgacgtactgctgtggatttcgaggctgacccgtggatgatgttgcatctccttcaggacgcggggattattgagcctcgactccggcagggatggaaaggccgagtatggacactggtaccacctcatattgtgcgagcacacaggggcgaaaatgaggtggccttggtggaaggtgccttgtgcttcaggcaaattgaggacttcaatttagcggtagaaggtcttggtggaagtatgtttaggcatcaagatgacacccgatggtcggcaccagtaatcggagcgagtaacttatcgtcagcaattttagctgagcgactagggtggcctctcgccttggaagtagattcagcaagcaagtcaccgcttgctcttgctagcactgagcggcaagcggagtattaccgcatttcttcagtttggtgctggaacgcaaagcgattcgtgtcttccggggcggtagaagatagtgtccgattgactagacgatcgcaccgaaatggcacggaccatgacgtcttttgcgttgagcatattggctgctcttttaattacttatcgaggtgcgctgcgattactcatgcacatgccttagccaaggtccctctatttagatttcatgacgatcgcatcgagcgcattgcgcaagatggcgctctaccggacatccttgcttcggctctgcgtagacggcgactccgtgccgctggaatgacaggtggggtttattcatatccggcaacggaatctgatgctcgttggattctgtcactacttccgggctgtatagccggaataaaagtcggcgaatcgcagtcagcgggttccattatggctgctgttcgtaggtccaaaggaagattgcgagcaggctggaaagataatcagttagtcatacaaatgaataaatcaacgagaggttttaatggtagctag

SEQ ID NO: 27739 - DNA, 2088 bp, Collimonas pratensis
atggtagctagctctggccgaccatggtatgccgggcactgtgtaagccggcatgagcatgacaaattagtgaatatagaggtcattgctcgtttggatgaaaccgggtggataccgctcgagaacgcgcgacacctatttggaggagtccaagaagtcgaactgcattgcagccatgccaagacaatcaagatcggcgaatgggagatgtttcagctatccaaaaaagggaagaaattttggattgttggtgaacataaaaaactccatcactttgctgacttgtcgaatctaggcaacgcttcgcagatccaacgatatatagcatctaatgaattgaaaacaacagaggcctctggtagctggattttgcgatcgcgggacaccgagatcttgcaggttgaactgaggcagatacaaggtgttggacacctcgctactgcttctggaaagattcctgcatttccttttgatcctgactgcatcgctcgcattcctcttggcgggaaagaaattgaactatacgaatttcgtcatagaggagatccaactgcaatctacgattggtcctctgacgaggcttatgcggcgcgcgttatacgatctatcgcgaatgcgtccgatcctcgggtaaaggctacgattggttggctcgaagagcacgggaggacgaagcaatctttagagtcgctcgatgcagtagatattgctgcggccaatgatgcacttcgatctgacaagcttgcaaagcgcctttcctccgaccaggcgctgctgtcttcgctcgtgaacgcaatgattaatgattctcgaatcttaggcttgatcaaatccaaaaccgatctgattgccgaagaggagcgcaccgcgttgcgaattcgcgccgaaacattgttgcaagaggagttgataaccctgcggcaagagcgaatagcgtcactggatttagagatagaatctttacgccttgatcgcataaagaaaatcgatgatagatatgctgagttagagcgtgatctagccgcgcgaaaagaaaacggtttgatagaaattaatcgagaccttggtgacttggtgatcgctctccagttacaagctgacgagttcacagatcgacgtagccgcgtgaaggatgagctcgttgagctagaccaaaaatccgatacgctcaatggccaactccagctacttcgtgatcaagaacgagatgtattaataaatattgataggctagtcgcaattacgagcctcgcgaagtcacaggtaaatactgctagtgaaaaaattttggcacttcattctccgctggagcgaggtgtaccattaatgtctagtgacgttaaagagtttgttgagagttcgcagcttctttcggaaaaaggtaaggaaatcatgctgcaattccttgcacttctgctggcaggtgaagtgcccgttttaacagggccggatgttgacgattttctgttagttgcagaatccatgttcgcgaacggtacatcaacgcgacttgaaggcgatccgacaattatcaactttgaagatttatggctacgccccggtacaaacgttcaaacagcgttgggcgttgctctcactggcacgaattcagacgaaattgacgagtcgaccaggctggtggtgattaaccgagcagaacgctccggcgcgcgattttggtttcctgcacttgctgcacatgcgcgccgcggtgagttatctagaaggttactagcgtgcgttacgattcaagatacagaaagcgaagaagcagaagcggtcctcagtgatgctacacggcttgacattcgccatgcattaaccgcagaagctgcaattgttgcgattgcctcggggatcgagttgaggcgtgacttggatcctgccgagcgaccaacagaccttgccgaagcagttcctgttcttgcgccacatcttcagcgactaacttttgcgagggctcagcgcgctgcgcgggcaatagtcgaggcgaagaatctcggtataccaacacagccattggttgaactttttatagtcgcgtctggcaccaccaacatcgctgtcgtagctcaacttaggagctaa

SEQ ID NO: 27740 - DNA, 5430 bp, Dermacoccus nishinomiyaensis
atgaccgacagcagcaggcatcttgacgccatccagacgttcgagcatctccgtgacgcctacttccgctactacgacacgcccttcggtctcgccgacgagcgccttcaagccgagcgtcgcgcgctcctggaccgcgacggcggcgcctaccgcaaaccccttctcgagctgaggcccgagtacgaaagctccggccgcagcctcgccgaatccgccgccgcagcgggcgcagacccagatctggcggacttcatcagcacaggcctgctaccgggagtcccctcgctataccggcaccaggaagaagccctcaccgcgggagtccagccaggtcagcacatggtcatcaccgccggaaccggctccggtaagaccgagtcattcctcatgccggtcctgtcctcactgctgagcgaatcccggacctggaccggacacggggcgtcaccagacgactggtggacttcggaaggcaatccataccaccctcagcgcgacggggaaaccggccgcgaagccgctgtgcgcaccatcgtcctctacccgatgaacgccctcgtcgacgatcagctcatccgcctgcgccgcgccctcgacaacgatgacatccgcgcatggctggacgccaaccgcaacgggcaccggttctacttcggccggtacaccggtgccacccccgttactggcattcgcagcaacaacctcgctctcggcgaactacgccgctacctgcgacagacggaccagcgcggcacccgcgcacggcagatcgccacgcagaaggccgatgaggatctccggtacttcgtgccgcgactcgacggcgccgagatgcgctcacgctgggacatgctcgactacccgcccgacatcctcatcacgaactactccatgctcaacgtgatgctgctacgcgaacgcgacggccacttcttcgactccacaaggcgatggctcgacaaccccgccaacgtcttcaccctcgtcgttgacgagctgcacacataccgcggaaccgcaggcactgaagtggcctacctcttgcgcacgctcaagcgccgcctcggcctcgacgcgcgaccagagcagttccgcgtcctcgcggcatccgcatcactcgactctgaacgcgacagcgactacctgcaccagttcttcgacgtcgaccagggaacgttctccttcatcactggctccagcatcacgccggccgagtaccaggtccctcccgctgccgatcccgccgacctcgcgaccgccgacgcagtaaccgctgcggcggacggacgagccggcggcgtggtgaatgcccttcggggcgcacttcacggcaacggaaccggcggggcgaaaacactcacccagatcgcccaggaagtcttccccgccacgccagacgaactctctgagcaggcaattgccaacgtcctcgccgggcttgcccaagaccctcagacgggcgacccgaagctccgtgcccacctattcttccgaaacgtcgtcggcatgtgggcatgctgcgacccctcatgcagcgccgtcaccgacccgcaggccgcgcgtaccgtcggaaagctatacgccgagccagctacccgctgcgaatgcggagcacgggtactcgagctgctgtactgccagaactgcggcgatgtcctcctcggcggcttcgccccggaaggggaactgcagaagcaagctgttaagacgatgctgctggctgacgtacccgagctcgccaagctgcccgaccaggtcactttgcagcgcactccagataactacctcgtctactggccccgccctaaaaccacgctgacgaacctcgattcagccacctggaatcgcgacaatagcgcagtctcctacgccttccgcccaagcaagctcaaccctgcctccggtgaaatcagcaacattgccgaaggattcaccggatggagtttccacgcccgcatcgcccgcaacaacgccaccggagagttgcgccgcgctcccgagacagtcagcccattcccgacgcaatgcccgaattgcggcgatgactgggagatccagtacggccgcaacgggaggcttccggccaccgatcccgctacgcagcgctcgcccatccgacagatgcgcaccggtttcgaaaagatcaaccaggtgctcaccacggagctcgccaatgaccttcgagacgccgaccgtaagctaatcgtcttcaccgacagcaggcaggacgccgcaaagctttccgccggactcggcctgcgtcattatcaggacctgctgcgccagctgctctacgcgcgcctcgccggttctggcagcgccgtgctagatcttgttcttgccgagggccacgtggtccgcaacgagaagaccgtcgagtctttcgcagctcttgcccgcctcaggcagcgcaacgccccgcttctcgatgaactccgggacatctgggacggcaagcccgagaccggtccgggcgacgccgaacgcttgaaagcagcgctttccgcgccgccttctcttcgggaacttgccgccgaagtatccgccgatcttctgggcctcggaatgaaccccggaggacctcatgcgcgcctccgcgaaacctctgaagaccatgcagtgacatggagcgagctctacgattggcgtctcacgccgccagcgccgaagccaggcctcacggacccgcagaggtcactcctcaacgacatcggccgctccctcgaggaagagctccttgaaggactgttctccggcggaggacgcgacttcgaatccctcggcctcggctggctcgcactagcctccgacaccgcacccgccgatgcgccggctgacccggccaccggacaagcgagagcagcgctgcgtatcttggctgaccagcgccggttcttcggtctccgaggtgcacgggacgacccgacccccaaactccggaagttctgggcagacgtggccagcgcggagcgctcaacggcagatagcctacgagacgatgccctgaacagagccgggagtgcagtcgtcgaatacttgatcgacccctcggccgtggtcttgcgaatgggggaggggcgcgcctggacctgcacgagatgcagccgtcagcatctgactactggcaatggttactgcaccaagtgcgcgaaaccgctacctgctgatactgtccccgttgatctcgaccaggactactacgcgtggaaagcaacccgcgacgatggcagattccgtctcaataccgcagagctaaccggccagaccgaccgcatcgacgcgcagtcccgccaatcacgcttccaggatgttttcctgggctcaggagaaaacgagctcaccgacgctatcgacgtcctttcggttacgacaacgatggaggccggagtagacataggtgcgctctccgcagtggttctcggcaacatgcctccgacccgattcaactatcagcagcgtgtcggacgtgcagggcgacgtaactcaccggtcgcggtcgcgctaaccgtatgccgcggccgcagtcatgacgagtactacttcgaacgcccagaccgcatcacgaatgagcccacgccgaagccctacctcgctctgaaccgaccggagatcttcacgcgatcacttcggagcgaggtccttcgccaagcattctcggagctcatctccgcgaccgacggcgaagacgccagcagcaacgtgcacggcgcattcggcaagaccagcgactggcacactttcctccggcccaggctcgaggggtggttggcggaccacccaggcgtcgtgcgggaaaccgctcgctcgctcgcccgcagcacagcattccaaggcactgcggacgaggaggcggaacggtgcataagcgcactcctcgacgacatcgatcactcggtcctcgcccaacgccacgatgacctcagccagcagctggctgaagacggactcctccccatgttcggattccccacctcggtcaggtacctctacctaaagcgtcctcagcgctcctacccgtggcctccagcaggagtcattgaccgcgacctcagcatggcagtcagccagttcgcccccatgagtgaagtcgtccgcgacgggaccgtctatccggtcgtcggcgtcaccgcattcaagccatctggaccacgaccccagccggaacccgaaccgcttggtatcgagtcgcctctctccatctgtcgcgcttgctcctacctcggcgagcaacaagacctaggtacctgcccaagatgcggtgccggccctaccttctatacgaccgtgcctctacgggaaccgctcgggttccgcagcggaaccggcacagacttcgacggcaacttctcgtggagcccccgcgcgatggccgcgcgggcaatgacagatatggatgccctcgcccgccaagcccctggaaactccctgatactctccggacctggctcccggtacgtcatcaacgacaacggcgggcagctctttactctccgccgtgcggctcccggcggtcctgaatggggcggctacgtctcaacccgtgccatcgatgcggggctgctccatccgtcgtttgccactggagatccgatcagcgtcgccctcggcgccatccagcacaccgacttcctcttcgcaggggctggtgcaccaacgaatctcgacaccgggctccgcctcaacctcgtctccggaatccgccagccctacggcgcgcaggaagttactgacagtcgacgcgccgcgtggtactcgctcgcattcctcctgcgcactgttgcctctgcggcgctcgatatccagcctctcgaacttgccgcgggcatctactccggcgttaccggaagcgaacccgccacgtacgcgttcctagccgacaccctagagaacggcgcagggttcagcacccagcttggctcacgccggttcctccctgaattcctcgatgcggtcgtcagctacctagccgagctggaagacccgtcgcataccaaggtctgcagctcatcgtgctaccgctgccttcgggactacggaaacatggcctatcacgccctgctcgattggcggcttgccagggacctgttccggctcctacaggggctgccgctaaccatcgacgacgcggcagaaaccgccgccatcgaccgctgggcacacgcctacaacgctgcaccaattagcagcgaggtcccagccgcacgatacgatagccctagcgtcggctcattcgcggtaatcgcccgccaccctttcgaagcctccgaggacacgctcatcgcccctcgtcttgccgaagcaatggccgagatcgaagcctccgaagaagacctggacggcgtggttttcgtcgactccttcaccctcgaccgcgatccgcgccgcgttctcaaactcatctccgactccgaactggcaggtgcgtaa

SEQ ID NO: 27741 - DNA, 996 bp, Dermacoccus nishinomiyaensis
atgacgagtgcgcccgaactgagtgtcctggagatctgcgcaggtgccggagggcagtcgtctggcctggagatggccgggttcggtcactcgcttgccgttgagatcgaccgcgatgcagcggctacgctccgcctgaaccggccagagtgggacgtgcacgagggcgacgtccgcgacatcaacggccgcgactacaaaggcatcgatctgctgtccgggggagtgccctgcccgccgttctccatcgccggcaagcagcttggcgccgacgacgagcgcgacctgttcccggaagccatccggctcgtccgtgaagcacgcccgaccgctgtcatgctggagaacgtcaagggcctcgcttccgtgcgcttcgcgccgtaccggcagtccatcctggacgcgctcgacgagatgggctatgacgcagactggcagctgttcaactccagcgagttcggcgtcccgcagctgcggccccggttcattctcgtagcgatgaagcgccgcaacttccgcaagttcacttggccccgcgcggtcggcaccccgcccacggtcggccgcgtcctcgcccccctcatgggctcccgcggctgggaaggcgccgccgaatgggccaagcgcgcgaacaacatcgcgcccacgctggtcggcggttccaagaagcacggcggcgctgatctcggccccacccgtgcgaagcaggcatggctgcagctcggcgtcgacggcaagggcatcgctgacgaggcacctgcaccggacgcaccgctggactacgtgccgcggctgacgaacgacatggccgcacgcatccagggcttcgactcggaatggcacttctccggccgcaagacgtcggtgtatcgccagatcgcaaatgcgttcccgccgcctgtggccaaggcgatcggagagtcaatcgccgaggcgatgggcgctgtcgtgtctcgtacaacgcgcaccggcaccagcctccgcgccgtcagctaa

SEQ ID NO: 27742 - DNA, 2052 bp, Dermacoccus nishinomiyaensis
atggcgggagggtacgaggattggcagagggtgctttctgccgccttcctcatcccgcaccagggcccaactgtgctgttcctcgatgacggcgcgcttgcccgcttccgcccagaggcggagaacgcgggcgacgacctcgccgaggcggtgcgcagcaggctcaggctcggcgatggtcggtccatgttcgcgcctatcatggcttctttccggcagtggcagcgcagctcgcgacttgacccaccgccggtgctgccagtgatcgcccttaccgtcctcgcagcgaccaggatgcgatcggacgcggatgcgcgctctactaactactatctccggctcgcgcaagcactctgcccaggcgccgacgtcgaggccatcggggcgctccgcaacgatctcagagagggcggtgcctttcttgacgtcgtggagatgtggcgcgggttgcacggctggatagaagcgcaagacggcgccataggcgcctcgaccatccgggaccacccccacctccagcggatcggctacccgctgtcgcaagcactcgtacgccagagcgaccgcatggcgctcacccgctttttccaagctctcgacgtcagtcccggtgccgtccctgattctcgcgtgattgcgtccgcgctcgatatctggacagcagccgctcagaaccggctcagcgaggcattcatgcgggctctgggtgacgcggacctccgcccgctcctcgccatcgtcgtcgaggcccacgcgcaagcatgggacggccgggtgctggccagcgaggggaaacagcggatcgaaatccggctgagcatcgaccttgacgcctggaaagctcgttggcttttccccattcctccgggcggtcccgacacccttgctgtgctcgcgcccggcagcgaccgggaagtaagcctcacgaccttggctgggcttgactattactccgtccaaggaagcccggcagtgacgccggagttgctgtcttccgggttccggctacgaggtaatgagttcacggcagaatctcctccatcacccgtgcttttcctgagcccggatgcgcaaacgggtgcctggacgtccgcacctggaatgcttcccttcgaggagcatctggtcgcgatcagcgcccctcacgtcacggagttccggcaggtgctcagccaggccgccgttgacggctggcgcctcctctctcagcgtggatctgtccttctctccggatatgccctgtttcagggcgttcgcttcactaacggagagatgctcgaggaagccctcgcggggcttccgggccttcgccgcctcggcgtcacgcccgctgccatccctcgtgcccggctcgtccgtggccttcctctcgccacatcgatctcaggcacgcactatctcatcggcggcgaaccggacctgctactacccaccgggcccgactcgcgcaccgcgaccgtgacactcgacggtcggcgcgaacagctccaggcaaacgggtttccgctcgagctgcgccgcttcatcagcgacacgggccgtcacatcgtggacgcagatgggcaagaactctccttcaccacgctggaggaagggccggacccttcccagccgtccggcacagcctcacttggctggactcaggacgctcaaatgagtgcacaaggccacctgttcgccgtaactggcgcctgcgtgagcggcccgtctgattcgtaccccatcctcgtacgtcgcggccgggacgaatcctggctcctgcacgctgacggacgcaccgagctcctggcggaaaccgaaacgcccgcgttcctattgagcatcgacatcgagctccacttaccgtgcttcgagatcagtgctgcctcaaccgcccggtggctcgcccaacggcgcggaacacgatggcggctcacagagatcggttcatcaaagcggaacgagtacgacctcgacattgatgtcctcgacgcctggaaacgggcatgcagggacaccaacggtgcgcaactctggaaagcacaactgagcatggccgggggcgcaacatga

SEQ ID NO: 27743 - DNA, 5847 bp, Dickeya chrysanthemi Ech1591
atgttagacccgataggcggttttcgccgcattcaggacttcttcatttcgtatatagaaactaacttccgaattgccgatcctttcgttactgcctcaagacgcaatcttttgaatagcagtggagaatttgccgcggagccctacattgagcctgttttacgatatgagtcttctgataaaacgcttgaagctctggcagagatggacggtgggccgctgaatagcttgtctcgcaaaggccgtaaggcgttcgccgaactagcgttatccggtctgttcgattcgaaacctggtgatgaagtctggccgcgtcgttcggtccatgcgccgtatagccatcagactgaaatgcttaaacgcggtattcgtcctggtagcccgggaattgtgacatcgggaacaggttcgggaaaaacggaaagttttatgttgcctatactggctgcactatcgaatgaggctgtcagctgggccgcgccttgcgacggttatctgcaaaatcgatggtggaacagcgaaaaaacaagctggatttctcgtcgcgaaggagaaaaacgtcaggcggcagtcagggcgctggtgctttacccgatgaacgctctggttgaagatcaaatggcgcgtttacgtaaaacgttggattcagatgacgcgcggcaggtgatggagcatcgctttgccgggaatcgaattttctttgggcaatataccagcgcaacaccgattactggctatgccagccatccacgtctttccggactcaaatcggaaaaaagtcgccgtgctcgtaatcttgaaaaattacgtaaggcgttgaagcgaattgatagcgatcagcaggctgcgcgcgcattcgacgaaaaagaaaacccttcggaaaagacccgatatatatttccttcgacagacggcggggaaatgatgtctcgctgggatatgcaggctgccccgcctgacgttctcgtcactaacgcctcaatgcttggggcaatgctttcgcgcgaagtcgaagacggtatttttgatgctacgcgcgaatggctgatgaataacaacgacgcgtacttctatctggtattcgacgagctgcatttaatgcgtggttccgctggaaccgaaaccgcgatgttgattaagtcgctgattatcagactcgggcttgacgacccgaaacatcgctacaaactgcgtttgctggcgtcttccgcatcgctgccgatggatggcgcggatggagaacaatcacggaaatacctccgggatctctttgcgccctttggcacttgctgcgattctctggatcccggtaccgataagcctgatttctggcgtaactgcgtcatccagggaaaaccttatataccgccgaagccagaaggaaaaatcaccgtgcggcctttcgccgcattaatgcgagttgctcttgaggggcagggaaatgtcgttcgcaatctgaacatgacggacgcgcttagtaaggctttgtctaatgtcttccaggctttgggcgtgaaagcgcaaaatggcatgcaaggcattaaacaagcagcggaaaaagcagctgccctgcttaccaacgcttgtatagaagaaggcagcaagtcgccgcgagcaatgccgccgggactaatcattgataagatttttctgaaggaagactcggataaacaagatgagttggaattagcattacgcgggttaatgctggtgcgcgcactgccggaatccgggatggattacgagaaacctgccaacgttacaccagcttttcgcgtacatacattcgtcagaaatattgagggtttcttcgcctccgtatcaccgggagaacaaaaggcaaaatttgctgatttttgtctggaacgaggactatcccacgcaccttcagccccaggcggagagcgcggtcgtcgtttatttgaaatgctatactgcgaagcatgcggcgatttactgctcggcggtcagaagggacagaatcacggtaaaacaatcgaattattaccttcggcgaccaatctggaaaatcttcccgaacgtcccggcgctgaatattacgatgatatgacgctggaagagtttgcggttttctggcctgtagatatagccggtcggcctcctgtaggttgcgaaaaaggttgggatgtctgggaaaaagcggcgcttaatcctgttacaggcattgtgaccattgcgcaggaaacatcgacgacgaatactgacgcggttcgcgggtatctctatttccagaatccgattaaacctaaaaaaggcgagccggcgaagaccccttctgctcagcctttctgctgccctaactgcggcattgactattccagccgacctgccagcaatcgttccagaacgcccattcgcgcatttcgaactggtgtgacgaaatcatcccaactggtagcaacggagctatttgaattactgcatgcaatcggcgcggaagcaaagagtattgttttctcagacagtcgacaggatgcggcatcaatggcgctggaaatcgaacgcctgcacttacgagatctacgcagggaaatattggtcgccgcttccagagcgatgattaaggaggctgaaagcgggtacatttcagacgaggatattgaagacaggaaagccaaagcgaaacaatctggagattacgatgagtatatcagactgcatgaccttcaaaaaagccaaagcggaattactgaactttgtaaatatcgacggataaaaatcgacaaattactggagtctgaaggtgactcaatcggaagaatcacatctgagctcgtcgggttggggatatcaccctataaatatcgttctaattcagatgagaatgatagtgctgtttggcatacaaatttcattaaagaagggggaactattagattcagtgaaaggcttccttctcatgaacgaatgaaaataaaaacgaaaatatcttacgatcaatctgaattgatagatgatgttattttcgccaatacttttttcgcgctggaagaaacagggctggcatacccatgcatctcagataaagatgacatgccagaaattgatgcttggctaagggtgttttccggtgcctatcgtgttaaagagaataaatatttcgatgcaagccgtactcgtgattggtatgttgggaaagatgttgaaaaagagaaagttaagcgcgtcgccagagtcttattcggtgatagcgggtatcaagatggtttaacgcgtatcttaaatcaactttctctgcttgagcataaggcaggactaatcaatatcggtaagttgttcctcaaaatcagcaaaccaggcgatcattactggcaatgcggaaaatgtgggagaattcacttacatttaggttttaaatattgtacccgttgcgtgaatgcactcgaccttgaacccagtggaattgtcgaagatctatgggaggaaaattttcttggtaagcgcattgtacgtggagagcgagatggagttaaacgtttccggctgaacgtcgaagaattaacgggacagacggatgatttctccgatcgtttgcgtaagttcaaagggattttcgtcgataagatgagtgaacttgaaaagcttgattcggaaatagacatgcttgccgttaccacgacaatggaagtcggaatcgatatcggctcacttcagtcggtttatcaggccaacatgccgcctcagcgttttaattaccagcagcgcgttggtcgtgctggacgacgcggtcaggccttttctttcgtgatcacattttgtcgcggacgtactcatgatgcttactatttcgctcatcctcatgcgatcaccggagatccgccaccgccgcctttcctggcggtaaatcacaactccattccattaagacttatgcggaaagtatggcttagagctgcatttaatcttttacgtgaagaggatcataaaaacggaacaactttccctggagataaactcgttccacctgatattcatggcgaatatgtttctacgcatgattactatcatagcgatgaaacgaattgggctgaacgattgctgggagcgttgaaggcaactcagaatatacatgatcgctttattgaagcagcaacgttcgatgatgttcaaaaacaacgtctttattccgcattaaatgcggaagcaataattgatgaaatcgctgaactgaacgcttacgtccctgaagaaaatatgggacttgcacgtttcctggccgagcacggtaaactgcctatgtatggaatgccgactcgggtgcgcaatctttatttgggattgcgtaaaacaaaaggtctaaacgctcaagaagaatacgaatggtcgacgatggatcgcgatcttgatctcgcagttttcgagtatgctccaggctcggtattgattaaggataagaaaaagcatgaggtaataggcttcacaggcaattaccaggaaccacaggtccagaacaaccgaatatcggatctctcgacggtaggctcatggcaggagtcatgcagccatgtagcaatttgcccggcgtgtggttccgccaagctggagctacataaacccgacaacgacattaattgcgaggattgtcgcacgcctatcggttctgacgaattcaggctttatatcacgccagccgcttttcgcacggatttcaaacccaaagacgatatggatagttttatccgtatgtcgttgaaaaccacggcgacagtgttgcatgagggtgttccaacaaaattcgattctttcactgtgcaacgcggcgaagtgaccattctgcgcctcaacgatggccccattaatggagaaaaggaaggtgaacgatttactgttgacttggtgaacgatcaaaaagcgccgatgcccttttctacttattgtccgtctgttaaaggcgaacaggcaatcgattcaggctggctgaaatcgcacaataatccacgctggcagtgtagcggcaagaaaaaaaattttggcctcgtatcaagtaaagaaacggaatcgcttcacatcgaattaacgaaattcgatgctcgccttaatctgaatatggtcgccagatacggtgagtacatgaatttgcctacgcgcgcagcagctatcagcgcaacacagatattgacgcataaggctgcgctctatctggatgtttcgccagatgagttcgaaacgcttgaaccccgactccatcatgagaaacctatattgcaaattgcagacgcattgattaacggttcagggttatgcagacgacttgccgagccagccgtcgttggggatccgcctttgatagtcatattattgaatgagattctggaagataagcgcgtctggccaatggttgattttcttaagaaggatcatcccgctcagtgtcaaactgcctgttacaagtgcatacagcgctacagtaaccgccagtatcatggtttactggactggcgtttaggaatggcatacttacgagcaatggttatacctgaatttgcctgcggtctgaacgatgatgactggagtcatcctgaaatgatcggatggcgagatagagcatttgagctggcggaagacgtcgcggagttacggcctgaaacaatcaaattgtcgaaagagtattcgttacctattcttatcgaaatacaggatgggaaagagctttggcgagcggccgtaacgcatcccttatggcaatggagagatgccgaacgtgatgccctgattgactcttttggattgactgacggggagtcgccgctactattcattgatacgtttgaactggaaagacggccgctgcgtgcgttggcgaaccttaacagagttaaaatatag

SEQ ID NO: 27744 - DNA, 1236 bp, Dickeya chrysanthemi Ech1591
atgagcgttaaagccgtcacgagcgacaatcatttaatggaacctcacgaggcgggattcagtttctatgagtttttcgcgggcggcggtatggccagggctgggctgggaaaacagtggcaatgcctgttcgccaacgatatggaccccataaaagcatcgacctacatcgacaactggggcgacgaacatttcgacatacgcgatgtacgcgaagttgcccccgatgaactgccgctccacgctgatttaagctgggcctcatttccctgccaggatttatcgctggccggcaatggcctgggaattggcgaaagagattccagcgcggatgaaaccacgcgttccggcgcggtatggccgtttctcgatttaataagcaggctcggtgaggaaaaccgtaagccgccgattcttgttcttgaaaatgttctcgggttgctgacgctgaatcaagggagtcatttcgccgcgatatgccatcagttaagtaagacgggctaccgatatggcgcaataatcattgatgcaaagcactttcttccacagtctaggccccgcgtatttcttgtggcgattagtcgccatgtttccattcccgaatgtttagtttcagaagaacctttgtcgcaatggcattcaccttcgctccttcgcgcctgcgatgcgctggcgaaggatgctcgcaacgactggatctggtggtcgcctggcaatatgccagacgccagaacgaaggagctggacgacttaatcgattttgaagacgaaaacgcgctatggcactctgtcgatgaaacacaacggcttatcagtatgatgacaccggcgaacctggcgcgcctggcgaacgcgcaggcatctggcgcgacaataacaggtagcctttatttacgcatgcgcaaagaaaaaggtgttaacaggcaacggactgaaattacgttctcggccgttcttggttgccttagaacgccaaaaggcggggcttctcgtcctcgtattatcgttgtcaagggcaatcaggtgaaaacgcgcttgttgtcggtcaaagaagcggcagcgttaatggggttgccggatgattttattctcccggcggcgtatcagtcggcgtttaaagtgatcggtgacggcctcgccgttccttccgtccgttttctggccgaacgtattctggagccactggctatggccgtccgaattaatacccaccggacggaggatattcgcgaatga

SEQ ID NO: 27745 - DNA, 2562 bp, Dickeya chrysanthemi Ech1591
atgaactggacgtcgcccgttacgcccgatggctgggaaagtaaactgatcgattattttctccggttcggtgccgacggcgatgcgcaggatattcgctggtttgaagttacgccggagacgcttgcggcggcattcgccgacagcggcgttagcgcggatgaaattgaagaagcgtttcaaacctgtatgtcaaaaatacgggatctgccgcagcgccttgaaggcggcatgatggaaaagtcgactcgtcgatcgcccggatattttacttatcttgtcatgaccttgcttattagcagtcaattcgacgcacaggaagaacgtaatgattttcgtctgaagctacagagctggttgcgaaccgggcatagttttcagaacttatccggcgtcaacgcgatgtgggaggcattagccgaatggcttaaccaacgtattcaggaaggcgaaccctacaggcgtcttgtcctgccgccgcgggatggctgggttcagatcggtcacaccttgcggttggcattcccgaataaagccgatctgcgcctgatgagcgaatgtctcgaaagctatccgcaagccgccgataacccacgccagttaatcgaatactttcagattgttattcaaagacaaggcgtttctcatgcgatgaaggaggctttcgccgaattcagagatgcgtggttgttggggcgccgcgcgctgtccgatatgcctttctggcgcctgcgtcaacgggcggtcgggatatcgtcctgtataacgaagcatcagaccatcattgatatgtatgtcgacttcgacggttcgcggtgttatttcagtaatgcaggcgagagagacgaaagcgtttttcatcctacgttatccaaagcccttaacgcccgcgacgccgggagcagcgaaaatctggggaaggcgacgcagggcggtttactatttttttatgagatcgggcacgggcgctggagagcgaaaccgtctcccgacgtatactcgcaacggtttcatatcgccttatccagtaaacattccgtacagatgagcaagcgcctcaacggttatattgcagaggacgattggattttaacggctcagccgctgaaccaagtttcagcgatggatatatttcgttcactaaggtcctctttgggtattcagaatgatgacgttacgcgccctcagctatacggtggaatacgagtacctggcggatggctgggattaccagcgtttttgccttctgttgagtcagatacgcgacgctacaaaatatattcatcccggaatgatggagcaggaagcaacgtttctataatagatagtcgtctgatttcttctgtgtcgcttagtggtgagttcttcatcgagccgatgcttgaagtgggggaaaaaacgccgccgtggcggcgtcgcgcgcgctttttcacccgcgccataccgcacccaactttaggcgaaagcgcaagataccggtttgaacctctttgtgactggtcgacgccttcactaaaggcaccgatgtttaatttcgaagaactgttacagtgggaagatagcgaagcatgttgcgatcatcttctggaggcgatttacgccagcggagccagtggctgggaagaagccgagttatttgcgcttctcaggcatgtggctggcagcatcagcgtatggcatttgattcgttgtttacatcatgcgggtctgatccagccactcctgcgccctggctggaaaggtcgggtatggacgctggttaaaccttcgttgcttcatatttgcaacagagaaaattctctggttattgtggaaggcgctgtctgcgccagtctgatggataattttcaaaaagcggtcactgggctgggcggggaaagtttccgtcgtcgtggcgtaagcctctggtcgccccctgtatttggggccgtactcgctaatcctgttgcattatctcagcgtctgggatggccgcttatcgaagccccatcgtcatccgctacaataccgctttcactggtcacgacggaacgcaccgctgaactatacgagcctgcggcagtctggaactggcgttcaggaagattccagccgcatagccccacggataaagacgtggcattactgtcgcttcatattcatccaggcggacgagatcatgatatctatcgggtcgtttccgggcgaaaaacgacgcattatctttcccgaaccgccgctattatcgtcgcaggcgcgaaaaacagggaacccgtgtttgaacgagttgcaaaaaaccatctgctatgtcttatcaatgattgcggcctacccgatgcgctggccgcgggaatacggcgtcacacgctcagaaacggaggtccggtggattccggctacgcctatcctgtcgatgacgtctcattccgctggctggaatcgctgcttccggggtgtttctattccctatatccagacggcgagggcgatataaaccgcttagtttccgctagtcgccattccggcggaaaaatacgtccgatatggcgaaacggtcggctaacgctgacgcagggattataa

SEQ ID NO: 27746 - DNA, 2088 bp, Dickeya chrysanthemi Ech1591
atgagcaaaatcccttggtatcttggtcaatttgatcgcagaaattatcagtctttccttaaagccatcgcgcaggaaacgcctgacggttggcgtacgatcgagaaccctaagaaattgttccctcatacgggtgaagttgagtttaacgagactgacgctttgccgcttcgtaagggcgaatgggccgcttttcatgttgggcccggaatacgcaacagagcgcaggcgaaacatgctcgccgtatttatccttattatgatttatcttccggccagtcgctgctggaagtgcgtcgccaattaaatttcgatggcataacgacagatggcgaaccgggattatgggctatccgttttgggccggatgctctgattcttgcgaatctggctgagtcgaaatcaggttgtctgatcctgtccaaaagccagaacgtttatgaatatgatttccatgagggtggcgtgatttccgtatccggcatatctgaaagcggaaaatcgttttatatgcccgatgtcgatgcgtcaccagcccgaatacatgactggacgccggataagcagtatatcgaaaacgtcattcaactcctttcctgcgctgattcgacagccgcgatcgcttcatggcttcgggtgcatacaaatgagcaaaacgggaaattaacttccggcgtcgatgctcttctggctgccgctcaaacgctccgggcaggagagctagctaagaaactggaggaagaggattcgctgactcgtcagtttaccgaagcgatgttgaaggaccagcatatcgcccgccttctcgaccatcaaatacaaaacattgcggaagaagaacgagtcgcgttgcgcgccgaacagcataagtcgctcgataaagagttttctgctgaacgcctgcgacgttgggaatctattgaagcggaaatggccgtttttgagaagacaaggaaaagcgagatcgaagaggagatcgcacaattacggcagctcgaagaagaaaaattacattctgattttgcagaaaagaaaacgggtatagaacaaacgctcaaacaggaaaaagcgtatctcgaaagcgaaattagctatctgaaagacgccaacgctgatttatgcgctcagaacgaaaacgagcgtcagatattggcagccctgacctgcgagcgtgaagcatttttggcgtttttaacggatgctgaagaacgtaccgctcaggcgcaaattgaactcaaaaaaatggatatagctattgctgaaaaggcgcgtcgcatggcttactcagcgattcctgaagtacgcctcccggcgcaagcgagagtcgtatcctgcgaagaattcggtcataccgtcagagagaacaagttgctgacacctaacggaaagatactcatgacgcaatttctggcgttaatgttggcaggagaatgtccattgttatctggccctgaaacgcaggacttccttgctgttgccgaatcgctgatttcttcgggccgctccatccgacagatcgccgatccaacgatgatttcctgcgaagatctttgggttcgtgcgggaaataatatggcgacgccgctttatcagggattattgttgagcgaggcttcttgcccccgaacgatcctcgccgtcattgaacgtgtcgaatgttccgccgcgcgtttctggttgccagcgctgaaagaccgattgcacggcggcgatttgccacgacgctttctgatttgcggcaccattgaaaacgaagattgtgaagaagcggagaaaatgaaggaacaacatcttcgcctgcggatggaaaacgtcgtcatccggaatgcgattgcgctgtcccctttacatctttctttagaaaatcatagcgagctggatcccggcccagcatcgcaaggttcactcccggataaacttgctatcgcggatgaaatgtcagcaggacgcctggatctggtaaataccctacgggcgatgagaacggcgcatgaagcggtgccgttcgatgatgaaaacaaagcgcatcagaagtatttagtcgatttatacgccgatttacagaataacgatctatgtgcccattaa

SEQ ID NO: 27747 - DNA, 5949 bp, Enterobacter aerogenes
atgaataacccactggaaacatttgaatcaataagagatttttatatttcataccttgaaacggccttccgtattggttcatcagacatacagactgaacggcgagcattactggaacagcaagggacattatgtgccgatctatttcttgagccgatgtcccgatatcagaactatggcttaactatcagtgcattacgaaatgatgctcatggtcagacatggttgccagggtttaatgcgcaacaaagggcggcattcatcgacctctgtttaggtggacttctgccccgcaataaaacggattcaactaagggacgttttaatctttatacccatcaactggacatgctgaaaagaggggtacagccagggaaaccgggcattgtcacctccgggaccggttccggtaaaaccgaatcatttttattgccggttctggcacagatcgcaaaagaagctaccggctggccgcaaagctcggcgttgaagcgctggcaaccgtggtggcataaggtagcggataaacagcccagcttcatgcgcgagcatgaagccgctgctcgtccgaaagcggtacgggcgctgatcctctacccgatgaatgccttggtagaagatcaactggtacgtatgcgacgggcgctggattccagcgaagctcatgatgtcatggatacgtatttcggcggcaaccggatcttctttggccgttataccagcgcaactaaagtaactggctggcttaaacatccccgactcagtgaagaaaaaaatgagaaaaagcgcgtggctaaaaaaatcactgagctgcgtgaatatatgcaattaacggaagagacccatcaggaggcggtacgacaagcgcagcaggacaaggataacgaattatcgtttaatttcccccgaaccgctggcggagaggttctcagccgctgggaaatgcaaaagacaccgcccgatattctgatcaccaacaccagcatgctctcaacgatgctggttcgcgaggtggacgatcctatttttgagcaaacccgacagtggattgagcgcgatcctgatgcctatttttatcttattcttgacgagcttcatctacagcgaggaaccgcgggtactgaagtcagctacttgcttaaacatttgatcaaccgtttggggctggatcaggaaaaacaccggcacaaattgcgtattctggcctccagcgcctctttacccgttgaaggggctgaaggtgaccaaagcgtcgaatatttatggggaatgttcggtcagcggggattacccgccggtgcctcttccaacgactggagagaatgtattattaaaggtgccactcttcccccgggcaatatgtctcttttccagggggatctggaggcgttttatcacgcagtgcttcagttacagcaagcaccacttacctcattacaacactggcagaatgtcgcccgcagcatgggaatgatagtcagtgaagcctcaacagaacaactagcgcaacgggtcgttttacaggcgggcaacctgcttgaaagtggctgctatacggaagatcattctccgagagctacgtcaatcaaaatgcttagttcacgccttttcaacgcccaaccccttagtgacaaagcgctccaggcattaatctggttacgttcgactgagggagactggccgcaatggttttcacaagcctttcctgatgatatcggtgcgccacgtttccgcgctcatgcttttttgcgcgctcttgaggggttatatgtcgcgccattgcccgtccctagcgctgcatctgcgcaagacattaatcacagatattttggcgatcttaccgtggagtccggcttacgttacggcaaagataaaaaatcgcggcgtgtcgaattactctattgtgaatgttgcggtaatctcttttgggggggtaaaccttcggtcttttccggttcagaaagtcgaattgaacttttacccaacgaccctgatacggaacaactgcccgaacacgcaaaatcagtcatggtagaacgccgatctgctgaagaatacgcgctatttatgcccgttgtcgaacgtttctggccgaaaggaaatgaggagctaaacagcgataatgacaatacttttggtacttgggtaaaagccagctacgatccatttaccgccactattcaacacccagtatcgctcttaaaaccgctaccggaaaaccatatagcgggttggttctattacgttaaacccggtgaatttgcctcctcggaaagaggccagtcatccagccagtcaccgggaacggcgctaccttttcagtgtccggcgtgcggtacgtcctataaatacggcaaaggtaagctctccccaatccgtagctttcgcgtcggtttttcaaaaacgacacaactactggccagctcgctaatggcggaactacagcgatcgggtaaccgtgagcaactggtaacgttttcagacagtcgtcaagatgccgcaagggcggcgctcgatctggaatcgggtcaccatgacgacgtccgacgagaaattgttgtccattcgctacagactattgcggctgataaaccgtcccataaccaactaaaaatacgccaagcagagatagagaaccggaacaaaacactagttaacctcagcgtaaggtcggatgaggaagaggatgaattggatcaacttgctgatgaacgaaagaaaatcagagggttattatcaaagcctgaatctgacagcatacctctgcgtgaaatcctcgaacctgaatcaccggatgcaggtcaaccacttggcccgctgttaagggcgcaggtagatgcaggtattcacccttccgatcgtactggcatcgcgcctgttcccgatccagaaaaacatgaagaaggcacgctgacctttgcatggcaacaactctttgaaaagaacacgcagggggagtggtgctggaaggcgcttccatcctatgaagacaacctgcttgtggcacgacaggagatttcacgcgatctgaaacggctggtaggggaaagcgtattcagtaaaacctacttcgcgctggaagagtccggttggggttatccctgccttcccattaccggaaacgactcacgggaacatctcgcgatttatgacgcaatgtttcgtgtgttggcggacgcataccgggttaccccttcacaatatacaaagccagaaactccatggagttcagcgcgcgatgtcaatcgtagaaaccgcctgtaccgttttacacaggagatatgccagtgttcaggaggcgagcctttatctttaattgatagttttctccggcgactagagctggcgggtcatcagggcggtattattgatattggtaaaatgcactttcgcctggcggaacctacagatcgcgtctggcgctgctcccgctgtgggcgtatacacatgcacaccggcgcgggaatctgtactcgctgctactctcctttaccagaaacgccgtgcagtgaggcaaaaacgctccagatgcaacactatctcggcaaacgtctctcacattcttctggtattcacaggatgcgctcagaggaactgactggaatgaccgaaaatccggcggcaaggctacgccggtttaaaggtattttgattgccgacgacgatgatattttaccagaaggaatgaaaaattttgagcccgatcgagatcttgaccgggcagctcgggtggttgatgtgctttccgtaaccaccaccatggaagtgggcgtggatatcggtgatttacgtgcggtctttcaggccaacatgccgccacagcgctttaattatcaacaacgtgtcggacgtgccggacgacgtggacaagcgttttcattcgtattaaccgcgtgtcgcagtaagagtcacgatctgttttacttccgctatccggaaaaaattacaggcgacctccctccgccaccgtttctgactacaaagctggaaatgatctgccagagactggtacgaaaaatctggctggtgtcggcattcaaatggttaagacagcaaacggaaaaagccgatcacccatggccggttgacgactacgcacacgtccctgataaccatggtgagtttttcccggtacactggctgaaagaaaaccaaacggactggctgccaaaaatccggcaggccatcgaagcaaccatcctggcgcgcgatgaatttgcccagactagcacacagcaaaacccccatttgttccagaaaattattcagcctttgacgccggaacagctgattcaggatatcaacgccgtactgaacgacagcgcgatggaggcgaaaggattggctgaagcgttggcggaacacggtaaattcccaatgtatggcatgccgacccgatcacgccttttgctgacaaggcctgtaagcacaggtggaaaagaaatcgaattcgccagcatggatcgcgatctggatattgcgatacaggaatttgcccccggaaaaattctggttcaggataaacgacgctactttacagcaggttatagtggactgcttaaacagagcagaaaaaatccacgatcattttattcaaatgcctgcgaaccgggtgaactcagaacaatgaccgcctgtccggtgtgcaacatttgggctccagcaaactctctggctaccgaatgtactatctgcggtgccgttatggataaggcagagcgctatcaatgctatgttccttatggatttatcactacgctggaaccaaaatcggccaaagaggattttgatcagatcttgaccacggccagtcgtgtatcaattgcagaagcctacgctttttctgcaacgcccgagcctgacgttaatgtggcgatacagcttcagccacagacatgtttgcaccgcctgaatcggggaatttataccaataaaacatggcgtggtttcagcgcaacacaggggagcctatcggtccctttcagaaagcaggggacctaccagccgctttgggcgaaccgggtttggatggatagtcaaataattgaggccgacttgttagttaaaaaccgctttaccgatcggggagaaacgcgaaacacattttatcttgccgcgcctaaagtgactgatctacttgcgctgatggttgcccaaatcccgccgggtctccggctacagtattccactctaactccggcattcagagctgctgcgctctcggcgtcttctatcattgtgaattatgcatcaaaagagctactggatattgatcctgaagaaatcgaaattctggaaccccgtgttcaaatgctgaaaaacggtaagtcggtaccggttctgcaaatggccgatcgtctggttaatggttcagggttatgtgaacggctacagcagaagggtgcatccggttctctcattatccttgaggtcatgaagaatattttaaataacaaaacggcctacccgctggctgagttcctgcaacccgatcatcgcgaacgctgctttcaggggtgttatcactgcctgcaccggtacggaaaccagccgtatcacggattgctggactggcgtctgggactggatgttattcaacttctgctggatcaaacctataacgccgggctgaacggtgattttacctctccgggcgtagctgactggtcagaaaatgccttacgattagccaaagaggccgcttcgctatacagcgacagtgccgcagaaatgatggggaatatacccgtgattcgcaccggggccgggcgttgggctgccgtactacatccattctgggatcccgatgctgcatttgctgcaaacccggaacttgaggcattttcatatgaggtggacgtagacgcgacgaatacttttgcattatcccgccgcatggggactgaaatggcaaaattacggactcaggcgtcctcggctcaggagtga

SEQ ID NO: 27748 - DNA, 1086 bp, Enterobacter aerogenes
atgagcagtgtttttgagagagagaacgataatattcgggtcctttcacttttctccggttgtggtggtatggattttggaattacctcagctggtggagacatcgtctttgccaacgatgttgcagagaatgcctgcaaaacattagggaactatttccccgatagtgatatcaggcatagtgatatctctcaaattctgtcttttccggatgttgatattgttgttggaggctatccctgccagtcattttcaatggcaggtaacagaaaacctaacaatgacgacagaacaaacctttataaacactttctacgggtattagagactgttcagccgaagtattttgttgctgaaaatgtttctggcttgaaacatttaggggcaggtagctttctggaacaacagctcacggcatataaagctgccgggtaccaagtcagctatcatatggtaaacgcgagggcttacggcgtgcctcagtcgcgcaagcgtttgtttattattggcgtcagaaacgatctggggcaatactttgaatttcctgctgaaacacatggcaaagcgacaaaaaagaatcctcatttaaaaccctatgtttcacatggtgaggctattagggatttaccactatggcctgaaggtgagttttacgaacgaccacatgatcctgatgggcatttctcatggtatttcatgtcccgaaatcgtaaagctctatgggacagccctgcttacaccgtcgtagctaactggcgtcatgttacattacatcctgccagcccggtgatgaagttaacatggtcaaacctagaggatggctggaagcagcgctgggacttttctgatgaatatgagcatctagttgttgatacttctcgtcccaaactggaacaggcaaggcggttatcatggcgggaatgtgcacgaatacaaacttttccacacggttttgaacctgtaggagacgtcgagtcaaaatttacccaaattggtaatgctgttcctccactgctggctgaggtactttttcggcatttattttctggtgctggtttgaaaaagatgacagcgaacggtaattag

SEQ ID NO: 27749 - DNA, 2766 bp, Enterobacter aerogenes
atggatgattttttcccggttactttagaagaatggaatgctgaactagtaaagatcgtctttcttgagtcttcgcatacgggctcgactttaagccgaattgatactacgggacgcatttttgagcaacttgcaggtccacgtagcaaagaggatgctaagcgaagtttcctgatttcgtttggaaaaaaagcgtctaaaatccaggatgctctcagggatgagtctcgattagacattttagcgcaaataaaaggataccctacttattttgccgttttatatttaacattacttgctgccagtgctgatgatgaaacacatgacgaaggggattttcgggttcgattttctgtgctgcttggctttgataaaaataaaaaatttgtttttactgaattacccaacttatgggaaaggttagaaagatggagtagtaaaagacaaaactgtacccgtttaatcttgccaaggccatcaaaacatgaaagattgattggctactccaagagaattgcttttccatgctacaaagatgaggtctttttacggaatgttctcatcgataataagttagataactattcaacttttgaatcagttaataaggtagtacatcaatatatatcttgttttagcgaagtttttaaccaagagtttattgagttcagaacattactttcaaaggctgccatgcagcaggcttatgactctcctttttggggggctgttcgtgatatcactgtacatacagagagagaacaactcaaagagaatggtaagtattgtattcacatggagtttaatgattcagataatcctgagatttatcttcttatggatgacgctgctgctacagactcagaaatccagcgttattactccttgcctaatgaaatagagagctataataatatatattacgaacgagacataggcaccacattaaatttcttggattttttattaaaaaaacggaagggtcatttctataaatcacgagtgggagtcgcactgcggtctgggtgtttgccgctttttcgtgatgatttttgtcatattagttcagagggagaatattatgaaaattctccaatctatttaatacttcatcatacatatgcagacagtattttcactgtcttgaagaaggttggtgaaagagtacaacgtcgggatattaaatctaccaaatggtcaatagtttcttccgataaagttggcaggcaaacgctggataagatagcccgtttgttaccagaagaagcccgtcgttttctaatacagggatggcagcctgctcgacctcgtatgtcaggcgcagcgcgatttggacaggctatactgcttaaccctgccagtacaccgataattcatatgcctgaagtactaagaggatgctatgtcatcagcaataaagacggagaagaattaattcatggctcgctatctcagggagctgaaggattattcattccaccagaggagttgatggaaatatctggtcaggcattttgtcgctacgaacttacgttagcgcattcagatatcccagtaaattttgatgtacacgtgttagatcacgcgccttacgccacttattgtaaaattacagagccacatgattggcttattgatggaccatcgggagtattaatggcgttaggggatacggcagtgatccgcccactaaaacgcgaaaaaataacaccattgagtggtgctcagatgttatggcagtatgaaaattgccttcctgtaacatgccaatataccgagttacataatatacccgcagcatttgactggctcgctgaggcgctggcattgcgttttcaacgtcgtagcacattgtcttttggtgaattaaaacaacatattgaccccgtatcacaggtaacgaggataccagagtggcaattgcgtcgcatgctctttgctgctggctggctttgtgtagtacaacgacgtcatgcgccatattcgttagtctcattagctgaaagaactatttccgttgatgtcactgagcagggaattgttgcccgaattctggggatgtttacaagaagtgaacgtaatcttctccaagaagcactgaatgacggtgagcgaatagggcgtcggttggttgaggataaaggttgttcaatgggttgtattgaattgcatctatcagccagagagcgtattcatgctttcattgaacagtttgggttacgtttggttagtcacgacgatttccccgtaaatgctttgagcggagtattgctaccactgtctcaaatgcagtttatcccggctttacccccggaactctatgtgtcgctatggcaagctgaaaaataccaatggtcagaagaacagcggcttactcaaacggctaataatctattgatacggtgtcaggaaaagcagagttatcgttattttattcggcagaacaccggatactggcaaactgatagcttctcctgggcattaatggctcagatgatatgtacaggagaaacggttggcgtgcaaaaaggcgatactgactggtgctggtcaaagaaaatctttgcgttaccgccctccgttttacagtggtggatccatgttgcccatggatgcttgtcgataacagataatggtggctacttatttgcaggggggaaatttccactctgggacaatgtaatggtttccccttcgtgccaacgcgcgttggaacgacggaacagagcgctaacaacatgcaagctgcgtagaaccttacagtaa

SEQ ID NO: 27750 - DNA, 2781 bp, Enterobacter aerogenes
atggctaaaaagcaaagtattatcagcgaccggctgggccaaatgtacagcttcggtacagaatctcatgaattgatcagatgcttgcaagagtgcaagcaaaggctcaccagaaatggcgctaaagcagataatttaccgaaaggaccagagaaaaggttacattttctccgtacgttaccacctaaggccaaacttgttgtgtctgattggcttcgtgaaaatttaacgttttctgaacaaaatgacccagaaaatgttcttagagatctgttagaagcagaaagtaatgcggaaaatattgaactctgcaaaccgttatggcgcactattctgggattctatatttcttctgactgccctgaaattataacgaaatttctgaatggtgaagaaatagatttaccccaacatggtgtttctgactcttcgacaattaatttcatggatgaagacattgaacattgtgccttaattagtcagggtagagaaattcctaagccagagcgcactataccgctgtttgttgggggattggttgatgcactcaggggaacgcgaacagccgataatcgatggcggacaaagctatcagaacattctttaccgatggcgcgaaaattgggtgagcttatcgatcagtttgaagccagttacgaccttaaaacaatagatggtactagtgtaatacaggctcctcccgttgtttccaaagaaatcgacagttcgatggacgaagttatgttcattggaaaagtgttagcgttaaccgcgaccggcgctttttttgttatgccgattagtctgttaattaatggcaacctacgagacctcccggaggaactggtaaaagatttttttccccatggaggtgaagccattggttttgaaagctatttcagcaaaaaatttactcggggtgaaatagcaatatggaaagcccgatatcagccgtctgataaacccgcgcagtatgttattactgactacatgtcgcgcgtttatcctgtcgttgcgctgcctcatgcctctgatgagccagatgctgtcagagagtggttacttacccgctaccagccgcaaaacgatacggcggtcatttttcacctaagtgatggcgtatccctaagaataccgggtgacttgtctgatcctaaaaaatatgactttgatatgccgctagagagttatcgtcaggtttctcagacactacttggttctcatgccctcagggtgatcactgaactccctcaggtgagtaaaaaatatgattgcgctgaagccagcacgtggatcaaacgcctgcttaaacgcactgattcagcaaaagatttccctcagttcagtaaaggacagctacaaaatttaacccactttattgctgaacatgagtctgataatcaggcatcctatcttcgtgctgtatctcacctggaacagatagcagatacaagatcctttcttaacgatacgactcaacagttattggctttacctgaggttgaagcgcaaattaatattgagaaacaagaaatactgactcgttacgaagaagaacagtaccagattaaacaatcaataaaggtattatctgaaaagaaaatacagcttgaaaatgaaatcgacgaccagaagaaaaaactgaaaaaagagaccgatcgtattaataaagcgctacgtcagcaagaaaatgaacttgaacaacggattaaaaagaccttcgaagctgcgtctcaagcgggaattgaaacgctggcccagacagcgttactgcgtgcgataattaaaaatgaaacagtacaggaacaatctgcccaacgacaaatagcaccagaacctgtagccgaatcagtaaattctaattttccattagcagaggcgaatgccctgactcgcaaacatcaactatcatcggctatcgaaaaacaggctctggcgacgggactaagtgaatctttattatccagcatgattgccgctgcgagtgttacacccgcagtcggattgatgggaaaacagacgaaagagactatcgcctcactagcgaacctcttagccgggaatgtttggggagaagtatcggtacatagcgatcattttagcttcagtgatttaatgaactcccccacattgatccgtttatccggcgatactaataccatgacgctaggcgattttttgacccatcaacaagaggcagggctggtgagcatcgttgaattgcgtggttttaaccgcactcctccagaaacgctgctccctgaactccaagagtgcttattcagaactcgccatcctgccgcatgcagttggacggatcggcggcaggctctgcgacatttgcccatccgacacccgattctttttttactcacattcaccaccgggaaaagcacgtttccattacaggctcctcttgcttaccagttacccctgtttcttgcagaaaatatatggtcggatgaacggccatttgagcaaaatactgacatcacgccttctcgtattacccttgaactatggcagacaatctatgtggacaacccccagccagagtaccaagcttgtgcgccaagggaagtgctagaagcagcgctactctctttacttcctgatgaacaagcacaagctgttgcccgtctggcttatagcctaggccgtagtacggcacaagatattgcgaccacgattgacgctcttgccccgcagttagggccatatgttcaggaaatgactaccggtgaatctgcaagcgtacttgagacccttttccagttataa

SEQ ID NO: 27751 - DNA, 5949 bp, Enterobacter aerogenes; identical to SEQ ID NO: 27747

SEQ ID NO: 27752 - DNA, 1086 bp, Enterobacter aerogenes; identical to SEQ ID NO: 27748

SEQ ID NO: 27753 - DNA, 2766 bp, Enterobacter aerogenes; identical to SEQ ID NO: 27749

SEQ ID NO: 27754 - DNA, 2781 bp, Enterobacter aerogenes; identical to SEQ ID NO: 27750

SEQ ID NO: 27755 - DNA, 5949 bp, Enterobacter aerogenes; identical to SEQ ID NO: 27747

SEQ ID NO: 27756 - DNA, 1086 bp, Enterobacter aerogenes; identical to SEQ ID NO: 27748

SEQ ID NO: 27757 - DNA, 2766 bp, Enterobacter aerogenes; identical to SEQ ID NO: 27749

SEQ ID NO: 27758 - DNA, 2781 bp, Enterobacter aerogenes; identical to SEQ ID NO: 27750

SEQ ID NO: 27759 - DNA, 5943 bp, Enterobacter asburiae
atgaataaccctctggaaacatttgaatcaataagagatttttatatttcgtatcttgaaacggccttccgtattgattcatcaggcatacagtctggacggcgagcgttactggaacagcaagggacattatgcgctgatctatttcttgaaccgatgccccgatatcagcactatggcttaactatcagtgaattacgaaatgatgctcatggtcagacatggttgcctgggtttaatgcgcaacaaaggacggcatttatcgacctctgtttaggtgggcttctgccccgcaataaaacagatccgactgtgggacgttttaatctctatacccatcaactggacatgctgaaaagaggggtacagccagggaagccgggcatcgtcacctccggaaccggctcaggtaaaacagaatcatttttgctgccggttctggcgcagatcgcaaaagaagccactggctggccgaaaagtccggcgttgaagtactggcaaccgtggtggcataaggtagcggataaacagcccagcttcatgcgcgagcatgaggccgctggacgtccgaaagcggtacgcgcgttgatcctctacccgatgaatgccttggtagaagatcaactggtacgtatgcgacgggcactggattccagcgaagctcatgatgtcatggatgcgcattttggcggcaaccgaatcttttttgggcgttataccagcgcaaccaaagtaactggctggctcaaacatccccgactcagtgaagaaaaaaatgagaaaaagcgagttgctaaaaaaatcactgagctacgtgagtatatgcaattaacggaagagacccatcaggaggctgtacgacaagcccagcagggcaaggataacgaattgtcgtttaatttccccagaactgctggtggagaagttctcagccgctgggaaatgcaaaagacaccgcccgatattctgatcaccaacaccagcatgctctcaacgatgctggttcgtgaggtggacgatcctatttttgaacaaactcgacagtggattgagcgtgaccctgatgcctatttttatcttatccttgacgaacttcatctacagcgaggaaccgccggtaccgaagtcagctacttgcttaagcatttgatcagtcggctggggctggatcaggaaaaacaccgacacaaattgcgtattctggcctccagcgcctctttacccgttgaaggtcctgaaggcgaacaaagtgtcgaatatttatggggaatgtttggtcagaggggactaccttcaggtgccacctccaacgactggagggaatgtattatcaaaggcgacacccttcccccgggcaacatgtctcttttcctgggggacttggacgcgttttatcacgcagtgcttcagttacagcaagcaccacttacatcattacaacactggcaaaatgtcgcccgcagcatgggaatgacaaccagtgaagcttctacagagcaattggcgcaacgtgttgtcttacaggctgccaatctgcttgaaagtggctgctatacggacgatcattctctgagagccacgccaattaaaatgctcagttcacgcctgtttaatgcccaaccccatagtgaagaagcgctccgggcattaatctggttacgctcgactgagggagactggccgcaatggttttcacatgattttcctgatgatatcggcgcaccgcgtttccgcgcgcatgcttttttgcgcgcactggaagggttatatgccgcgccattgcctgcctccagcgttgcatcttcgcaagaaatcaatcaccgctattttggcgatcttaccgtggagtccggcttacgttacggcaaagataaaacatcgcggcgtgtcgagttactctattgtgaatgttgcggcaatctctttttgggcggtaaaccttcagtcttttctggttcagaaagtcgaattgaacttttacccaacgacccggatacggaacagctaccggaacacgcaaaatcagtcatggtagaacgccgatctgctgaagaatacgcgctatttatgccggtcgtcgaacgtttttggccgaaaggcaacgaaatgttaaatgacgacgatgctttcggtacatggggcgaagccagctacgatccatttaccgccactattcaacacccagtatcgctcttaaaaccgctaccggaaaaccatatcgcgggctggttctattacgtcaaacccggtgaatttgcctctccggaaagaggccagtcatccagccagtcaccgggaacggcgctaccttttcagtgtccggcatgtggtacatcctataaatacggcaaaggtaagctctccccaatccgtagctttcgcgtcggtttttcgaaaacgacacagctactggccagctcgctaatggcggaactacagcgatcgggtaaccgtgagcaactggtaacgttttcagacagtcgtcaagatgccgcaagggcggcgctcgatctggaatcgggtcatcatgacgacgtcagacgagaaattgttgtccattcgctgcagtccattgcggctgataaaccgtcccataaccaactaaaagtacgccaggcagagatagagaaccggaacaaaacactgattaacctcaacgtaaggtcggatgaggaagaggatgaactggatcaacttgctgatgaacgaaagaaaatcagaaggttattatcaaagcctgaagctgacagcatacctctgcgtgaaatcctcgaacctgaatcgccggatgcaggtcaaccacttggcttgctgttaagggcgcaggtagatgcaggcattcacccttccgatcgtactggtattgccccggttccagatcctgaaaaatatggagaaggcacgctgacctttgcatggcaacaactctttgaaaagaacgcgcagggggcgtggtgctggaaggcgcttccatcctatgaagacaacctgcttgtggcacgacaggaggtttcacgcgatctgaaacggctggtgggggaaagcatattcagtaaaacctacttcgcgctggaagagtccggttggggttatccctgccttcctattaccggaaacgactcacgggaacatctcgcgatttatgacgcaatgtttcgtgtgttggcggacgcgtaccgggtaactccttcacaatatacaaagccagaaaccccatggagttcagcgcgcgatgtcaatcgtagaaaccgcctgtaccgctttacgcaggagatatgccagcattcaggaggcgagcctttaactttaattgatagttttctccagcgactggagctggcgggtcatcagggcggtattattgatattggtaaaatgcactttcgcctggcggaacctaccgatcgcgtctggcgctgctcccgttgtgggcgtatacacatgcacaccggcgcgggaatctgtactcgctgctactctcctttatcagaaacgccgtgcagtgatgcaaaaacgctccagatgcaacattatctcggcaaacgcctctcacattcttctggtattcaccggatgcgctcagaagagctgactggaatgaccgaaaacccggcagcaaggctacgccggtttaaaggtattctgattgccgacgatgatgatattttgccggaaggaatgaaagattttgcgcccgatcgagatcttgaccgggcagctcgcgtagtagatgtcctttccgtaaccacaaccatggaagtgggtgtggatatcggtgatttacgtgcggtctttcaggccaacatgccgccacagcgctttaattatcaacaacgtgtcggacgtgccggacgacgtggacaagcgttttcattcgtattaaccgcgtgtcgcagcaagagtcacgatctgttttacttccggcatccggaaaaaattaccggcgatctacctcctccaccgtttttgaccacaaagctggaaatgatctgccagagactggtacgaaaaatctggctggtgtcagcattcaaatggttaagacagcaagcggaaaaagcagatcacccatggccagttgacgactacgcacacgtccctgataaccacggtgagtttttcccggtgcactggctgaaagaaaaccaaacggactggctgccaaaaatccggcaggctatcgaagcaaccatcctggcgcgcgatgaatttacacggacttgcacgcagcaagaccactatttgttccagaaaattattcagcctttgacgccggaacaactgattcaggatattaacgccgtgctgaacgacagtgcaatggaggcgaaaggactggcagaagcgctggcggaacacggtaaattcccaatgtatggcatgccgacccgaacacgtcttttgctgacaaggcctgtcagctcaggtgaaaaagaaatcgaatttgcaagcatggatcgcgatctggatattgcgatacaggaatttgcccccggaaaaattcttgttcaggataaacgacgttactttacagcaggttacagtggaatgcttaaacagagcagaaaaaatccacgatcattttattcaaatacctgcgaaccgggtgaactcagaacaatgaccgcatgtccggtgtgcaacatctgggctccggcaaactctttgaccaccgaatgtaccatctgcggcgccgttatggataaggcagaacgctatcaatgctatgttccttatggatttatcacaacgctggaaccaaaatcggcaaaagaggattttgatcaaatcctgaccacggccagtcgtgtatcaattgcagaagcctacactttttctgcaataccagagcctgacgttaatgtggcgatacagcttcagccgcaaacatgtctgcaccgcctgaatcggggaatttacaccgataaaacatggcgtggtttcagcgcaacacaggggagcttatcagttcctttcagaaaacaggggagttaccagccgctttgggcgaaccggatttggatggatagtcaaattattgaggccgatctgttagttaaaaatcgctttaccgatcggggagaaactcgaaacacattttatcttgccgcgcctaaagtgactgatctacttgcgctgatggttgcccaaaccccgccgggactccggctacagtattctactctaactcctgcattcagagctgctgctctctctgcgtcttttatcattgttaactatgcatcaaaagagctactggatattgatcctgaagaaatcgaaattctggaaccccgcgttcaaatactgaaaaacggtaagtcggtaccggttctgcaaatggccgatcgtctggtaaatggttcagggttatgtgaacggctacagcagaaggacgcatccggttctctcattatccttgaggtcatgaagaagattttaaataacaaaacggcttacccactggctgagttcctgcaatccgatcatcgagaacgctgttttcaggggtgttatcactgcctgcaccgatacggaaaccagccgtatcacggattactggactggcgtctgggactggatgttgttcaacttcttctggatcaaacctataacgctgggctgaacggtgatttcacctctccgggcgtagctgactggccggaaaatgccctgcgattagccaaagaagccgcttcgctatacagcgacagtgacgtaaaagtgatggggaatatacccgtgattcgcaccggggacgagcgctgggccgccgtactacatccattctgggatcccgatgctgcatttgctgcaagccccgaacttgaggcattttcatatgaggtgggcatagacgctacgaatacttttgctttgtcccgccgcatggggactgaaatggcgaaattacggactcaggcgtccacatctcaggagtga

SEQ ID NO: 27760 - DNA, 1086 bp, Enterobacter asburiae
atgaacagtattttcgagagagagagcgataatatccgggtactttcactattctccggttgtggtggtatggattttggaattacctcagctggtggagatatcgtctttgccaacgatgtcaaagagcatgcctgcaaaacattagggaactatttccccgatactgatatcaggcatagcgatatctctcaaattcagtcttttccagatgttgatattgttgttggtggctacccctgccagtcattttcaatggcaggtaacagaaaaccaaacaatgacgacagaacaaacctttataaacactttctgcgggtattagagactgttcgacctaaatattttgttgctgaaaatgtttcaggtttgaaacatttgggggcaggtagttttctggaacagcagctcacagcatacaaagctgccggttaccaagtcaaccatcatatggtaaacgcaagggcttacggcgtgcctcagtcgcgcaagcgtttgtttatcatcggtgctagaaacgatctggggcaatactttgaatttcctgctgaaacgcatggcaaagcgacaaaaaagaatcctcatttaaaaccctatgtttcacatggtgaaactattagggatttaccactatggcctgaaggtgagttttacgaacgaccacatgatcctgaagggcatttttcatggtatttcatgtctcgaaaccgtaaagctctatgggatagtcctgcttacaccgtcgtcgctaactggcgccatgtgacattacatcctgccagcccggtaatgaagttaacgtggtcaaatctagaggatgggtggaagcagcgctgggatttttctgatgaatatgagcatctaactgcggatacttctcgtcccaaactggagcaggcaagacggttatcatggcgggaatgtgcacgaatacaaacttttccacagggttttgaacctgtaggagacgtcgagtcaaaatttacccaaattggtaatgctgttcctccacttttggctgaggtactttttcggcatttattttctggtgatggtttgaaaaagatgacggcgaaaggtaattag

SEQ ID NO: 27761 - DNA, 2781 bp, Enterobacter asburiae
atggctaaaaagaaaagtattatcagcgaccggctgggccaaatgtactacttgggtacagaatctcatgaattgagtagatgcttgcaagaatgcaaacaaaggctcaccagaaatggcgctaaagcggataatttaccgaaaggaccagaaaaaaggctacattttctccgtacgttaccacctaaagccaaacctattgtgtctgattggcttcgtgaaaatttgacgttttctgaacaaaatgacccacaaaccgttcttagggatctgttagaagcagaaagtaatgagggagatattgaactctgtaaaccgctatggcgctcaatcctggaattctatatttcttctgactgccctgaaattataacgaaattcctaaacggcgaacaaattgatttatcccaaaatggtgtttctgactccctgacaattaatgtcactgatgaagacattgaacaatgtgccttgattagtcagggtaaagaaattcctatgccagagcgcactattccactgtttgttgggggattagttgatgcactccaaggaacgcgcacagccgataatcaatggcggacaaagctatcagaacattctttaccgctggcgcgaaaattgggtgaacttatcgaacaatttgaagccagtaacgacattaaaacaatggatggtaccagtgtaatacaagctcctcccgttgtgtccaaagaaatcgacggtgcgatggacgaagttatgtttattggaaaagttttagcgttaaccgcgtccggcgctttttttgttacgccggttagtctgttaattaatggcaacctgcgagatctcccggaggaactggtaaaagacattttcccccatggcggtgaagccattggttttgaaagctatttcagcaaaaaaattactcggggtgaaatagcaatatggaaagcccgatatcagccgtctgataaacctgcgcagtatgtcattactgactacctgtcgcgcgtttatcctgtagtcgcgcttccccatgcctccgatgagcctgacgctgtcagggagtggctactaaccaactaccagccgcaaaacgatacgccggtcatttttcagctaagtgatggcgtatccctgagattaccgggtgacttgccggatcctaaaaaatatgactttgatatgccgctggagagttatcgtcagattcctcagacactacttgactctcattccctcacggtgatcactgaactccctcagataagtgaaaaatatgattgcgcggaagccagcacgtggataaaacggctgcttaaacgaactgattcagcaaaatatttccctcaattcagtaaagggcagctacaaaatttaactcattttattgctgaacatgagtctgataacgaggcatcctatcttcgcgcagtatctcatctggaacagatagcagatatgagatcctttcttaataatacgactcaacagttactggctttacctgaggttgagacgcaaattaatattgagaaacaggaaatattggctcgttacgaagacgagctgcaccagattaaacaatcgataacggtattatctgaaaagaaaatacagcttgaaaatgaaatagccgatcagaagaaaaatttgaaaaaagaaactgatcgcattaataaagcgctacgtcagcaagaaaatgaactggaacaacggataaaaaagacctttgaagccgcatctcaagcgggagtggaaacgctggcccagacagcgttactgcgggcaataatcaaaaacgaaacaacacaggagcaacctgcccaacaacgaataacctcagaacctatagccgaatcagcaaattctaatttcccattagcagagacgaatgctctgactcgcaagcatcaactgatatcggctatcgaaaaagaggcactggcgacgggactaagtgaatctttcttatccagtctgatttccactgcgagtattacacccgcagtgggattgatgggaaaacagacaaaacaggctatcgcctcattagcgaaccttttagctggtaatgtttggggggaagtgtcggtacatagcgatcattttagcttcagtgatttaatgaactcccccacactgatccgcttatctggcaatactcttaccatgacgctgggtgattttttgacccaacaacaagaggcagggctggcgagcattgttgaattgcgtggttttaaccgcactccgccagaaactttgctccctgaactccaagagtgtttattcagaactccccatcctgccgcatgcagttggacggatcggcagcagtctctacgacatttacccattcggcacccgatactttttttactcacattcaccaccgggaaaagcacgtttccattacaggctcctcttgcttaccagttacccctgtttctggcagagaatatttggtcggatgaacggccatttgagcaaaatactggcatcacgccttctcgtattaccccagaactatggcaggcaatctttgtggacaaccaccggccagagtaccaggcttgtgcgccatgggaagtgttaaaagcagcgctactctctttacttcctgatgaacaagcgcaagccgttgcccgtctggcttacggtctcggccgtagtacaacactagatattgcggccacgattgacgttcttgccccagaattcgggccatatgttcaggaaatgactagcggcgactcggcaagcgtacttgagcaccttttccagttataa

SEQ ID NO: 27762 - DNA, 5997 bp, Enterobacter cloacae
atgaataatccactggaatcatttgaatcaataagggatttttacatcacctatcttgaaactgcttttcgtataggttcgcccgatattcaggcataccgacgtagcttactggaacagcaaggtacattatgtgcagatctttttctggaaccaatgccaagatatcaggattatggtttaaccatcagtgatttacgtaatgtggctgaaggtgaggaatggttgccagggtttaccgagcaacaaagggacgcatttatcgatctttgtctgggagggcttttgcctcgcgataaatccgactcctccaaaggacgttttaaactttatacccaccagctagacatgctgaaaagaggtgtacagcccgcaatgccgggcatcgttacatcaggaacagggtcaggtaaaacagaatcttttctgctgccagttctggctcaaattgtgaaagaagcgagtggttggccgaaaagtccctcgcttaaatgctggcagccgtggtggcataatggagtaaatactcagcctacgtttatgcgtgaggcagaagcatcagcacggccaaaagccgtgcgagcgctaattttgtatccaatgaacgcactggttgaagatcaaatggtgcgtatgcgtcgggcgcttgattcccgagaagcacatgaagcgatggatttacacttgggtggcaaccgtatcttttttggtcgttatactggcgcaacgaaagtcactggctggttaaaccatccccgaccggggagcgaggaaaaagagaaaaaagagaaaaaacgggtcgctggtaaaatcactgaattgcgcgaatatcttcaatccgtggaagacacgcatcgggaagctgtgcggcaggggattcgggatcatgatgataacctgcaattcaatttccctggtgtatcaggcggagaaatgcttagccgctgggaaatgcaaaaatcacctccggatatactgattactaacaccagtatgctttccacgatgttggtacgagagattgacgatcctatttttgaccaaacccgagaatggattgaacacgatcctgatgcctatttttatcttgtccttgacgaactgcatcttcagcgcggtacagcagggaccgaagtcagttatttgctcaaacatctcataaaccgtctggggctggatcaagaacagcaccgacataagctgcgtattctggcatccagtgcctcactgcccgttgatggccctgaaggtaagaaaagcgttgagtacttatgggggatgttcggtcagcgaggactgcctgtgagtgcagcagccaaagactgggcagattgcgtggtaaatggtgccatggttgctccagcacaggataatacgttgcatttccacggtgacctcaaccacttctgcaatacggtaaaacagctacagggatcctcactgccatctttgcaacattggtcaaacgttgcccgaagtatggggggctatcatgacgagcagtgtatggaaaaactggctcaatgggttgttgtgcaggccgcctgtatgcttgaaaaaggttgctatacatgtgaaaagtctctgcgtgctacatcaataaatgctctggcagcgcgtatatttccctcccattccacaggacgtgaggggattcgtgcattaatatggttacgtgctgctacagatagctggcctgagtggttttcacatccctttcccgacgatattccattgccacgttttcgcgcccatgcttttttacgggcgctggaaggattatatgcagcaccgctaccttccccgtcaaatgcatcaacagaagaaagagagcagcacttttttgccgatctgacggttgagtctggcctgcgttatggcgagcgtcactatgacaacaaaaaatcacgacgcgtagaattactctactgtgagtgttgcgccacactattttttggcggcaaaccctcttctttctcggcaacggatagccgcgtagagcttttacccaacgatcccgatattgatcaactacctgaacatgctaaatcggttatggttgaacgacgttccgccgaagaatatgcgttgtttatgccgactgtcgatcgattctggcctagaggagaaggaactccagccgatgaggactcttttgggaagtggattaaggctggttacgatccgtttactgcggcgattcaacacactttatcgcctataagatcgattgaacaaacacatattgcaggctggttctattatgtcccatcgggtgatttttcctctaggaaaagaggccagtcgtccagccagtcaccggggagtgcgctgcctttccagtgtccggcatgtggtacatcatataaatacggtaaaggtaaactatcacctattcgcagttttcgagtcggctttgcgaaaaccacgcagctcctggccagtacgttgatggcggaattacaacgctctggcgatcgggaacggctggtcacattttctgacagtcggcaggatgctgccaatgcggcgctcgatttggagtcaggtcaccatgatgatgttcgccgtgagattgttgtgcgctcgctgaaggaactgtcagcgagtcagtgctcccataaagaagtgaccatacagttagaacaacttaataaacgcagaaaagaactaattagcaaagagattaaagaggggcagctctctgcggatgaagacaaagaattaggacagctgtttggcgaaaaacagcggctgagtgacttattgctactgccacaggcagacagcgtatcgctgagcagtatactggagcctgaagcaccaatcgcaggcaacgtccttaatcctctgttggcaacattagttgaagcgggtattcatcctaccgatcgaacggggatatctcctgttcctgagccttcaaaacaaaaacatgatgaagaaactatcacttttgcatggcagcaattatttgaaaaaaacaaacagaccaaatggtgttggaagaaacatccttcctatgaggataatctggacgttgcccggaaggaaatctcccgcgacctaaaacaactggtcggggaaagcgtgttcagtaaaacctattttgcgctggaagaagcaggatggggttatccctgccttcctctggctaacagctgcacgcgtgaacagttggctgtctatgacgctatgcttcgcgtattggcggatgcctatcgagtcgcaccgtcccagtacacaacaacagaaacgcgctggcatgttgcagacgatgtgaagcctaaaaatcggttgcgccgttttagcgatgagctttgtaaccactccagagccaagacattattgctgattggggactttcttgtacacctcaaacgctctggtcatcagggcggcattattgacattggaaaagtgcactttcgtttagtagaggctaccgctcctttctggcgctgtagtcactgtggtcgcgtgcatttgcacaagggggcaaaactttgcacccgctgttatgcgccactacctgaaacatcttctggtaacgcgggggaattacaaacccaaaactatctcggtaaacgtatatcgtatgcttcccgtatcagtagaatgcgttctgaagaactcacgggcatgacggggaatccggcagcgagattacgccgttttaaaagtatcctgattgctgatgatgatgacatattgccaaaagggctggaggacttcgaacctcatcctgagttggatagagccgccagagaggtggatgtactctctgttaccaccacaatggaagtgggggttgatattggcgatctacgcgcagtttttcaggccaacatgccgccgcaacgttttaattaccagcaacgcgtagggcgagcgggacgacgtgggcaggcttttgcatttgtattaacggcatgtcgcagcaagagccatgatttattttacttccgtaacccggaaaagatcaccggcgatctccctccgccacctttcttaactactaaactggaaatgatctgccagcgcttagtgcgcaaaatatggctggtggccgcttttaagtggctcagagagcatgtagtggattcggggcagtcgtggcctgttgatggtgacaaacataaacccgacaatcacggagagttttttcaggttcattggctaaaagaaaatcaggcaaactggttgccgcgcattcgtaacgcgctgaaagaaaccatcaacgcgcgtgatgagtttgctcaagcgtgtatgcaacaggatgaaatattctaccgtacaataatccaccctctgacgccggaatgtgtaatacaagatattaaatcagtactggacgacgatgctatggcaggaaagggattggcggaagcgttggccgaacagggaaaattccctatgtacggtatgccaacccgaacacgacttctgctgacaaggccggttagtacggacgaacatgatgtacagttcgccagcatggatcgcgatctggatattgcgattcaggaatttgcgccgggtaaatatctggtacaggacaaacgccgttactttaccgcaggctatgccggaatgctgaagcaaagctacaaaaacccggccgaatttttcactgaagctgacgaaccgggagagtgcagggcgatgaccgtttgcccggtgtgcaaagtctgggtactggtgggctcgatgaccgttgtatgcagcgcctgcggtggggtcatggatggtgctgagcaatattcgtgttacgtacccaacggatttattaccactcttgaagataaatctgcaaaagaagactttgaccaaaccctgacggtggccagcagagtatctattgctgaagcttactcaattgagaatgcagtatctgtacctgactctaatgttgccatccagctaaaatcccaaacctgccttaacaggttaaatcgtggtgtttatgcggacaaaaaatggagtggtttcaatgcgatacaaggaaatttacgggttccattcagaaaggcgggagtatatcagccgctatgggcaaaccacgtatggatagacaataaccttcttgaggctgatttatcactcaaaaaccgctttacccctatgcaggaaagccgaaaatcgttttatctctcggcacctaaagtaaccgatttactggcgttgatgttggtggatactccggcggacctccagttacagtacttgcaaggcgcactgactcctgcatttcgggcggccgcgctatctgcttcttttatcatcgtcaactatgcttcgaaagagctacttgatactgatccggaagaaattgaaattctggagcctcgcgtacaaattttaaaaaacggtatttctgcaccgatattacaaatggccgatcgtctggttaatggttctggattatgcgagcgactacagcagatcgggagctctggctctccgattgttcttgaagtgatgaatgagattatcaatgacgaaggatcctatccactgaaagagtttttagaaccacagcatcgcgacgtatgttttcaggcatgttattactgcctgcatcggtacggtaatcaggcttatcatggcttgctcgactggcgtctgggactggatgtcattcaactgcttttggataaaacctatgatgccggactacgtggagatttttcatcccccggcatcattgactggacggttaatgccaaacgactggccgaagaagcatcgtctttatttaaggggagtgaagtaaaaatcgtgggaaatatcccgctgataggtattagcccacaacgctgggcggcagtactgcatcctttctggagttatgacggggtttttaaagctaatcctgaacttgaggtgctctcgcttgaggaagatatagtatttacaaatacctttgagctttctcgccgtatgggaactgtgatggcaaaactgtgcacaacacctcgttcgagcgaaaaatga

SEQ ID NO: 27763 - DNA, 1086 bp, Enterobacter cloacae
atgaatagtatttttgcaagagaaggagatgaaatccgggttctttcactgttttctggctgtggagggatggactttggtattgaatctgccggaggaaagattgtttttgctaacgatatcgttgaaaacgcgtgtaaaacattagcgaagtattttcctgatactgatgttaagcatggcgatatctctcaaattcaaacttttccatctgtggatgttgtcgttggtggctacccatgccagtcattttcgatggctggtaacagaaagcccagcgacgatgcgcggaccaatctttataagcaatttcttcgggtattgaatatcgttcgacctaagtattttgtggctgaaaacgtttcaggattacagcagttgggcgcaggtagctttttagaacaacaagttaacgcctatcgggatgcaggatatcaagttagtcaccatcttgttaatgcaaaatcttacggtgttccacagtcacgcaagcgcctgtttattattggtgtcagaaacgatctggggcaatattttgaatttccggcagcaacgcatggtaaagcgaccttaaagaacccgcacttaaaaccttatgtttcccatggtgaggctatccgcgatttgccattatggccagagggtgagttttacgaacgacctcacgatcctgaggggcacttctcatggtactttatgtccagaaatcgtaaggccaaatgggatagtcctgcttataccgtcgtagcgaactggcgacatgtgacgttgcatccagccagcccaatgatgaagttaacatggtcaaatcttgaggacggctggaagcagcgctgggatttttctgaagaatatgaacatgttgctattgattcaacccggcctaagctggaacaggctaggcgtttgtcatggcgggaatgtgccagaatacagacgtttcgtcatgattttgagcctattggtgatattgaatctcgatttactcagataggcaatgcagttcctccgttactggccgaaatcatttttcaacatctattttctggtgatgggttgaaaatgaatttgaggaagggtgaataa

SEQ ID NO: 27764 - DNA, 2778 bp, Enterobacter cloacae
atgagtatatctttccctatttctttagaagagtggaatgcagcactagttaacgccgttttttttgagccttcccgtgcagatgtatttttgagtcgaatcgatactactggaagaatttttgagcaattggctggttctcgtagtaaagaagaagctaagcaaagctttcttgattcatttggtaaggatgaaagaaaaatacaacgttatctcagagatgattcaacgcttgatagtctgactcgaataaaaggcatcccacctcatttttctattctatatttaacgttacttgccgccagtgctgataatgaaactcatgatgaaggagactttagggttaggttttctgtattattgggactgaataggaataagaaatttatttttagagatttgcctagcttatggcggagagttgaacaatggagtcagagtaaacagggttgttctcggttatttttacccgatccccaaaatgaaaagttgattgggtattctaaaaggctttcttttccttgttatagagatgaagttcgtttgcgagccatattggttcgtaataatctggacagccattcaacatttgagtctgttaataaagtaatacaccagagaattgatggttttagtgaagtattcgtcagtgaattcaatgaattttatacgctattatcaactgcagccatgcagcaggcatatagtagcccgttctggggggctgtgagggatattacgcggcatgaagaaaatcaacaagccagagagaatgggcttttctgcattcacttagacgctaccgatccgcaacttccagaaatttatctgttaatggatgatgttggtgctcagactttggataccgttaaaactgaatcgttaccagaaaaattggagagttacagtagcatttattatcagaccaacgttaatgctacattaacgagtttactttcatttctacaaaaaagaaaaaaaggcttaattggatcgcgggttggcatggcgctacatgctgggtgtttaccccttttcagggatgattctgggtttatcagttcggatggtcattattttgacgatggcttggtttgtttgattattcgtcgtgaatatgctgtacatattcgcactaggtttgaacatactggcctgactgttatgacgctaggaaaaaatacagattctgaagattgggaagttctagtctttgacacgatgagtaggcaggaattaaccgaacttgccaaattacttcctggtgctgctcgtagatttatggttcagagttggatacctgctcgaccttatatcacaggtgcagcccgttttggacagtcaatattacttaacccagccagtacgccggttattcatatggtgggtgccattggcggggaatatgtaatcagagattccaatcatatagaactggtcagcggcatactaacaccaacacaagggggtgaaggactatttatttctccggaaaaactcacttcattatcaggacaggcgttttgtcgctatcggttaacgcttgagaagcatgttgaaccgttggtttttgacattcacgtcctcgatcatgcgccggatgctccgtatcgtaaagttgccgaacagcatgactggcttattgatggtcaacggggaacattagtgccattaaacaatgttgagtcaatggagtgtctgaaaaaccaaaaaactacctcactaggcggatcatggtcgctatggcgacgtgatgaacgtgtgcctgtagagagtaaacagtttgatttgcacatgcttcctgccgcatttgactggttagctgaagcactggcactgcgttttcaaaaacgcagtacgctaccatttgatgagcttaatacacatataacgcccgtatcactagcgacaggtattcctgcatggcggttgcgccggttgctttttgcctcaggctggctttgcgtaatagaaagacgacatgcgccgtatccggtggtatcactggcaaaacgtacattatctgtttgtgagacggtacaaggactcactgcccgagtaagcggtatgttgacgaaaagcgagcgtcatcatctgcaaggtttgttgaaagaaagtgaacgggtaagacgttggtcaacagtggataataattttgcacttggcagtattgaattgattttgtcaggagccgatcgcgtaaaagatttgcttgaacgattcaattggcagcttctagtcagaaaagatttttctgttggcccattaagtggcgtgctgttatccatgactcaaataaagcaagttccagctttgccacctgatatttatgtggcgttctggcagacaaaaaagaaccaatggtcagaggaaatccagccaacaaatagcgacctgttaatgcgctgtcgggaaaaacaacgtaatcgttattttattcgggcggatacggggtactggcaaactgatagctttgcctgggcgttaatggctcacatcatgaggtcggaaaaaacgcttggcactcaaagtcactatggcgatctcttctggtctaaatcactaattactttaccgatttctgtcactcagtggtggttacatttcgccggtggttgttgtaccgtcagtgatgacggaaggataatatttgctggtagaggggatgaattgtggggaggcgttgagtgtgatgataatgctgttttcccggttaaccgagcggtcactcggcgggcgagagctttggcgctacgcaggataagcagcataaattaa

SEQ ID NO: 27765 - DNA, 2814 bp, Enterobacter cloacae
gtgtctaaaaaacaacatatcattaaagaaagattgaggcagatgtatctctttggtgcagagccttttgagttgatgaactgcctgaaagaatcgcagcaaaagctgattatggctggtgctaaagcggacaatttgccaaaggttccgaacaagattttacattttttgagtgcattaccacctaaggcccattccattgtgctaacgtggtttcgtactcacgtacaatttcctgaacaaggcgatccccaaaaaatcattcatgagattctgctcgcagaaaataacgataaagatatctcatcaccaaaaccgctatggcgcgcaatccttgggttctacgtcactcagccttgccctgacatcgtcgcacaatttcttcgcggtgaagaaattacactactccataatgatgaccctgatgggtccagcgatagtttacctgagcagtcaacgattagtgttactgatgaagatatcgagcagtgtctattcgtaagtcaaggacgtgacatatcgccttcagatcgaataattccggcgttcgttgctgggcttgttgctatgttgaagggggaaacggaagttgcagatcagtgggtgtcacagttatccaatcacccactgcctttggggcaaaaatttggtaggctcatctcaacgtttggcgtcgttcgtcctcaggaagaggctgacaacggaatagtattattggcagagcctgttgcgccagacgagatcaatggcgatatcgatggagtgtcctttgtcggtaaagtgacgaaagtgcttccctctggcgtattctttgtttcgcccgttggcctgtttattgacgatgaactgcgggatctttcagatgctcacagccatatgctctatcccgatcgtggcgaagttataggatttttaaatcattttacaaataatgtgacccatggggaattaggcatatggcaagcgagacacaagccatccgataaaacggcccagtgtgcattgactgactaccagtctcgcgtatattccgttgttaaaatcccctatgattccagcgaaccggatgcgattcgtgaatggctattaacctgttaccaacctcaagataaatctcctactatcttcttcttaaccgatggtctggcgctaagattacctggagacattcttgatcctaaaaaatatgattttgacgtacctctggattcttatcgggaactaagttgtgttgaactgcgctctcagtcaatcactatagtgcctcaactccccggattgagcgaaaaatatgattgtgcgcctgccattacatggataaaacggctgttaaagttagactattcatcgacagattttcctgttttcagcaaatcacacttacagcgtttagctcactttatggctgaatatgagtcagataatcgaagtgcgtatttacgcgcattgacgcaacttgagaaggttgcggtttcaagagaatttctggacggtagcattcaacaactgttgacgttgccgacaataaagacgcaaatctgcgcagagaagcaagtaatactggctcagtatgaaagtgagcaggaacaactcagacagacgattgcatcactgatggataagaaggcgcagttggatgcagaaattaaccgacaggaaaagacgctaaaaagcgaaacaaaccgtataaaaaaagcgctacgccagcaggaagctgagctggattcacgaatcaggcaaacctttgagcaagcgtctcaggcgggtatagaaacgttggcacagacggcgttgttgcgaacgatgatcgctggttcggccacacccacacccgttataccatcagaacgaatcaccgaacccgcctcgagccttccgttacctcagtctttactaccgccggaagtaaatgaaataaacagcaaaagagtgctacaggctgcgatcgaagaacaggcagcgattaccggactaagcgaaaatctgttgttcagtttgattgctgccgcaaatgttgtatcagttgtcggattaacaggaaaatacgcccagaaaacggtcgtttctttagccaatattctgtcgggaagcatatggggggaggtctctattcatggtgatctttttagtatcagcgacttaatgaaatcacctgtgctaatcaggagtacaaatagcacgagctctatgacgctgggtgacttcttggagcaccaacaatcaagcgggttaatgactatagtaaaactacgcgggtttaaccggatgccgccggaaacattacttcccgaacttaacgaatgcctgtttagcagtgaatattctgcgggattatgctggaaggatcaaaatcataccttgcggcacctttcgttcagttaccctgtattgtttgtattgacgtttgccgttggtaaaagtacgttcccattacaggggccggttgcccaccagttgcccgtatttatggccgaatatagcagtacacaggttgagcagactgaatactcaccagccgaatatacttcagatattgctcccgcgtgcgtggcctccaaattatggtcttcgttatacgccgatgctcaccctaaagataatcagcagcaaactatgcgggcggtgttaaacgcattgggttattccgacgaaaaatctcaggcgctggcaatgctggctttcactattgggcgcagtaccacagaaaaaataaccgcagaaattgagccattggctcctgcattgataccttatgttcaggaaatcactcacggtgcatctgtaaccgtgcttgatcatctgttccagctataa

SEQ ID NO: 27766 - DNA, 5997 bp, Enterobacter cloacae; identical to SEQ ID NO: 27762

SEQ ID NO: 27767 - DNA, 1086 bp, Enterobacter cloacae; identical to SEQ ID NO: 27763

SEQ ID NO: 27768 - DNA, 2778 bp, Enterobacter cloacae; identical to SEQ ID NO: 27764

SEQ ID NO: 27769 - DNA, 2814 bp, Enterobacter cloacae; identical to SEQ ID NO: 27765

SEQ ID NO: 27770 - DNA, 5997 bp, Enterobacter cloacae
atgaataatccactggaatcatttgaatcaataagggatttttacatcacctatcttgaaactgcttttcgtataggttcgcccgatattcaggcataccgacgtagcttactggaacagcaaggtacattatgtgcagatctttttctggaaccaatgccaagatatcaggattatggtttaaccatcagtgatttacgtaatgtggctgaaggtgaggaatggttgccagggtttaccgagcaacaaagggacgcatttatcgatctttgtctgggagggcttttgcctcgcgataaatccgactcctccaaaggacgttttaaactttatacccaccagctagacatgctgaaaagaggtgtacagcccgcaatgccgggcatcgttacatcaggaacagggtcaggtaaaacagaatcttttctgctgccagttctggctcaaattgtgaaagaagcgagtggttggccgaaaagtccctcgcttaaatgctggcagccgtggtggcataatggagtaaatactcagcctacgtttatgcgtgaggcagaagcatcagcacggccaaaagccgtgcgagcgctaattttgtatccaatgaacgcactggttgaagatcaaatggtgcgtatgcgtcgggcgcttgattcccgagaagcacatgaagcgatggatttacacttgggtggcaaccgtatcttttttggtcgttatactggcgcaacgaaagtcactggctggttaaaccatccccgaccggggagcgaggaaaaagagaaaaaagagaaaaaacgggtcgctggtaaaatcactgaattgcgcgaatatcttcaatccgtggaagacacgcatcgggaagctgtgcggcaggggattcgggatcatgatgataacctgcaattcaatttccctggtgtatcaggcggagaaatgcttagccgctgggaaatgcaaaaatcacctccggatatactgattactaacaccagtatgctttccacgatgttggtacgagagattgacgatcctatttttgaccaaacccgagaatggattgaacacgatcctgatgcctatttttatcttgtccttgacgaactgcatcttcagcgcggtacagcagggaccgaagtcagttatttgctcaaacatctcataaaccgtctggggctggatcaagaacagcaccgacataagctgcgtattctggcatccagtgcctcactgcccgttgatggccctgaaggtaagaaaagcgttgagtacttatgggggatgttcggtcagcgaggactgcctgtgagtgcagcagccaaagactgggcagattgcgtggtaaatggtgccatggttgctccagcacaggataatacgttgcatttccacggtgacctcaaccacttctgcaatacggtaaaacagctacagggatcctcactgccatctttgcaacattggtcaaacgttgcccgaagtatggggggctatcatgacgagcagtgtatggaaaaactggctcaatgggttgttgtgcaggccgcctgtatgcttgaaaaaggttgctatacatgtgaaaagtctctgcgtgctacatcaataaatgctctggcagcgcgtatatttccctcccattccacaggacgtgaggggattcgtgcattaatatggttacgtgctgctacagatagctggcctgagtggttttcacatccctttcccgacgatattccattgccacgttttcgcgcccatgcttttttacgggcgctggaaggattatatgcagcaccgctaccttccccgtcaaatgcatcaacagaagaaagagagcagcacttttttgccgatctgacggttgagtctggcctgcgttatggcgagcgtcactatgacaacaaaaaatcacgacgcgtagaattactctactgtgagtgttgcgccacactattttttggcggcaaaccctcttctttctcggcaacggatagccgcgtagagcttttacccaacgatcccgatattgatcaactacctgaacatgctaaatcggttatggttgaacgacgttccgccgaagaatatgcgttgtttatgccgactgtcgatcgattctggcctagaggagaaggaactccagccgatgaggactcttttgggaagtggattaaggctggttacgatccgtttactgcggcgattcaacacactttatcgcctataagatcgattgaacaaacacatattgcaggctggttctattatgtcccatcgggtgatttttcctctaggaaaagaggccagtcgtccagccagtcaccggggagtgcgctgcctttccagtgtccggcatgtggtacatcatataaatacggtaaaggtaaactatcacctattcgcagttttcgagtcggctttgcgaaaaccacgcagctcctggccagtacgttgatggcggaattacaacgctctggcgatcgggaacggctggtcacattttctgacagtcggcaggatgctgccaatgcggcgctcgatttggagtcaggtcaccatgatgatgttcgccgtgagattgttgtgcgctcgctgaaggaactgtcagcgagtcagtgctcccataaagaagtgaccatacagttagaacaacttaataaacgcagaaaagaactaattagcaaagagattaaagaggggcagctctctgcggatgaagacaaagaattaggacagctgtttggcgaaaaacagcggctgagtgacttattgctactgccacaggcagacagcgtatcgctgagcagtatactggtgcctgaagcaccaatcgcaggcaacgtccttaatcctctgttggcaacattagttgaagcgggtattcatcctaccgatcgaacggggatatctcctgttcctgagccttcaaaacaaaaacatgatgaagaaactatcacttttgcatggcagcaattatttgaaaaaaacaaacagaccaaatggtgttggaagaaacatccttcctatgaggataatctggacgttgcccggaaggaaatctcccgcgacctaaaacaactggtcggggaaagcgtgttcagtaaaacctattttgcgctggaagaagcaggatggggttatccctgccttcctctggctaacagctgcacgcgtgaacagttggctgtctatgacgctatgcttcgcgtattggcggatgcctatcgagtcgcaccgtcccagtacacaacaacagaaacgcgctggcatgttgcagacgatgtgaagcctaaaaatcggttgcgccgttttagcgatgagctttgtaaccactccagagccaagacattattgctgattggggactttcttgtacacctcaaacgctctggtcatcagggcggcattattgacattggaaaagtgcactttcgtttagtagaggctaccgctcctttctggcgctgtagtcactgtggtcgcgtgcatttgcacaagggggcaaaactttgcacccgctgttatgcgccactacctgaaacatcttctggtaacgcgggggaattacaaacccaaaactatctcggtaaacgtatatcgtatgcttcccgtatcagtagaatgcgttctgaagaactcacgggcatgacggggaatccggcagcgagattacgccgttttaaaagtatcctgattgctgatgatgatgacatattgccaaaagggctggaggacttcgaacctcatcctgagttggatagagccgccagagaggtggatgtactctctgttaccaccacaatggaagtgggggttgatattggcgatctacgcgcagtttttcaggccaacatgccgccgcaacgttttaattaccagcaacgcgtagggcgagcgggacgacgtgggcaggcttttgcatttgtattaacggcatgtcgcagcaagagccatgatttattttacttccgtaacccggaaaagatcaccggcgatctccctccgccacctttcttaactactaaactggaaatgatctgccagcgcttagtgcgcaaaatatggctggtggccgcttttaagtggctcagagagcatgtagtggattcggggcagtcgtggcctgttgatggtgacaaacataaacccgacaatcacggagagttttttcaggttcattggctaaaagaaaatcaggcaaactggttgccgcgcattcgtaacgcgctgaaagaaaccatcaacgcgcgtgatgagtttgctcaagcgtgtatgcaacaggatgaaatattctaccgtacaataatccaccctctgacgccggaatgtgtaatacaagatattaaatcagtactggacgacgatgctatggcaggaaagggattggcggaagcgttggccgaacagggaaaattccctatgtacggtatgccaacccgaacacgacttctgctgacaaggccggttagtacggacgaacatgatgtacagttcgccagcatggatcgcgatctggatattgcgattcaggaatttgcgccgggtaaatatctggtacaggacaaacgccgttactttaccgcaggctatgccggaatgctgaagcaaagctacaaaaacccggccgaatttttcactgaagctgacgaaccgggagagtgcagggcgatgaccgtttgcccggtgtgcaaagtctgggtactggtgggctcgatgaccgttgtatgcagcgcctgcggtggggtcatggatggtgctgagcaatattcgtgttacgtacccaacggatttattaccactcttgaagataaatctgcaaaagaagactttgaccaaaccctgacggtggccagcagagtatctattgctgaagcttactcaattgagaatgcagtatctgtacctgactctaatgttgccatccagctaaaatcccaaacctgccttaacaggttaaatcgtggtgtttatgcggacaaaaaatggagtggtttcaatgcgatacaaggaaatttacgggttccattcagaaaggcgggagtatatcagccgctatgggcaaaccacgtatggatagacaataaccttcttgaggctgatttatcactcaaaaaccgctttacccctatgcaggaaagccgaaaatcgttttatctctcggcacctaaagtaaccgatttactggcgttgatgttggtggatactccggcggacctccagttacagtacttgcaaggcgcactgactcctgcatttcgggcggccgcgctatctgcttcttttatcatcgtcaactatgcttcgaaagagctacttgatactgatccggaagaaattgaaattctggagcctcgcgtacaaattttaaaaaacggtatttctgcaccgatattacaaatggccgatcgtctggttaatggttctggattatgcgagcgactacagcagatcgggagctctggctctccgattgttcttgaagtgatgaatgagattatcaatgacgaaggatcctatccactgaaagagtttttagaaccacagcatcgcgacgtatgttttcaggcatgttattactgcctgcatcggtacggtaatcaggcttatcatggcttgctcgactggcgtctgggactggatgtcattcaactgcttttggataaaacctatgatgccggactacgtggagatttttcatcccccggcatcattgactggacggttaatgccaaacgactggccgaagaagcatcgtctttatttaaggggagtgaagtaaaaatcgtgggaaatatcccgctgataggtattagcccacaacgctgggcggcagtactgcatcctttctggagttatgacggggtttttaaagctaatcctgaacttgaggtgctctcgcttgaggaagatatagtatttacaaatacctttgagctttctcgccgtatgggaactgtgatggcaaaactgtgcacaacacctcgttcgagcgaaaaatga

SEQ ID NO: 27771 - DNA, 1086 bp, Enterobacter cloacae; identical to SEQ ID NO: 27763

SEQ ID NO: 27772 - DNA, 2778 bp, Enterobacter cloacae; identical to SEQ ID NO: 27764

SEQ ID NO: 27773 - DNA, 2814 bp, Enterobacter cloacae; identical to SEQ ID NO: 27765

SEQ ID NO: 27774 - DNA, 5997 bp, Enterobacter cloacae; identical to SEQ ID NO: 27762

SEQ ID NO: 27775 - DNA, 1086 bp, Enterobacter cloacae; identical to SEQ ID NO: 27763

SEQ ID NO: 27776 - DNA, 2778 bp, Enterobacter cloacae; identical to SEQ ID NO: 27764

SEQ ID NO: 27777 - DNA, 2814 bp, Enterobacter cloacae; identical to SEQ ID NO: 27765

SEQ ID NO: 27778 - DNA, 5997 bp, Enterobacter cloacae; identical to SEQ ID NO: 27762

SEQ ID NO: 27779 - DNA, 1086 bp, Enterobacter cloacae; identical to SEQ ID NO: 27763

SEQ ID NO: 27780 - DNA, 2778 bp, Enterobacter cloacae; identical to SEQ ID NO: 27764

SEQ ID NO: 27781 - DNA, 2814 bp, Enterobacter cloacae; identical to SEQ ID NO: 27765

SEQ ID NO: 27782 - DNA, 5997 bp, Enterobacter cloacae; identical to SEQ ID NO: 27762

SEQ ID NO: 27783 - DNA, 1086 bp, Enterobacter cloacae; identical to SEQ ID NO: 27763

SEQ ID NO: 27784 - DNA, 2778 bp, Enterobacter cloacae; identical to SEQ ID NO: 27764

SEQ ID NO: 27785 - DNA, 2814 bp, Enterobacter cloacae; identical to SEQ ID NO: 27765

SEQ ID NO: 27786 - DNA, 5997 bp, Enterobacter cloacae; identical to SEQ ID NO: 27762

SEQ ID NO: 27787 - DNA, 1086 bp, Enterobacter cloacae; identical to SEQ ID NO: 27763

SEQ ID NO: 27788 - DNA, 2778 bp, Enterobacter cloacae; identical to SEQ ID NO: 27764

SEQ ID NO: 27789 - DNA, 2814 bp, Enterobacter cloacae; identical to SEQ ID NO: 27765

SEQ ID NO: 27790 - DNA, 5997 bp, Enterobacter cloacae; identical to SEQ ID NO: 27762

SEQ ID NO: 27791 - DNA, 1086 bp, Enterobacter cloacae; identical to SEQ ID NO: 27763

SEQ ID NO: 27792 - DNA, 2778 bp, Enterobacter cloacae; identical to SEQ ID NO: 27764

SEQ ID NO: 27793 - DNA, 2814 bp, Enterobacter cloacae; identical to SEQ ID NO: 27765

SEQ ID NO: 27794 - DNA, 5997 bp, Enterobacter cloacae; identical to SEQ ID NO: 27762

SEQ ID NO: 27795 - DNA, 1086 bp, Enterobacter cloacae; identical to SEQ ID NO: 27763

SEQ ID NO: 27796 - DNA, 2778 bp, Enterobacter cloacae; identical to SEQ ID NO: 27764

SEQ ID NO: 27797 - DNA, 2814 bp, Enterobacter cloacae; identical to SEQ ID NO: 27765

SEQ ID NO: 27798 - DNA, 5997 bp, Enterobacter cloacae; identical to SEQ ID NO: 27762

SEQ ID NO: 27799 - DNA, 1086 bp, Enterobacter cloacae; identical to SEQ ID NO: 27763

SEQ ID NO: 27800 - DNA, 2778 bp, Enterobacter cloacae; identical to SEQ ID NO: 27764

SEQ ID NO: 27801 - DNA, 2814 bp, Enterobacter cloacae; identical to SEQ ID NO: 27765

SEQ ID NO: 27802 - DNA, 5997 bp, Enterobacter cloacae; identical to SEQ ID NO: 27762

SEQ ID NO: 27803 - DNA, 1086 bp, Enterobacter cloacae; identical to SEQ ID NO: 27763

SEQ ID NO: 27804 - DNA, 2778 bp, Enterobacter cloacae; identical to SEQ ID NO: 27764

SEQ ID NO: 27805 - DNA, 2814 bp, Enterobacter cloacae; identical to SEQ ID NO: 27765

SEQ ID NO: 27806 - DNA, 5997 bp, Enterobacter cloacae; identical to SEQ ID NO: 27762

SEQ ID NO: 27807 - DNA, 1086 bp, Enterobacter cloacae; identical to SEQ ID NO: 27763

SEQ ID NO: 27808 - DNA, 2778 bp, Enterobacter cloacae; identical to SEQ ID NO: 27764

SEQ ID NO: 27809 - DNA, 2814 bp, Enterobacter cloacae; identical to SEQ ID NO: 27765

SEQ ID NO: 27810 - DNA, 5838 bp, Enterobacter cloacae subsp. dissolvens SDM
atgttagaccctattggcggctttcgccgtattcaggatttcttcatttcatatatagaaaccagctttcgtattgccgatccttcagtttcggcctcaagacgtaatcttttgaatagcagtggagaatttgctgcggagccctacattgagcctgttttacgatatgagtcttctgataaaacgcttgaagctctggccgagatggaaggtgggccgctaaatagtttatctcacaaaggccgtaaggcgttcgtcgaattagcgttatccggcctgttcgattcaaaacctggtgatgaagtctggccgcgtcgttcggtccatgcgccatatagccaccagactcaaatgctggagcgtggtatttctcctggttgccccggtattgttacatcgggaacaggttcaggaaaaacggaaagttttatgttgcctatactggccgcactatcgaatgaagctgttagctgggcggccccttgcgacggttatctgcaaaatcgatggtggaacgatgaaaaaacaagctgggtttctcgtcgcgaaggagaaaaacgtcaggcggcagtcagagcgctggtgctgtacccgatgaacgctctggttgaagatcaaatggcgcgtttacgtaaaacattagattcagataacgcgcggaaagtgatggagcatcgcttcgctaggaatcgaattttctttgggcaatatactagcgcaacaccaattactggctatgccaaccacccacgtctttccggagtcaaatcggaaaaaagtcgccgtgctcgtaatcttgaaaaattacgtaaggcgttgaagcgaattgatagcgatcagcaggctgcgcgcgcattcgacgaaaaagaaaacccttcggaaaagacccgatatatattcccttcgacagacggtggggaaatgatgtctcgctgggatatgcaggctgccccacctgacgttctcgtcactaacgcctcaatgctaggggcaatgctttcgcgcgaagttgaagacggtatatttgatgctactcgcgaatggttgatgaataacaacgacgcatacttctatttggtatttgacgagctgcatttattacgtggttccgctggaactgaaaccgcgatgttgattaagtcgctgattgtaagactcgggcttgacgacccgaaacatcgttacaaactgcgtttactcgcgtcttcagcatcactgccgatggaaggtgtcgatggagagcaatcacggaaatacctacgcgatctattttcgcccttcggtacttgccgcgattctttcgatcccggtagcgatgagcctgatttttggcgtaactgcgtcattcagggaaaaccttatataccatcgaaaccagaaggaaaaatcgccgtgcggcctttcgccgcattgatgcgtgttgcccttgaggggcagggaaatgttgttcgcaatctgaacatgacggacgcgcttagtaaagctttgtcaaatgtcttccaagctttgggcgtgaaagcacaaaatgatgtgcaaggcattaaacaagcagcggaaaaagcagctgccctgctgaccaacgcttgcattgaagaaggcagcgagtcgccgcgagcgatgccgccgggactcatcattgataagatttttctgaaggaagagacggataaacaagatgaattggaattagcattacgcggattaatgctggtacgcgcactgccggaatccgggatggattgtgagcaactcgcgaacgtcacaccagcttttcgcgtacatacattcgtcagaaatattgaaggtttcttcgcctccgtagcaccgggagaacaaaaggcaaaatttgctgatttttgtatggaacgaggcctgtctcacgcgccttcggccccgggtagagatcgcggtcgtcgtttatttgaaatgctatactgcgaagcatgcggtgatttactgctcggtggtcagaaggggcagaatcacggtaaaacaatcgaattattaccttcggcgaccaatctggaaaatcttcccgaacgtcccggtgctgaatattacgatgatatgacgctggaggagtttgcggttttttggcctgtcgatatagccgggcggcctcctataggctgcgaaaaagggtgggatgtctgggaaaaagcggcgcttaatcctgttacaggcattgtgaccattgggcaggaaacatcgacgaatactgatgcggttcgcgggtatctctatttccaaaatcctgttaaacctaaaaaaggcgagccagcgaagaatccttctgctcagcctttctgctgccctaactgtgggattgactattccagtcgacctgccagcaatcgttccagatcgcccattcgcgcatttcgcactggtgtgacgaaatcatcccaactggtagcaactgagctatttgaattactccatgcaatcggcgcggaagcaaagagtatcgttttctccgacagtcgacaggatgcggcatcaatggcgctggaaatcgaacggttgcacttacgcgatttacgcagggaaattttggttgccgcttccagagcaatgattaacgaggctgaaaggaggtatatttcagacgaggatattgaagactggaaagccaaagccaaacaatctggagattacgatgagtatatcagactgcatgaccttcaaaaaagccaagatggaattactgagctttgtaaatatcgacggataaaaatcgacaaattacttgagtctgaaggtgactcaatcggaagaatcacgtctgagctcgtcgggctaggtatatcgccctataaatatcgttctaattcagatgagaatgataattctgtttggcatacaaatttcataaaagaaggaggggatattaggttcagtgaaaggcttcctgctcatgaacgaatgaaaataaaaacaaaaatatcctacgatcaatctgaattgatagatgatgttatttttgccaatacttttttcgctctggaagaaacagggctggcatacccgtgcatctcagataaagatgatatgccggaaattgatgcctggctaagggtattttcaggtgcctatcgtattaaagagaataaatatttcgatgcaagtcgtacacgtgattggtatgttgggaaagatgttgaaaaagagaaggttaagcgcgtcgccagagccttgttcggtgatggcgggtatcaagatggtttaacgagcatcttaaataaactttctctgcttgatcataaagcaggactaatcaatatcggtaagttgttcctcaaaataagtaaaccaggcgatcattactggcaatgtgcaaattgtgggcgaattcacttacatctaggatttaaatattgtacccgttgtgtgaatgaactcgaccttgaacctagcggaattgtcgaagatctttgggaggaaaactttctcggtaagcgcattgtacgtggagagcgagatggagttaaacgtttccggctgaacgtcgaagaattaacgggacagacggatgatttctccgatcgtttgcgtaagttcaaggggatttttgtcgataagatgagtgaacttgaaaagcttgattcggaaatagacatgctcgccgttaccacgacaatggaagtcggaattgatatcggttcacttcagtcggtttatcaagccaacatgccacctcagcggtttaactaccagcagcgcgtcggtcgagctgggcgacgtggccaagctttttctttcgttatcacattttgtcgcggacgaactcatgatgcttactatttcgctcatcctcatgcgatcaccggagatccaccgccgccaccttttctggcggtagatcatgatgccattccattaagacttatgcggaaagtatggcttagagctgcatttaatcttttacgtgaagaggatcataaaaacggtacagctttccctggggataaactcgttccgcctgatattcatggcgaatatgtatctacgcatgattactatcatagcgatgaaactaattgggctgaacgattgctgggagcgttgaaagcaacgcagaatatatgtgatcgctttattaacgcagcaacgttcgatccagagcaaaaacaacggcttaatttattgttaaatgcggggaaaataattgatgaaatcgctgagctgaaaatttatatccctgaagaggatatggggcttgcacgtttcctggccgaacatggtaaattgccgatgtatggaatgccgactcgggtgcgcaacctttatttgggattgcgtaaaacaaaaggtctgaatgcacaagaagaatacgaatggtcgacgatggatcgcgatcttgatctcgcagttttcgagtatgctccaggctcagtattaatcaaggataagaaaaagcatgaggtaataggcttcacaggtaattaccaagagccgcaggtccagaacaatcgcatatcggatctctcgacggtgggctcgtggctggagtcttgtagccatgtagcagtttgcccggcatgtggttccgccaagctagagctacataaacctgaaaacaacattaattgcgaggattgctgcacgcctatcagtcctgacgaattcaggctttatatcacgccagccgcttttcgtacggatttcaaacccaaagacgatatggaaaattttatccgcatgtcgttgaaaaccacagcgacagtgttacatgaaggcgttccaacaaaatgcgattccttcactgttcaacgcggcgaagtgaccattctacggctcaacgatggtcccattaatggggaaaaggaaggcgaacgatttaatgttgacttggtgtacgatcaaaaagcaccaatgcccttttcaactaattgcccgtcagttaaaggcgatcaggctatcgactcagactggctaaaatcgcacaataacccgcgctggcagtttcgtggcgagaaaaaaagctttgggcttgtatcaagtaaagagacggagtctcttcatcttgaaataacagaattcaatactcgccttaatctggatatggtcgccagatacggcgagtacatgaatttgcctacgcgcgcggcggctatcagcgcgacccagatcttaactcataaggcagcactctatctcgatgtttcgccagatgaatttgaaatgcttgaaccccgactgcatcttggtaaacccagattgcaaatcgccgacgcgttaatcaacggctcaggattatgcagacggcttgccgaaccagcaactgcagacggcttaccgctgatagtcaagttattacatgagattctcgaagagaatgacaactggccgatgattgattttttaaacaaagatcacccgattcaatgccaaaccgcgtgttacaagtgcatacagcgctatggcaatcggcaatatcacggcttgctcgactggcgtttaggtatggcctatctacgggcgatggttatgcccaaattcgcatgtggtctgaatgccgcagactggaatcagccagagatgaaaggatggagagaaagagcgttccaattagcggaagacgtagaggctctacgaccagcaacaatcaaattgttaaaagattattcgttacctgtgcttatcgaaatgcaggacgggaaagagctttggagagcggccgtaacgcatcctttatggcaatggagagatgacaaacgcgatgcactgattaattcttttggattggctgacggggagtcgcctcttctgttcattaatacgtttgaactggaaagacggccgctgcgtgcgctggcgaaccttaaacggagttaa

SEQ ID NO: 27811 - DNA, 1236 bp, Enterobacter cloacae subsp. dissolvens SDM
atgagcactaaagccgtcacgagagacaatcatttaacggaacttcacgaagcgggattcagtttctatgagttttttgcggggggcggtatggccagggctgggctgggaaaacattggcaatgtctgtttgccaacgatatggacccggtaaaagcatcgacatacatcgacaactggggcgacgaacatttcgacatgcgcgatgtacgcgaagtagcccccgatgaactgccacttcatgccgatttaagctgggcctcatttccctgccaggatttatcgctggccggcaatggcctggggattggcgaaagagattccagcgcggatgagaccacgcgttccggcgcagtatggccgttcctcgatttaataagcaggctcagcgaggaaaaccgtaagccgccgattcttgttcttgaaaatgttcttgggttgctaacgctgaatcaaggtagccatttcgctgctatatgtcatcagttaagtaaaactggctaccgatatggcgcaatgatcattgatgcgaagcattttcttccacagtccaggccccgcgtatttcttgtggcgattagtcgccatgtttccattcccgaatgtttggtttcagaagaacctttgccgcaatggcattctccttcgctcattcgagcctgcgaagcgcttataaaggatgaccgcaatgactgggtctggtggtcgccaggcaatatgccaggagcaagaacgaaggaattagatgacttaattgattttgaggatgataacgcgctttggcattctttcgatgaaacacaacggctgatcggtatgatggcaccggcgaatctgtcgcgtctggcgaaggcgcaggcatctggcgtggcaattgtaggcagcctttatttacgcatgcgcaaagaaaaaggtgtcaacaggcaacggaccgaaattacgttctcgcccgttcttggttgtcttagaacaccaaaaggcggggcttcacgtccgcgtattattgttgttaagggcaaccaggtaaaaacgcgtttgttatcggtcaaagaagcggcggcgttgatgggtttgccggatgattttattcttccggcggcttatcaatcggcgtttaaagtgatcggtgacggcctcgccgttccttccgtccgttttctggccgagcgtattttggagccactggctatggctgtccgaactagtacccatcgaacggaggatattcgcgaatga

SEQ ID NO: 27812 - DNA, 2553 bp, Enterobacter cloacae subsp. dissolvens SDM
atgaattggacgtcgcccgttacgcctgatggttgggaaagtaaactgattgattattttctccggttccgcgctgacggcgacgcgcaggatattcgctggtttgaagttacgccggcgacgctcgcggcggcattcgccgaaagcggggttagcgaggatgaagctgaagaagcgtttcgaaaatgtatgtcgaaaatacgggatctgccgcagcgcctggaaagcggtatgatggaaaagtcgactcgtcgatcgcccggatattttacttatcttatcatgacgctgcttatcagcagtcaattcgacgcgcaggacgaacgtaatgattttcgcctgaaattacagaactggctgcaggtcactcatagttttcaaaacttatccggcattaacaagatgtgggaggcattggccgaatggcttaggcaccgtattcaggaaggcgaaccctacaggcgtcttatcttgccgccacgggatggctgggtccagatcggtcacaccttgcgactagcattcccgaataaagccgatctgcggctgatgagcgaatgtcttgagagctatccgcaagccgccgctaacccgcgccagttaatcgagtactttcaaatttttattcaaagacagggtgtttctcatgcgctgaaggaggctttcactgaattcagagacgcgtggttattgggacgtcgcgcactgttcgatatgcccttctggcgcttgcgccaacgagcagtgcagatatcgtcctgtgtaatgactcaccaaactatcattgatatgtacctcgacttcgacggttcgcggtgctatttcagcgtcgcaggcgagagtgacgaaagggtttttcattctacgttatccgaagcccttatcgctcgcgacgccgcaaacagcggaaatctggggaaagcaacgcaggttggcttactctttttttatgaaatcgggcacgggcgctggagagcgacatcgtcccccgacgtagattctcaacgttttcatatcgctttatccagtaaacactctgtacaaataagtaagcgccttaatggatatattacagaagacgagtggattttaacggcgcaggcgctgaacagattttcagcggtggatatattccgctcaataagctcctcttcgagtattcaggatgacgacgttatccgccctcagctatatgggggaatacgcgtccctggcggatggctaggattacctgcatttttgccttttgttgagtcagatacgcgaagctacagaatatatgcatccgggaatgttgatgcaaggacaaacgtttctgtaatagatggtcgtttgatttcttctgtaccgcttaacggtgaaattttcatcgagccaacccttgatacaggtgagaaaacgccgccgtggcgccggcgcgcgcgttttttcactcgtgccgtaccgcacccgactttaggcgaaagcgcaagataccggtttgagccgttttgtgactggtcgacgtcttcacttaaggtgccggcgtttaatttcgaagaaaaatttcagtgggaagatagcgaagaatgctgcgatcatcttttggaggtgatttacgccagcggagccagcggttgggaagaagctgagttatttgcgcttctcagacatgtggacggtaatatcaacgtatggcatttgattcgttgtttacaaaatgcaggtctgatcgagccacgcctgcgttctgggtggaaaggtcgggcatggacgctggttaaaccttcattgcttcatattcgcaatggagaagattctcttgtggttgtggaaggtgcggtctgtgccagtctgatcgatgattttaaaaaagcggtcgccggactgggcggagaaagtttccgtcgtcgcggcgtaagcctctggtcgccccctgtatttggggccgcactcgctaatccggattcgttatcccagcgtctaggatggccgcttatcgaaatcccatcatcacccgatacattacctctttcactggtcacaacggaacgcgccgctgaattacacgagtcagtggcgatctggaactggcgttcaggaagatttcagcagcatggttccaaggataaagagtctgcttcgctgtcacttcatattcatcctggcggacgggatcatgatatctatcgagttgtttccggaagaaaaacaacacattatctttctagaactgcagctattatcgccgctggcgcaaaaaatcgggaacccatttttgaacgcgtcaccaaaaatcatctgctatgtcttatcaatgattgcggccttcccgacgcactagctgcgggaatacggcgttatacgcttagaaacggaggtccgtttgactccggctacgcatatcctgttgatgatgtctctttcctctggttagagtcactgctaccgggatgtttctgttccctttctccaaatggcgagggtgatttgagcagcataaacaccgccagtcgccattccgggggaaaagtgcgtctgatatggcgaaatggtcagctaaagctgacgtag

SEQ ID NO: 27813 - DNA, 2073 bp, Enterobacter cloacae subsp. dissolvens SDM
atgggcaaaatcccttggtatcttggtcaatttgatcgcagaaattatcagtcttaccttaaagctattgcacaggaaacgcctgttggttggcgttcgatcgataaccctaagaaactgtttcctcgcacgggagaagttgagtttaacgaggctgaggctttgtcgcttcgtaagggagattgggccgcttttcatgttgggcctggcactcgcaacagagcacaggcgaaacatgcccgccgtatttatccttattatgatttatcttctggccagacactattggaaacgcgtcgccaactgagtttcgatggtataacaacagatggcgagccgggattatgggctattcgttttggcgcggatggcctgattttagcaaatctagctgagtcgaaatcaggttgtctgatcctgtctaaaagccagaacgtatatgaatatgattttcatggaggtgtcgtaatttccgtatctggcatatctgaaagcggaaaattgttttatatgcctgatgtcgatgcgtcacctgcttatatccatgactggacgccggataagcagtacatcgaaaacgttattcaaatactttcctgcgctgattcgacagcagcaattgcttcatggcttcgggtgcacacaaatgagcaaaacggaaaattaacttccggagtcaatgaccttctggctgcagctcaaacgctccgggcaggagagttggctaagaaactggaagaagaggattcgttgactcgtcagtttacagaagccgtcttgaaggaccagtatatcgcccagcttctcgagcatcagatacaaaaaatcgcggaagaagagcgagtcgcgttgcgtgccgaacagtataggtcgcttgataaagagttttctactgaacgactgcgacgtcgtgaagttattgaaacggaaatgtctgtttttgagaagacaaggaaatgcgagcttgaagaggatattgcacaattacgacagctcgaagaagaaaaactgcagattgattttgcaaaaaagcaagcggacttagaacgaacgctcaaacaggaaaaagagtatcttgaaaacgaaattagccgtttgaaagacgcttgcgctgagttatgtgctcagaacgcaaatcagcaacagatactcactaccctgatcagcgagcataaagcatgtttggcatctttaaccgatgtcaaagaatgtactgctcaggcaaaaaatgaactcgaaaaaatggatatcgccattgccgagaaggctcgtcgaatggcttactcagcaatccccgaagtacgccttccagcgcaagcaagagtaatatcctgtgaagaattcggtcatagcgttagagagaacaagttactgacacccgatggaaagatactcatgacgcaatttcttgcgttgatgttggctggtgagtgtccgttgctatatggcccagaaacacaagacttccttgctattgccgaatcgctaatttcttcaggccgctccatccgattggttgccgatccgacgatgatttcctgcggggatctttgggttcgtgcaggaaatcatctggcgacgccgctttaccaggggttattgttgagcgagtcttcttatcccagaacgatcctcgccgtcattgagcgtgtcgaatgttccgctgcgcgtttctggttgccagcactgaaagaacaattgtacggtggtgatttcccccgacgctttctgatttgcggcacgattgaaaacgaagattgtgaagaaacggagaaaatgaaggaacaacatcttcgcctgcgaatggaaaatgttgtcattcggaatgcgattgggttatcccctttacatctttcttcagaaaatcatagcgagctggatcccggcccggcatcgcaaggctctctcccggacagactcgctattgcggatgaaatgtcagctggacgtttggatctggcatatacactacgggcgatgagaacagcgcatgaagtcgggctgcttgatgctcaaaacaaatcgatgtatcaggaaaatttaatagatttatacgccgaaattaaagaataa

SEQ ID NO: 27814 - DNA, 5997 bp, Enterobacter hormaechei subsp. steigerwaltii; identical to SEQ ID NO: 27762

SEQ ID NO: 27815 - DNA, 1086 bp, Enterobacter hormaechei subsp. steigerwaltii; identical to SEQ ID NO: 27763

SEQ ID NO: 27816 - DNA, 2778 bp, Enterobacter hormaechei subsp. steigerwaltii; identical to SEQ ID NO: 27764

SEQ ID NO: 27817 - DNA, 2814 bp, Enterobacter hormaechei subsp. steigerwaltii; identical to SEQ ID NO: 27765

SEQ ID NO: 27818 - DNA, 5997 bp, Enterobacter hormaechei subsp. steigerwaltii; identical to SEQ ID NO: 27762

SEQ ID NO: 27819 - DNA, 1086 bp, Enterobacter hormaechei subsp. steigerwaltii; identical to SEQ ID NO: 27763

SEQ ID NO: 27820 - DNA, 2778 bp, Enterobacter hormaechei subsp. steigerwaltii; identical to SEQ ID NO: 27764

SEQ ID NO: 27821 - DNA, 2814 bp, Enterobacter hormaechei subsp. steigerwaltii; identical to SEQ ID NO: 27765

SEQ ID NO: 27822 - DNA, 5949 bp, Enterobacter sp. DC1
atgaataacccactggaaacatttgaatcaataagagatttttatatttcatatcttgaaacggccttccgtattgattcatcagacatacagtctggacggcgagcgttactggaacagcaagggacattatgcgcagatctatttcttgaaccgatgccccgatatcataactatggcttaactatcagtgaattacgaaatgatgctcatggtcagatatggttgccagggtttaatgcgcagcaaaggaatgcattcatcgatctctgtttaggtggacttctgccctgcaataaaacagatccgactaagggacgttttaatctttatacccatcaactggacatgctgaaaagaggggtacagccagggaagccgggcatcgtcacctccggaactggctccggtaaaacagaatcatttttgctgccggttctggcgcagatcgcaaaagaagccactggttggccgaaaagctcggcgttgaagcactggcaaccgtggtggcataaggtagcggataaacagcctagcttcatgcgtgagcatgaagccgctgcacgtcctaaagcggtacgcgcgctgatcctctacccgatgaatgccctggtagaagatcaactggtacgtatgcgacgggcactggattctagggaagctcatgatgtcatggatgcgcattttggtggcaaccgaatcttttttggccgttataccagcgcaactaaagtaactggctggctcaaacatccccgactcaatgaagaaaaaaatgagaaaaagcgcgtggctaaaaaaatcactgagctgcgtgagtatatgcaattaatggaagagacccatcaggaggcggtacgacaagcgcagcaggacaaggataacgaattatcgtttaatttccccagaaccgctggcggagaggttctcagtcgctgggaaatgcaaaagacaccgcccgatattctgatcaccaacaccagcatgctctcaacgatgctggttcgtgaggtggacgatcctatttttgaacaaacccgacagtggattgagcgtgaccctgatgcctatttttatcttatccttgacgaacttcatctacagcgaggaaccgccggtaccgaagtcagctacttgcttaaacatttgatcaaccggctggggctggatcaggaaaaacaccgacacaaattgcgtattctggcctccagcgcctctttacccgttgaagggtctgaaggtgatcaaagcgtcgagtatttatgggggatgttcggtcagcggggattacccgcaggtgcctcttccagcgactggagagaatgtattattaaaggtgacacccttcccccgggcaatatgtctcttttcctgggggagctggaggcgttttatcacgcagtgcttcagttacagcaagcaccatttacctcattacaacactggcagaatgtcgcccgcagcatgggaatgacagctagtgaagcctctacagaacaactagcgcaacgagtcgttttacaggcgggcaacctgcttgaaagtggctgctatacggacaatcattctccgagagctacgtcaatcaaaatgcttagttcacgcctttttaacgcccaaccccatagtgacaaagcgctccaggcattaatctggttacgttcgactgagggagactggccgcaatggttttcacatgcctttcctgatgatatcggtgcgccacgtttccgcgctcatgcttttttgcgcgctcttgaggggttatatgtcgcgccattgcccgtccctagcgctgcatctgcgcaagaaattaatcacagatattttggcgatcttaccgtggagtccggcttacgttacggcaaagataaaaaatcgcggcgtgtcgaattactctattgtgaatgttgcggtaatctctttttggggggtaaaccttcggtcttttccggttcagaaagtcgaattgaacttttacccaacgacccggatacggaacaactgcccgaacacgcaaaatcagtcacggtagaacgccgatctgctgaagaatacgcgctatttatgcccgtcgtcgaacgtttctggccgaaaggagatgaggagctaaacagcgataatgacaatacttttggtacttgggtaaaagccagctacgatccatttaccgccactattcaacacccagtatcgctcttaaaaccgctaccggagaaccatatcgcgggctggttctattacgtcaaacccggtgaatttgcctcctcggaaagatgccagtcatccagccagtcaccgggaacggcgctaccttttcagtgtccggcgtgcgggacgtcctataaatacggcaaaggtaagctctccccaatccgtagctttcgtgtcggtttttcgaaaacgacacagctactggccagctcgctaatggcggaactacagcgctcgggtaaccgtgagcaactggtaacgttttcagacagtcgtcaggatgccgcaagggcagcgctcgatctggaatcgggtcatcatgacgacgtcagacgagaaattgttgtccattcgctacagtccattgcggctgataaaccgtcccataaccaactaaaagtacgccaggcagagatagataaccggaacaaaatactgattaacctcaacgtaaggtcggatgaggaagaggatgaactggatcaacttgctgatgaacgaaagaaaatcagagggttattatcaaagcctgaagctgacagcatacctctgcgtgaaatcctggaacctgaatcgccggatgcaggtcaaccgcttggcttgctgttaaggacgcaggtagatgcaggcattcacccttccgatcgtactggtattgccccggttcccgatcctgaaaaatatggagaaggcacgctgacctttgcatggcaacaactctttgaaaagaacgcgcagggggagtggtgctggaaggcgcttccatcctatgaagacaacctgcttgtggcaagacaggagatttcacgcgatctgaaacggctggtgggggaaagcgtattcagtaaaacctacttcgcgctggaagagtccggttggggttatccctgccttcccattaccggaaacgactcacgggaacatctcgcgatttatgacgcaatgtttcgtgtgttggcggacgcgtaccgggttactccttcacaatatacaaagccagaaaccccatggagttcagcgcgcgatgtcaatcgtagaaatcgcctttaccgctttacgcaggcgatatgccagcgttcaggagacgagcctttatctttaattgatagttttctccgacgactggagctggcgggtcatcagggcggtattattgatattggtaaaatacactttcgcctggcggaacctaccgatcgcgtctggcgctgctcccgttgtgggcgtatacacatgcacatcggcgcgggaatctgtacccgctgctactctcctttaccagaaacgccgcgcagcgaggcaaaaacgctccagatgcaacactatctcggcaaacgtctctcacattcttctggtattcaccggatgcgctcagaggagctgactggaatgaccgaaaacccggcggcaaggctacgccggtttaaaggtattctgattgccgacgatgatgatattttgccggaaggaatgaaagattttgcgcccgatcgagatcttgaccgggcagctcgcgtggtagatgtgctttccgtaaccacaaccatggaagtgggagtagatatcggtgatttacgtgcggtttttcaggccaacatgccgccacagcgctttaattatcaacagcgtgtcggtcgtgccggacgacgtggacaagcgttttcattcgtattaactgcgtgtcgcagcaagagtcacgatctgttttacttccgccatccggaaaaaattaccggcgatctccctccgccaccgtttctgaccacaaagctggaaatgatctgccagagactggtacgaaaaatctggctggtgtcggcattcaaatggttaaggcagcaaacggaaaaagccgatcacccatggccggttgacgactacgcgcacgcccctgataaccacggtgagttttttccggtgcactggctgaaagaaaaccaaacggactggctgccaaaaatccggcaggccatcgaagcaaccatcctggcgcgcgatgaatttgcccggacttgcacgcagcaagaccatcatttgttccagagagttattcagcctttgacgccggagcaactgattcaggatattaacgtcgtactgaacgacagtgcaatggaggcgaaaggactggcagaagcgctggcggaacacggtaaattcccaatgtatggcatgccgacccgatcacgccttttgctgacaaggcccgtcagcacaggcgaaaaagaaatcgaatttgccagcatggatcgcgatctggatattgcgatacaggaatttgcccccgggaaaattctggttcaggataaaagacgttattttacagctggttatagtggaatgcttaaacagagcagaaaaaatccacgatcattttattcaaatgcccccgaaccgggtgaactcagaacaatgaccgcctgtccggtgtgcaacatctgggctccggcaaactctctgaccaccgaatgtactatctgcggtgccgttatggataaggcggaacgctatcaatgctatgtcccttatggatttatcaccacgctggaaccaaaatcggccaaagaggattttgatcaaatcctgaccacggccagtcgtgtatcaattgcagaagcctacactttttctgcaatgccagagcctgacgttaatgtagcgatacagctccagccacagacatgtctgcaccgcctgaatcggggaatttacaccgataaaacatggcgtggtttcagcgcaacacaggggagcctatcggtccctttcagaaagcaggggacttaccagccgctttgggcgaaccgggtttggatggatagtcaaattattgagaccgacctgttagttaaaaaccgctttaccgatcgaggtgaaacccgaaacacattttatcttgccgcgcctaaagtgactgatctacttgcgctgatggttgcccaaatcccgcctgggctccggctacagtattccacgctaactccggcattcagagctgctgcgctctcggcgtcttttatcattgttaactatgcatcaaaagagctactggatattgatcctgaagaaatcgaaattctggaaccccgcgttcaaatgctgaaaaacggtaagtcggtaccggttctgcaaatggccgatcgtctggttaatggttcagggttatgtgaacggctacagcagaagggcgcatccggttctctcatcatccttgaggtcatgaagaatattttaaataataaaacggcctacccgctggctgagttcctgcaacccgatcatcgcgaacgatgctttcaggggtgttatcactgcctgcatcgatacggaaaccagccatatcacggattgctggactggcgtctgggactggatgttatccaacttcttctggatccaacctataacgccgggctgaacggtgattttacctctccgggcgtgtctgactggccggaaaatgccctacgattagccgaagaggccgcttcgctatacagcgacagtgctgcagaaatgatggggaatatacccgtgattcgcacaggggctgggcgctgggctgccgtactacatccattctgggatcccgatgctgcatttgctgcaaatcccgaactggaggcattttcatatgaggtggacgtagacgcgacgaatacttttgctttgtcccgtcgcatggggactgaaatggcgaaattacggactcaggcgtcctcatctcaggagtga

SEQ ID NO: 27823 - DNA, 1086 bp, Enterobacter sp. DC1
atgagcagtgtttttgagagagagaacgataatattcgggtactttcacttttctccggttgtggtggtatggattttggaattacctcagctggtggagacatcgtctttgccaacgatgttgtagagaatgcctgcaaaacattagggaactatttccccgatagtgatatcaggcatagtgatatctctcaaattctggcttttccggatgttgatattgttgttggaggctatccctgccagtcattttcaatggcaggtaacagaaaacctaacaatgacgacaggacaaacctttataaacactttctacgggtattagagactgttcagccgaagtattttgttgctgaaaatgtttcgggcttgaaacatttaggggcaggtagttttctggaaaaacagctcatggcatataaagctgcggggtatcaagtcagctatcatatggtaaacgcgagggcttacggcgtgccccagtcgcgcaagcgtttgtttattattggcgtcagaaacgatctggggcaatactttgaatttccagctgaaacacatggcaaagcgacaaaaaagaatcctcatttaaaaccctatgtttcacatggtgaggctattagggatttaccactatggcctgagggtgagttttacgaacgaccacatgatcctgaagggcatttctcatggtatttcatgtcccgaaatcgtaaagctctatgggacagccctgcttacaccgtggtagctaactggcgtcatgtgacattacatcctgctagcccggtgatgaagttaacatggtcaaacttggaggatggctggaagcagcgctgggacttttctgatgaatatgagcatctaattattgatacttctcgtcccaaactggaacaggcaaggcggttatcatggcgggaatgtgcacgaatacaaacttttccacagggttttgagcctgtaggagacgtcgagtcaaaatttacccaaattggtaatgctgttcctccactgctggctgaggtactttttcggcatttattttctggtgctggtttgaaaaagatgacagcgaacggtaattag

SEQ ID NO: 27824 - DNA, 2766 bp, Enterobacter sp. DC1
atggatgattctttcccggttactttagaagaatggaatgctgaactagtaaagatcgtctttcttgagtcttcgcatacgggctcgactttaagtcgtattgatactacgggccgcatttttgagcaacttgcaggtccacgtagcaaagaggatgctaagcgaagtttcctgatttcgtttggaaaaaaagcgtctaaaatccaagatgctctcagagatgagtcgcgattagacattttagcgcaaataaaaggataccctacttattttgccgttttatatttaacattacttgctgccagtgctgatgatgaaacacatgacgaaggggattttcgggttcgattttctgtgctgctaggctttgataaaaataaaaaatttgtttttactgaattacccaacttatgggaaaggttagaaagatggagtagtaaaagacaaaactgtacccgtttaatcttgccaaggccatcaaagcatgaaagattgattgggtattccaagagaattgctttcccctgctacaaagatgaggtctttttacggaatattctcatcgataataaattagataactattcaacttttgaatcagttaataaggtagtacatcaatatatatcttattttagcgaagtttttaaccaagagtttattgagttcagaacattactttcaaaggctgccatgcagcaggcttatgactctcctttttggggcgctgttcgtgatatcactgtacacacagagagagaacaactcaaagagaatggtaagtattgtattcacatggagtttaatgattcaggtaatccggagatttaccttcttatggatgacgctgctgctacagcctcagaaatcaagcattattactccttgcctaatgaaatagagaactataataatatatattacgaacgagacataggcaccacattaaattccttggattttttattaaaaaaacggaagggttatttctataaatcacgagcgggagtcgcactgcgttctgggtgtttgccgctttttcgtgatgatttttgtcatattagttcagaaggagaatattatgaagattctccaacctatttaatacttcatcatacatatgcagacagtattttcactgtcttgaagaaggttggcgaaagagtacaacgtcgggatattaaatctaccaaatggtcgatagtttcttccgataaagttggcaggcaaacgctggataagattgcccgtttgttaccagaagaagcccgtcgttttctaatacagggatggcagcctgctcgacctcgtatgtcaggcgcagcgcgatttggacaggctatactgcttaaccctgccagtacaccgataattcatatgcctgaagtactaagaggatgctatgtcatcagcaataaagacggagaagaattaactcatggctcgctatctcagggagctgaaggattattcatcccaccagaggagttgatggaaatatctggtcaggcattttgtcgctacgaacttacgttagcgcattcagatatcccagtaaattttgatgtacacgtgttagatcacgcgccttacgccacttattgtaaaattacagagccacatgattggcttattgatggaccatcgggagtattaatggcgttaggggatacggcagtgatccccccactgaaacgcgaagaaataacaccattgagtggtgctcagatgttatggcagtatgaaagttgccttcctgtaacatgccaatataccgagttacataatatacccgcagcatttgactggctcgctgaggcgctggcattgcgttttcaacgtcgtagcacattgccttttggtgaattaaaacaacatattgaccccgtatcacagttaacgaggatacccgagtggcaattgcgtcgcatgctctttgctgctggctggctttgtgtagtacaacgacgtcatgcgccatattcgttagtctcattggctgaaagaaccatttccgttgatgttactgaacagagaattattgcccgaattatgggaatgtttacaagaagtgaacgtaatcttctacaagaaacacttaatgacggtgagcgaatagggcgtcggttagttgaggataacggctgttcaatagggtgtattgaattacatctgtcagccagagatcgtgttcatgctttcattgagcagtttgggctacgtttggttaatcacgacgatttacccgtcaatgctttgagtggattattgctaccgttgtctcaaatgcagtttatcccgactttacctccggatcttcatgtgtcgctttggcaagctgaaaaatatcaatggtcagaagaacagcggctaactcaaacggttaataacctattgatacgatgtcaggaaaaacagcgttatcgttattttattcggcagaacgccgggtactggcaaaccgatagcttctcctgggccttaatggctcagatgatatgttcaggagtcatgttcggtgtgcaaaaaggcgatagtgactggtgctggtcaacgaaaatcattgcattaccaccctccattttacagtggtggatccacgttgctcacggatgtttgtcgataacagataatggtagctacctatttgcaggcggcaaagtaccactctggaataatgtaatgaccttcccctcctgccaacgagcgttggcacgacggaacagagcgctgacgatacgcaagctgcgcagaaccttacaataa

SEQ ID NO: 27825 - DNA, 2781 bp, Enterobacter sp. DC1
atggctaaaaagaaaagtattatcagcgaccggctgggccaaatgtactacttcggtacagaatctcatgaattgagcagatgcttgctagagtgcaaacaaaggctcaccagaaatggcgctaaagcggataatttaccgagagggccagaaaaaaggctacattttctccgtacgttaccacctaaagccaaacctattgtgtctgattggcttcgtgaaaatttgacgttttctgaacaaaatgacccacaaaccgttcttagggatctgttagaagcagaaagtaatgcggaagatattgatctctgtaaaccgctatggcgcacaattctgggattctatatttctcctgactgccctgaaattataacgaaattcctgaatggcgaacaaattgatttatcccaacatggtgtttctgactccctgacaattaatgtcactgatgaagacattgaacaatgtgccttgattagtcagggtaaaaaaattcctatgccagagcgtactattccactatttgttgggggattagttgatgcactccaaggaacgcgcacagccgataatcaatggagaacaaagctatcagaacattctttaccgctggcgcgaaaattgggtgaacttatcgaacaatttgaagccagtaacgaccttaaaacaatggatggtaccagtgtaatacaagctcctcccgttgtgtccaaagaaatcgacggtgcgatggacgaagttatgttcattggaaaagtgttagcgttaaccgcgtccggcgctttttttgttacgccggttagtctgttaattgatggcaacttacgagacctcccagaggcactgggaaaagatctttaccctcatagcggtgaagccattggttttgagaaccatttcagcaaaaaatttgctcggggtgaaatggcaatatggaaagcccgatatcagccgtctgataaatctgcgcagtatgtcattactgactacctgtcgcgcgtttatcctgtagtcgcgttaccccatgcctccgatgagcctgatgctgtcagggagtggttactcaccaactaccagccgcaaaacgatacgccggtcatttttcagctaagtgatggcgtatccctgagattaccgggtgacttgccggatcctagaaaatatgattttgatatgccgctggagagttatcgtcaggttcctcagacactacttgactctcatgccctcacggtgatcactgaactccctaaggtaagtgaaaaatatgattgcgcggaagccagcacgtggattaaacgcctgcttaaacgaactgattcagcaaaatttttccctcaattcagtaaagggcagctacaaaatttaactcattttattgctgaacatgagtctgataacgaggcatcctatcttcgcgcagtatctcatctggaacagatagcagatatgagatcctttcttaatgatacgactcaacagttactggctttacctgaggttgagacgaaaattaatattgagaaacaggaaatattggctcgttacgaagacgaacagcaccagattaaacaatcgataacggtattatctgaaaagaaaatacagcttgaaaatgaaatagccgatcagaagaaaaaattgaagaaagaaactgatcgcactaataaagcgctacgtcagcaagaaaatgaactggaacaacggataaaaaagaccttcgaagccgcatctcaagcgggaatggaaacgctggcccaggcagcgttactgcgggcaataatcaataatgaaacagcacaggagcaacctgcccaacaacgaataacctcagaacctgtagccgaatcagcaaattctaatttcccattagcagagacaaatgctctgactcgcaagcatcaactgatatcggctatcgaaaaagaggcactggcgacgggactaagtgaatctttattattcagtctgattgccactgcgagtattacacctgcggtcggattgatgggaaaacagacaaaacaggctatcgcctcattagcgaatcttttagctggtaatgtttggggggaagtgtcggtacatagcgatcattttagcttcagtgatttaatgaactcccccacactgatccgcttatctggcgacactcttaccatgacgctgggtgattttttgacccaacaacaagaggctgggctggcgagcatcgttgaattgcgtggttttaaccgcactccgccagaaactctgctccctgagctccacgagtgtttattcagaactccccatcctgccgcatgcagttggacggatcggcgggaggctctacgacatttacccattcggcacccgatactttttgtactcacattcaccaccgggaaaagcacgtttccattacaggctcctcttgcttaccagttacccctgtttctggcagagaatatatggtcggatgaacggccatttgagcaaaatactgacatcacgccttctcgtattactccagaactatggcagacaatctttgtggacaaccaccggccagagtaccaggcttgtgcgccatgggaagtgctaaaagcagcgctactctctttacttcctgatgaacaagcgcaagccgttgcccgtctggcttacggtctcggccgtagtacaacacaagatattgcgaccacgattgacgttcttgccccagaattagggccatatgctcaggaaatgactatcggcgaatcggcaagcgtacttgagcaccttttccagttataa

SEQ ID NO: 27826 - DNA, 6030 bp, Gemmatimonas aurantiaca T-27
ttgcaggaccccatcggcggtttccagcgcatccgcgatctttacatcacatacctcgagacggcattccgcatccgcgaccccggcgtgtcgcgggaacggcgcgcgctcctggagcggccgaatacgttctgtaccgagccactgatcgagccgttgccgcgctacaggagcgtcgactggctgctccacgagctggctaaggccgatcccaaggattcacggctgcctggcttcgacgtgcgtgagcgtgccgcattcgccgacctggcactcgcgggcctccttgactcgaagcccgccagggaagacaacgaatcccgactcgctgagtacgagctatacgagcaccaggcgcagatgctctggcgcggagtgcaacccgggcaccccggcatcgtcacatcggggacgggctcgggaaagacagaatcattccttttgcctgtgctcgccatgctggcgaaggaggcggtgcggtggccggcaccgagcgcggactacctcaagcggcgctggtggcaaacggcgtctggcgagccctatcctaagtacgacggtgatgacggcgtgccggatcgaccgacggcccgttcgaagagcgcatctcccttcaaactgcagcgcgtgggtgaggccgccgggcgcccggccgcggtgcgcgcgttgatcctctacccgatgaacgcgctcgtcgaggaccagctcgcgcggatccgtcgtgcgctcgattccgatctcgcgcggcgggtcatggaccgccacttcgccggcaatcgcatcttcttcggccgctacaccagcgacacccccgtcacgggctaccataagcacccacgcgcgggcaccaaggagcacgaacgtcgtaaccgaaagctcgccgagctgttccgcgcgtcaaccgcaattcagcacgcgcaggagcgcgcgcggatgatggatagagagcgaggcgcctcatcagaggacgtgcgctttctctttccgactgtcgatggcggggagctgacgtcgcggtgggacatgcaggagacgccgcccgatctgctgatcacaaacgtgagcatgctgaacgccattctcgcgcgcgaggtggactctccaatcctcgaccgcacgcgagattggctgacgagcgacgacgacgcttactttttcctggttctcgacgagctccacctgcagcgcggctcggccggcaccgagacgtcgtacctgctgcgcctgcttttcgagcgcctaggactgaccgacccggcgcatcgtcataagctgcgcatcctcgcctccagcgcctcgctgccgacggagggtgaggccgggcagagcagtctcgcgtatctctgggacatgttcggccgccatggccttcaggctgggccgcgtcgtgaggtcgagaatccccgagaacgctggcaccacgccgtcgtgcctggtgtgacggtggacgttgagccatcgtcgctccagccgctggacccggcgccctttttcgccctgctcgaggcagcgggcggcgacctccaggacgaagccacggcgcccgcaccagccgaggccgaggtcgaatggcgaggggttgcacgggcactcggcggtgagaggatggaagcaggcgatctggacggagtcgtggccgcctgcgtacgtgaggccggcgcacgcatcgcacacgcctgttggagcgaggaggagaggcgcgctcgcgcgatgccgctgtcgaacatcgcgcggcgcgtgttcgggcgttcggatgctgatacgctctgcgccgcgcgcgcgcttctgctggtccggggcgctggagatgcgtggggccgttggtgggccaccgagcccccgacggcgccttcgtttcgcatccacaccttcttccgaagcatcgaaggtctcttcgcaccggtcggcgacctcagcggtgtgcctccccagtggcgatcggcgagccgccttgtcggggagctctccgtcgagcgtggacaacgctttgctcgcgtcgggagcggggatcctgggagccgccttgtcgagctggtctactgcgagtcgtgtggcgagctgtttctcggcggccgacggggagggcgcgagaccgcaatcgagctcctgccggcggaacccaacgtcgacaacctccccgagtcggccgggcaggatttcttcgagacactctccgcagatgaatacgcggtcttctggcctgtcgagtcttggccgggcgttctgccgagcccgagggatgacgtccacgttggggagtggaagcgcgcctacctcgaccccatctcggccacgatccagtttccgcgaatcggtaacggagtgcccgagggacgcatcaccggctatgtctgggagcgtggcgatagccaggatcgccacaagcgccgaaaggaatcgccggggacagcggtgccttacgagtgtcccgcctgcggctccgactattactggcgaaacgcgccgctgcgcctctcaccaatccggaacttccgagcgggttttgctaagacgacgcagctgctcgcgaccgagctgttcgatctgctaagactgcgccagcgtgagccgaagctggtggccttctcggacagtcgtcaggacgccgcgaaggcggcactcgatatcgagcgccgacatcatgaggacctccgtcgcgaagtggtcgtggagagcttgcgcgccgttgcgggagcgcgcccggacgggacggctctgcaagcggaaaaggaacgcctgacgaaggaggcgcaggcccacgccgtcgcgggcaatcttgccgcggccttcgcacttaagccgcggctcgacgaactcgagaccgccctggccaacggtgcggatggagccgatctgccggtggcggtggtcctcgagagcacgcgagagaacccgcgcttcttcggctcgcgcgcgacgcgcgagccactgcggccacttctcgcggagttcgtcaagctcggtattcacccaacggacccgacgggtacgaggcgaatcaagctgcccaccggcgagagcgttacgtgggactcgttgttcgtgatcggcgaggacggcacgccggactggaaggatgacgccgtcgagcaggacaagctcaatgccgcgcgccaagcgctcgttggggaaatgcagcggctcgtgaccggcgtgatcttcagcaaaacgtacttcgcgctagaggagacgggcgttgcgtatccttccgtcggtccgagcgtcgcgagcgaagaccgagagttggcggacgccttcctgagggtattcgccgattcctatcggctcgtcgacagtcaatacgaggacgcagggcagaaagacccttggcgcagtgcattggacatccgcaccaatcagcgggcgcgtcgcttggcgtcgaacatctgggcacccgaccaggtgaacgcggggctcgaacgggtgctgaagctcctcgcaaaggcgggacacccggagggcctcgtcctgacctcctcgctcagaattcgcctcgtggaggagtcggacccctactggcggtgcgggcggtgctcgcgcgtgcaccttcaccgtggagtaaaggtgtgcacgcgatgcttccagccgttgccggaggagcagagcggtgtgagcggcgacctgcacggtgagagctacttggcaaagcgtatcgagcgcgacaacgcgacgttccgactccgctgcgaggagctcaccggacagacggaggacccggcggaccggcagcgtcgcttcaagaacatcgtgctcgacagcgacggacgtgtggaccggcggctgcgcgaggcagcacgcgtgatcgacatgctcgccgtgaccacgacgatggaggttggcatcgacatcgggcccttgcaggccgtcttccaggcgaacatgccaccccagcggttcaactaccaacagcgcgttggccgggctggccgccgccgtcaggcgttctccatggcgctgaccgtatgccgatccaagagccacgatctgcattacttctggcaccctgaggccatcacgggcgacccgccgccgccgccatttctcacgaagcggcagccgacggcggcgaagcgatttctgcgcaaagcgtggctgtgggctgcgtttcacaagatccggtcagaccagggcgttgggtacgccggcgacgatctgtcggacatccacggcgagtacgtgcccgcgggcgactacttcgacgcagccaacggctggagagcacgtttggcgggagcacttgacgcgacgcgcgactaccgcgcgcgcgcgctggcggtgctggttgaggattcggaccttggcagaagcccagagctcgaagggctcgagagcgattgcctactcctcgagatcgacaaggtgagctcaagtggtgtgagacaggagggcctcgcacacacactcgccgaggcgggtctactcccgatgtatggaatgccgacgcgtgtgaggaatctctacttgggggacacgacgcgacctgacgaccagttctggcggacgtggcggaaggtggatcgcgatctcgacctggcagtgttcgagttcgcccccggctcggtgttgaccaaggacaagcaggaacacctgtgcgtgggcttcaccggcgcgcttcccgactacatctcgcggagcggcccggtgccggagatcaaacccagagaggatgctttcgccgatcccttctggatggtgcagtgcgggtactgcggcgcgtggcatcggttcgatgaggatccaagcgccacgggggcggaatgcggctcgtgcgaacgagttctcgacgtgacgactgccggcgagtgtcgcacacccaacgggttccggacggacttctggccacgcgaggtcgaggagcagctcctcacagcggggcgacaccgcctgaacaccgcggagggcaaggcagtgcggcttgaggccgagaagaagtcgaacctgagctatgcctatcagtcgcagtcgaggctttaccgtctgaatcgcggacgtctggacgcggcgggcggaggtcgatggctcggcttcgacgtcaccgcaggggcacagcgctatgggcgtggcggacgtgcgcggctcctcgaccagtggatcgccaccaacgacaagctccctgtaccagtgggcttcgacccaaacccgggtgtggcgccgctgcagagtatctggctggccgctccgaaaacgacggacgcactcttcgtcgcaccgagttcggtggcgcgaggcctccgttcgcacatggtaggcgccggtcaacagcgcatcacgtcagtgcgtgccgccgcgatctcggccgcctacatgctggccaatcgtgcggcgctggagctcgacatcgatcccgaggagttcgacgtcctcgagcctcgtatataccgggcctggaacggtcaggcggtaccgctgcttcagatcgccgaccacctcgtgaacggcgcaggattcgtggagcgtctggcggctcaggggagtggtggccgaccgctggtcgcggagctcgtctcatccatcgttcgcgacgaaagccggtacccgctttcggagctgttgcggaaggacgcacaccagaaccacccgaccgagtgcgatcaggcctgctaccgctgcctgcagcggtacagcaaccagtcgtaccacggtctgttggactggcggctcggcctcgccttcctgcagctgctcgacgacccggagtggaggtgcggcctcgatggcgacttctcgagccccgcactgcgtgattggaccgcgctcgcgcgccggtacgtcgaggatctcgcgcggttctcccctgtggagcagcgcgacgctgccgggctcgtcgcgttccggattcagggcgtgggggactgggcggtggtcgtgcacccgctctgggataccgacgcgctcgagggcattgtcgggaaggcggtcgacgagatcgaacgcaccagcgggagcgtgcccgtgttcgtcgacaccttcgaactcgcccgccggctggtctcggtgcgccaggacctgctcaaccccaggccggcgtga

SEQ ID NO: 27827 - DNA, 1224 bp, Gemmatimonas aurantiaca T-27
gtgtcatcggacggccgtgcgatcgagcgcgtcatcgcgctgcgagccggcggcacggcctgcacacgaatcgccataaatcccgacgaatcgctcgaaggatcccaggacgcgctcgccgatcgcttcgatcgagcattcctttgcacgacatcacgcccacgaatcggggcgcgccagcgagaggttcgagtcgtcgacctgttctcgggatgtggtgcgatgtccctgggtatttgggaggcgagtcgggccattggcgcgcgcatggtgccggttatggctctcgacttcaacgacaaggccctgcgcgtctacgaagacaatttcccgaatgtctgggccatttcgaagccggtcgagtcgatcctcgacggcgcgcttggagcccctgcgtcgccggcagaacgtgacctggtcgctcgattgggacatgtggatgtgctgataggcggccccccctgccaagggcacagcaatctcaataaccacacgcggcgagaggatccgaagaacaagctctacgaccggatggcgcggttcgcggaacttgtcgagccgacgcacgtcataatcgagaacgtgtcagcggtattgcacgacaagggtagggtcgttgatcgcactatcgcacatctcaaaaagttgaagtactcgatcgacagcaaggtggtggaggcggtcgcgatcggagttccacagcgtcggcggcgccacttcgtcgtggcgtcgcgggagatccaacccgatatcgacgcgacgatcgatgcgttcacccgaggcgagcggagcgtcttctgggcgatcggcgacctcgcatgcgtgtcccgagacgaccttttcgatcagacgggcacaccttcgtcagtcaaccgagggcgaatcaagtacctcttcgacaacaagctgtacgagttgcccgacgaggagcggccggactgccaccgactcgaagaacacagctacaagtcggtgtacggccggctccgcccgaataagcccgcacagaccatcacgagcggattcctcagcatggggcaggggcggtacgtgcaccccacgaagcggcggaccatcaccccccacgaagctgcccgtctgcagttcatccccgatttcttcgatttcggtagcgtctcgaagcgaacggcgctcgcggagatgatcgggaacgcagtgccctccaaactggcgtacgtcctcggagtagagctactccggtga

SEQ ID NO: 27828 - DNA, 2952 bp, Gemmatimonas aurantiaca T-27
atgcaacccggcgtttggaaggattgggatgcggccgcgtggggacaggcgctgctccgccattactttgtgggtcacgatgcaagaccggtctctcgactctcgatcagcccggaggaactcgcgaaggcggcaggcgcctctgatggtgaggccgccccggcgcgagacgcctttctgacggcagtccggtgctcggcagcggccttccgccgccacctctccatcgccagtctcgagcgccacgcgtggaatcggcacgggccgcctccgttcctcgcctacctcttcttcacatgcttcgcggcggcgtccctcgatgccgatacggctgatgagggggtgtttcgcgagcggttgcgtcagttgctcggccaccacgaggggacgagctatgcgctgggcgatctctctcggctctgggaggccttcgcggcgtggctggagggtcgccacgatgccggggaaccataccgaacgctgagcctcccagatcgcggccgggcgactctgattgggtattccgttcggctcgcatttcctcggcgcgaggatcgcctgaagctcagagccctcttggccgcctcgagcgcgggaccagcgccgaccgtaccggaggccttccaagcaatcgcgcgcgcgagagatcgcttctcgaccgacttccgccacgtgttcgaccgtgcgcgcgccgcgctggcgagtgggcgtgatgtgccggagctgcaggcgctatggtccgcgatcctcgaagcggctgcgctcgccgatcggcgggacagcggagacgtgcgaatccgctaccggctccttgcccaagaggacgaattggggcgcctcgagccgttcgtcgtcacggcgggtgtcccatcgggcactcgccacagtgcgcaattctcgccgctcgacgaaccgttcgaccaattcgaccacctcgtctgcgccacggacggaagcacgggcttgattgcgaatctcttgctgatggacgcgctggcggacaaggtccctggtctcggcgcgtctcctatctcgcgcgcggtacgagatggcgtgcttctcttccggcaggtggacagcgctacctgggaactagcagtgacgcgaccgaccgagggcaaggtgcgtgcgctggtacaaagccgcctgtctgatgccttcatgcgcttggtaagcggcccgcagcgtcacccgcgcgaagctcgattcgaaagttggtgcgaggtcgctgcctttgacgtcacggaactggcggaagcgcgtgaaagcaccgcccccgagctggcttccgtgcgctgtctacagcgaatcgagatcggccctcaactgcagcttgtcggcggcgttcgcgtagacggcggctacctcggtctgagcgggctactgcccgaagtgtattgtgccgaagcagaacacgcctcgatgttccgtctctcggaggaatcggggaagcggcgctcgactcacatcgcgacactagaacccgtaggcgagcgtcccggagtcttcgggtggtctccgggtcacggcgatctggaaggtccttacgtcttcgcagggacccgggacggccgtgtcgttgcaccgcgcgaggtcctcttccactcccgcgggctgagtcatgattacgagtatcccaccgatcccgcgcgctggctcgtcgaagactgcagcactgacgtcgcgccggctggtctggcgtcggagatcttcctcgctaccggaatcggcagccccacacggttgccggcggtcgatgcacttgcgttggagagtgtccatgtactgaggaaccgctcggttgacgacaataacgagcacgatcgactagtcgaggcattggcggcgatcttgatggctagaaagggaatcgccgaatccgagctgatcgaaattctcggaaagatcgtccggcaggctactggtttcgccgtgtgggggatcatccgtgggtgggtagaggccgggtacctcgactgcctcacgaggcggcagtggcgcggccgtgtctacttcgcgcgccgcccgcagctagtactgattcccgacgccgaccttgggtcgatccgcgtcgtgctgcacggactagcgccctaccgtctgcgttctgcggcgcgggaggcgttctcgcgcgcgggggcgacgccattgtccgcctcgagcctgtcgccgtacgtaccggctccgcaggcgtggcggttcacgtcggtcgaacatgtcaacgcgtcgatcgcggagtatcgcgagctaggcacggtggggatgcgcgagcccgaggagctcgtcggagacttcgactccgcggtttctgacgaggcgccgctgccgcctggctacgagtgccagcgcgtctgggattgggcagcgggcggattccgccgcgcgcatgggagtgccgctccggacgaggtgcgcatcgagtgccatacgcgcagcaacgggccggatcgatacaccattgtggcgggctgtcgacggcgtacaacactctcgcgctcctgggcgctgttggatggcttccggctcgcgggacggcgtgccttcacccccgtcggctccgtcgcgattgtgcgttcgggagacgatggtcctcaagtgccccttcccatcgcgcgagtcatcggcctccgcgcgggcatcgtcggcggcccggcggagactgcgacgctcggccagcactacgcgaacgccacggacggcccgagcgcgcgacgctggcttctcgcatggctgagcggctcgagggcagacgagcaagtggcgcggcgcttcgcgtggctacgtgctgctaccgacgcgcgcggcctggacaccgttcccattccagccgaccttcggcggcgtctgcgcggactccacgccctcccggacgcgctttccatcgcggagcgacgtattccccgacacctgctcgctcacgtgcgacgcgccgtcgcgctgacggagtcctga

SEQ ID NO: 27829 - DNA, 2265 bp, Gemmatimonas aurantiaca T-27
atgccgacgacgaatcgttcgtactacatcggacgtgtgaagcgcgcgccgcaccgcggtgacgcgtacctctatgcgagcattgagccgctcgtcgaatccgatccgaccggcagccagtggcttggccctcttcgcaattcggtgtccagcttccccaagcgcggtctcgtgcactggaacaaggcgcccttccaacttcagttagggagcctgtggcagttcaccatcgacgagcacccatcggccgtacgcagtgatcagttggagcatttccagctggaagatccgcaggagccgatcgaggtgttggacctccgcggatggagcgacgaggagaggctgcggagcgccattaccagcgacggaattcctctctcaccgccgccactcgcacggcgcgtgctcctctggctcgcgagcgacgtctacgtcggacccctgctgctcaagcccgcgacggctccaggcttctgggtactcgacaggcccgacgcgcatatcgacgccgcccgcatgcctgtctgccgtctctcggcgtccgacatcaatcgcgtcccgctcgagggcgagcgctggttcgtctcgccccgcctggaactcggccggagcgcgggcatccagaattggacgtcggacgcgcaggtcacacgaagcattctcaccaggctgcgcaagatggaccccgacttggtcagggcgatcggcgtgacggagagtgtgttccgcgaatatctcgaccacgtcgagggtggtcggatgggtagcgccgacccggcagttgagcgagcgcgggccgaccgccttcgcggcgtgcgtgacgcgatccaacgcgatgaggtgttgctgacggaggcggtggaggctctactcgggaccgaggcggtacggacagaggtccagagtcaggcgcatgccaagatcgatggggaggtgcactcgcggagggccgagatcgacgcggcactctcggactcgacaaaagagctggcgcgagtacaggacattctgaatgcgaaacgcaccgaagtcgctgcgttggatgcggcgctcctcgagaagcgcggagagctcgaagcgaaggtcgcctctttcgatcaggaggtctcggctaggctggaggagattgcccgccggcccgaggccatcttcgcggagacagcggttatgagggccgtgctaacgcctggttttgcgaggccagtcggtggcgggaacggtggggtgcccgcgtatccacccgcgcgtgcggtctccagacaggtgcgggatttcggagagtcgacgctagagttgggtgatgagactgacgtcaggcgggccctcgcggtacacgccggcgccagcgcgctgagcctgcaggcgatgttgagcctgcacgcgatgttcgtctcgggtgcggctccagtagtggtggggtcgtacgcatacgatctcctgcgcgcctacgcgtccgccgtggcgggcgggcgacttcactggatccccatcggaagctccacgatggagccgtacgacctgctgggccgtttcgacggggcgtccggccgaattattccgagcccgtccggtcttctcgatgtcgcgcgcgacgcgacgcagtcgggtcgccttcatgtcgtggtgctcgaagggttcaacagggcaccctgtgaggcgtatctgtcgccgatcctggaggctgcgcaagcaggccgactgggtgacgcgttgcgcgtgatccctctggcgaatcctgagctgatctcgggcgacgacccctatcgcgaagtggcccgtctggtatggccttctaacgtgctgatcgcgtgcctcccgagcgacggcagcgtgacgttgccggtgccaccgtctgtctggcgtttcgttgcgctggtcgatgccgacgaccgcgatcgcacgcagcttccatctgtgccggcagaaaacggcgtcgcgccgcgcacagagatcccgccgacgctctggaaggagagcgtggccaccgcccaagcccacgctgcccatgaccgggacgaggtgacaacggtcgcccgtgctctgtcgctctccgctcgtgacgcaagagacgcggtccgtgtgcgggaggtgttgtgcgccaatgggctgcctcacggagacgcaaccagcgtcgctctcgtcgccacgttgatcgcgcggtctgggtcagatgcgaaggcgatcgacgagggcctacgcacggccggcgtcgcggtgcccagctggcaaaccattcgtgccgaggcgcaacgcctccgcagctaa

SEQ ID NO: 27830 - DNA, 5268 bp, Gordonia rhizosphera NBRC 16068
ttgaactccatcacacctctttcgctcgccgcggcactccgcgatgcttacctccgatacttcgacactgcgttttggctcaacgatgaaggcatcatggcagagcggcgcgccatgctctccgaacctggagtacttgtcggtgaagtactgatagagccggttgtgccctacccaaacaccgtcagactggccgatgttgccgcggcagccggtgtgccgctccagatagcgtcgcgagtggcttcggcactcttctccggcactccagcagagaacatcgcacttcgcgaccaccaggcgaagtcgatccagcatcacttcctggacggcgtgtcggccgggcgcaacgtcgtcgtcacttccggcaccggctctggcaagacagaagccttcctgctgccacttctcctgcgcctgtcctgcgaagcgacggaatggcccagccagaacagtacggccccgtggtggcaagagaccgaaccgaagtggcgatccgttcgcgagaacgacacccgggcgccggcagtccgcagcctcattctctaccccaccaacgcgctcgtcgaagatcagatgacccgtcttcgccgggcagtgcgcacactgcgggacaaggatcccgaccacccgatttggtttggtcgctacaccggcaacaccatcggttcgggcaaacgcaacaaggagagcctcggcgaggcgggcagagagttgcgtgcccacgcaactgaatacgatgcgcttctcgaggccaagcgccagggcaagtcagacgtcgacctaagccagttccccgaccctcgggccggcgagatgctaacgcgatgggacatgatcagtcacgcgccggacatccttgtcacgaactactcgatgctgaatacgatgatgatgcgccaccacgaggagagcattttcgcccagacggcatcctggctgcagtccaacaccggcaacgtcttcacgattgtcgttgacgagttgcacttgtaccgcgggacacaaggcagcgaagtcgccatgattctacgggcactgcttcgcaggcttgggctcgcagccgacagtcctcaactgcggatcatcgccacctccgcttcgctcaccgagtctcaggacggacgcaagtacctccaggagttcttcggagtcggcccatcaagcttctccattgagcccggcgaacaaatccccgttgcgcccccgaaagttctcgacgccactgagatcattaacggcacagcaaacctcggagcaataactcacgcgatcgccgccgcctgcttcgatccaggagagcagcggacccgcgccaccccgctcaaaacgattgccgacaagctgtttccgtcatccaatgatgctattgaaaccctcaccatagggcttcagcagcttgccgacggcgatatctctcgcgcaaccccaaccgccattcccctccgcgcgcataccttcgtccgggtgcctcgcgggatgtgggcatgcaccaacagcaactgcactggagtaactggcagcgcccgcgacgagcgtcgagtcggtcgggtcttcggaagtcccgtaagcacctgcacgtcgtgcgggtgccgagtccttgaacttctctactgctatgagtgcggagatatcagcctgggaggcttcatcgtcacccaaaaccgaagtgaagtcctcctctcacccacgcctaccgctgaaaatcagagcgcgaagcccgtgttcctgaggtctgaaacagaattcttctggtaccggccaggagttcctgcaacattgccacgagactggacgaaggatggaatcaagctctcgttttcgcaggtggagtggaaccctcagctcggaattgtttcccgcggagtctctacaggcaccggtatcacggttcagtcatctggtgccgcaccaactgaccgaataccctcgctacctgaccgttgcccagtgtgcagctaccagcccaggggccgtagcaaatccggagccttccggtcaggtgaagtgacgtctgcaatccgcgcacacacctccggtgcgccggcggcaacgcagctctacctctcgcagctgatccgctcgcttgcgcagggaatgcccagcgaagcgacaacaacagccgatgcgaagaccatcgtgttcactgacagccgagacgacgcagcgcgcaccgcggccggcgtagcccggaaccatcaccgcgacttgatacgccaagtcctgcgacgcgagttggagcgaggcaccgatgccgagaagactctcgacaagttcgctgctaatccagcaaacgtgccgcccgagtatcaagcagccgcgctggcacgcatgaagcagcaattcggaatgccgctcaccacctcagaagagaacgaccttgaggcagctctaacaaaactaggtgcggcagatgctgttggcttccccgaaatgaatgagcgcatcacaaaggtgcttttgggactgggcgtcaaccctggcggctccagtccgtggaaccagcggctcgaagatgacttgaacggtgaaaccccctggtatcgagcatatgcgccaccggaacccgacctgtggccaacacctccaatcgcacaaggacgtgagaagctccaacaggccctgcgcgcatcgatcgtggatgcaaccttcgaccgagcacgacgcgatctcgagtctgttggcatcgccagtgtccatatcgacggctggcaacccgtttccggtccccttgacgaccagctccaagccgaggtgctggcctctgtcgtgcggatccttggcctcaacgggcgaacggaagagagcagacgtggcggcgtccagcagtccgcaaccctcccatcacgagtccgcaagtacatcgaagaagtagccaaaactcatgtgctggatcgagccgccgtagaacgccagctcgacaccctcatcagtgacgccgccgccacacgggctatcagcgggtggctgctgaggaccacatctgttgattccacactcatcttccacccatcgggcgacacactctggcgatgcgcgcgctgcaacttcgcacacctgcacccgagcgccggagtctgcgtgaacccgcaatgctctgccgccggcctacgccaggcaccgatagagattgaaagtgattactacgcttggctcgcacaccaacctccgcgcagactcgccatcgcagagctcacagggcagaccaaacccctatcagtccagcgagacaggcaacgatggttcaaaggtgccttcacgctggcagagaacaacctcacacatgcgctcgatgtgctctccgtgacaacaacgatggaggttggtgtcgacatcggatccctgcggtcaacgctcatggcgaacatgcctccacagcgcttcaactaccagcaacgtgttggacgtgccgggcgaaccggccaggcgctgagctacgcagtgacaatctgccgtgaccggacgcatgacgaatattacttcaatcggcccgagcgcatgacgggcgatgttccgccacagccattcctcgatctcggccgcaaacgcatcgtcgagcgtgtggcagtgagtgagtgcctgttcgaagcgttcggtgcactcgcgacgccgccggactggactccccgcagcaatcacggcagcttcggtcaaatccaggaatggagcactcatcgagacgctatccaaggctggctcgccgcggcgcccgaagtggaagcgatcgtcgggcgcctagctctgcatacacccctgtcgtcatcagacgtcgccgagatcgtgtcgagcgtccgaacagaccttgtctcgaatattgatcgcatcgtcgacgacgaacgcgattcgaccgacacagaactcagtgccacgctggctaggtacggcgtcatcccgatgttcggtttcccgacgcgcgtccgcaatatctggagtcagccagtgtactcccgcaaggacatggagaaatacgcggtcagcgaccggccgctcgagctcgcagtacgcagcttcgctccaaatgcccagatcgtgaaggacggcgttattcacaccgcggcgggcttcgcggcatacagaccgacaggaaaccgagttgagtcccttcctcccctcggccaggtcaagcacgtcagtacttgccccaactgtgaccacaccgaactctcgcaaacggcaacctgctcggcctgcgggcaacaggtaacacaaatacaactctacgaacccgctggattccgaactacttacagtccccgaccgtacgacgacgaccaggagaccgtcagcacggtctcaactcccgcgcttgttcccggcagtgcggcaacggatcacgctgacctcgaccacgtctcactcgatatcttcgagcggagccgactcgtgtccgtaaacgacaactttggccgcggatatgagttccagaaccgtcccgacaagaccgtggtcgcctcaatgccagaggttccgccatcacagctaaacaccattggcgaagtccgcgttacggatgcacttctcgccacaccacacaacttagacatcggtacagggacagtggctctgtacgatcttcgagcgggcaaggcgacatacacatccttcgcagaagttctcaaacgcgcagcacaggtgctactcgacctcgatccagtcgagctcgccgccggcattgtgccacgcaagacaccgatcacagcaccgaagcgccacacagacgaacatgttgccgcagccgtgttcctggccgacacagcggagaatggcgcggggtacgccgtcgaacttggcggccagaccaatttccacgccctgattaccggtgcactgaccgagctgagcccgctctgggaagacccgaagcacagcgcagtgtgcgacagcgcatgcccggattgcctacgctcctacaacaatgcgcgccgccatccgctactcgactggcgtctttcgctcgacatgctcgaactggcgaccggcgcacctctcacgatctcgcgctccatgccagcctcagccaagtggatcgaaacttcagccgccgcattgggttcggttgcatccgagattggtgcagtccctgcagtccttcggggtgacaagtgcgtactactgacccaccccctttggcgccacgaggaagtctattggactgccgaccaagcccatgccgtcggatcagccctagaagaatatcgcacagttgacatgcatgacatccgagactttcgccggaatccgattacggtgctgcaatatctgcaatga

SEQ ID NO: 27831 - DNA, 1269 bp, Gordonia rhizosphera NBRC 16068
gtgggaacaggacagcattccggtaacagcaggtacagcgtcatcgagatctgcgccggcgcaggtgggcaagccctaggtctcgagaaggctggtttcgatcacgaacttgctgttgagctcgatgcccacgcgtgcacgacactgcgccagaaccgtgactgggacgttcggcaaggcgacgttgccgacaagaccgtatgggatcctgctaagtacgcgggcgtttcactgctcgccggcggcgttccttgtcctccgttttccatcgccggccagcagctgggcgcctcagacgaacgggacttgttcgcgtgggcggttgagcaagttgcgacagtgaagccgcgagcactgatgctcgagaatgtccgcggcctctcgactccacgctttgccgcgtatagacaacgcattctcgatcgcctcggaaaattgggctacgaacccttttggaaactcctgaacgcgtgcgattttggcgtccctcagctccggccaaggtttgttctggtcgccctgcgaccagaagacgctccctacttcgcctggccgagccagaccgtcgcaagtccaaccgtgggcacggcgcttcatgaccttatggcagcggatgggtggcgctacgcagatgcctggcgaaacctggcaaatgacgtcgcacccacgatcgtcggaggcagcaagaagcatggcggcgcggacctcggacctacccgggcaaaggccgcgtggatgtctcttagtgttgatggcaaagggattgctgacgcaccaccgctccggaccgcacgtcatcccaagactaacccgccccggttaaccatcgagatggtcacccgactacaaggctggcaggacgatgatggctggcaattttcgggacgcaagaccgcccagtatcgacagattggcaatgcctttccaccgcctgtcgcagaggccgtcggaacttctgtctttcgagctttcgatcacgcggcattaaccgaatcttcagacctagcaatggcagaagatgagctgttcactcttctccgccgccatccagagggcatttccgagtctttaatcagccagaatgtcccgaacctcgctggtgagtacttagataagagaattgccgaactctctctcgacttcgaagtgctgtgctcgtttgtcggcaatgaacgcgcctaccgactgggaaattttaaaggatttgttgggcaaaatgatcacttccgtcacgaatacctggctgaaaatagatccaaggtcagttga

SEQ ID NO: 27832 - DNA, 3078 bp, Gordonia rhizosphera NBRC 16068
ttgacgaaccagaatcgtattcgcgaacaggagacttcagtccgcacatggaacagagactggacaaactacctcgcgtggaataccgcagttgccgatgtcgtctaccccgagacctccgaacctgcacccgcctacatggatctcgacgatgaccagctgcgattgattgcatcccaggcgggttacgacgggaccgatcccgcagcccgattggcatccgttgttcgtgcggtaacggcccgacaggggcggctgtccctccgcacgattgtccgagagacccgaatctggcataagaaggccaccctccaagaggcaccaccatgcatcgctttcctcgccgtcacagtgctggctgccgaggacatggggaataccagcgaaggtctagcttccaacgcgtactatgcacggttggcacctctcttggatgtgccatcagaagacagctcgatcgttagccagtaccgctccaacatcgaggagctttgggacgccaccaacgggtggctagcctcgctcgagggccgtcgcggcttaccctcagccttcgcactttcacatcgcttcgtcggactcccgatgtcacaagccctggtccgggccgccgatcgcgcacgactgccgcacgtgttcgcgcagtacgggctgactccgggaatgcacctcgctcccagcgatctcaccccgtatctcgacgagtggctttcgtcggagcactccaccgcaacccatagcctgcggacgctctggcaacgcaaggactcgcacgagcggatctcttccgtcgctgcaatcgagctggcgaactgggatggcaacctgatcgacagctccgctttcacccaggcgcgggcgttacttgtggccaatctgcgcgacggatttatgggttcgtcgctcgacctgtcagtaggggttcggcttcctcccggacccgaacctcacgcggaagttctgcagtcgggcgcaaagtggacacccctgaccctcaaccctgggacagcaggactctggcgaacctcatacacccagtccattgactttgtgtctgtgctcgacgggctaatcgacattcgctgccgccccaatgcagacgaaatccgcttccagcgtcgccctcgcgagatcgttccattggtgtacgacgagttacagacgacgtacgtcgagacggaccgtcttcagctgggcgtcgacgcgctaatactcgtgcgaagccagagccccacgcgcgcgaaagagagcgcagcacaggcagtcatccagacactcgacgagtacgcgaggcccgggttcgagtgcgtgactagctttcctggactcccaccgggatggttgatgctccgcaatgttcagctctttggcatacccgcagctttgaatgaccggcttaatgccctgattcctcttgcacgaaatcaactcaccgtcgctggtggactgcggattccgtcccgagttcagaagtggtcaagcctatcgccccctgaagtcagggcgatgacgcatgaccagcgagccgtgcgcgtggaattgaaagacacgtcaactggataccttgtccacacatgggagtccgtatcgggaacactaacggcgtcattgcggcagatcggcctcaaagatggcgactaccaggtatcgctattccttgatggaaagaaggaaccactgcagcaggtagctgtacgactccggtcgagcgacaccgaggatgccctctgggatcaagtcaccaggctccgctattcgctcgacaccccgctcggtacgatgacagcgactgagctcgactcgaacacatcggacagatacgccgacggcctctatgtcgagtcgaatcccagcccaccttcaaccaagtatcctgcctcatcggcagtcacctggcataagaagcgagttcaacccaagcggcggccgctgcagatcggaactccagatcctgactcgtgcgttgtaactggcgcgcaccactgggacttcccgaaacagattcccggtagccggaaatcaatccagggagtgtgccggtcctgcgggctcgtgaagcggtatcccggctggttgccgcgctcaccccgcaccagaccgaaagccgcgcacgttgaatcgccgccgacctcgatcgacctctcgcaggtgggaccagtgcagaacgcaagccccgccagctgggagtccgcatatgacgcgctgatgcatcttggcggcggaagcttctccaagcttgaatcaatcgctacccagattgaaggttccgccctcttcgttgacacattcgtacgcgctctggagagcctgggccacatcgcaatcgaacgtagcagcgagtcatggaagccgacggcatgggaggtctcgccaacttcacttgcaggcacggcatcgggctcctaccgtgcagtcggattttgggccagagccacggcccaggacgcgctcgtctcagcaagagacatgggtggcacgtcagagttcgaaacatccaagggtatgcaacagctgttcatcgctgagctcaacaccgattcactcaacctcatcgcaggggaatgcaacgcagatgtagtcgagaatcctggcgccacaatgctgtccgcgctaccagcgctctcaaaccttgcggcgtcatgcccacgtatcgcgatgcccggctacgattctgcggagcgattcgaattggagacagcaagctgggtaccgaccggcgacacgagcgttccgggcgcctacaaaatccaaagaagctttgaggttctttacgtattcagaagccccacggacaccgagaacaacactgctgctcgagttccagtgcacgtcgccaagcaccttgcggcaaacgctgcccagcgttcactcatcgtgtacttcgacacctcggcatctgtagtcctgccccgaggatgtgatttgcctggactgtacaaccgtgctgcggttgcgctctcaggccatctgcccgaagagagggccttgacagtggctaggaccaagcgggactgtctcttctacagaggattcactcgtgcagacgccgacacacttaatactctgctcgttacctag

SEQ ID NO: 27833 - DNA, 5301 bp, Hapalosiphon sp. MRB220
ttgtttgcttacttagcgaaagaatcaaaaaattgggaagcgccgggaactcagcaacctcacattaatgattggtgggaaaacaaagattggcaaaataaatgcaaaccacttgtcaataaaaaacgcaattttaagcaatcttatcgcgtacctcaaaggaatcatgaaaaacgagatgctgcggtaagggcactaattttatatccgatgaatgcactcgttgaagaccaacttaccaggttacgtcgcgctttagattctgacgaggcgcgagattggtttaaaaataatagaaaagacaacagaatttattttggcagatacaacggcgtcacacctgtaccagggcatgagtacaaacaaaatggtaaacctaacggggacaagatagaagaacttcttgaagaaatgcagaagatgcaggaatctgctgatgcagctatcaagcactttaaggaaactggtgatgaggatgtgaggttctttttcccgcgtttagatggggcagaaatgcgctgccgttgggatatgcaggatgatccacctgatattttaattactaattattccatgctcagcattatgttgatgcgagatattgataaaaatatttttgataaaacacgggaatggttaaataaagaaggcagtgtttttcacttaattcttgatgaattacacctttatcgtggcaccgctgggacagaagttgcttatctcattcgcttgttattgcaacgtttgggactttatcccggtcatcctaaattaagaattcttgcctctagtgcgtctcttgagccaaaggacacagaaagtttaaaattcttatctgaattcttcggtacagaatggcattccgaacaaattatctctggtcatcctgagccaattccaacaattttcgctcaaaaatttttagatagtgaaccatttatcaccttagcaaacgcaccagaggacgccaatttactcaataaatgtttacatttattgtcatcacaaagcgacactgttggcgctataatgcttaacgcttgtaagctcgacaatacaattcgtgcagtatctctcacgcaatttgctaaagggatttttggtgataatttagatgaagaaaatcttaatttagcagtaaagggattgctaattgctcgtggtttatctgaagacaaatctttagaatcatttcggtttaggttgcactggtttttcagaaatattgatgggctttgggcttgcactcagccaaattatgattgtcatgggaatgaaagtagtaaacaccgaccagtaggtagactctttgtaaagaatccgccgatagttcatgacggatttcgagtgctagaaatgctttactgtgaacagtgcggtactgtcttttatggtggaaaccgtttggaactagagaacggtaatggttgggaacttttgcctacagaaccaaatattgaaagcattcctgaccgccaaattggtaattttttagaacgacgaacatatcgcgaatatgctatattttatccctctacaaatatttatgacaaagaattcagtataaaaggctggaaccaaccatcaagaggcgataaaattaaagaaaaagcttggtgggataaagcctggttagacactcgtagtagtcgcgttacttcagaagaaccagacccagatgcgccaagtaatcaatgggttgaaggctatattttcaacttgcgagatacatcaccagaaacgcaagcatttatggcagcgcaaccctctatttgcccatgttgtggtgcagattacactaggcgaaagtcttggaaatcttcaattagaggcttccgtactgcattttctaggttgagtcaactgctgtctaaggaaatattttatcagttaccagaaaaatcagactctcgtaaattagtcgtattttctgatagccgtgaaaatgccgcttcaatatcaaatgggattgaacgtactcattactatgaccttgttcgtgaagcaatatttgatgaacttaaccaattagctgttggtgaagtttacctattagaagatattcaaaaacatggtcaacctgttcgtcaagaagcaatagaatttgctcaacgtaagcccgatgctgtcgaaaagtttaaaaaagctgtaaaaaatgctaataaacctttgccagaaggccttgatgatgatgatttagaattgtatatcagtcgccgaaataaggctaaaaatctcatcaatgaaattcaaaaaacagctaaaacgcgcatcgttccactcaagcttttatttgaaggagaaaaagacacaccaggagtagttattcagagattagctggtttaggcataaatcctgctggtaacgatatcaatgaccaagagttttattacgacaataaattacatcattggacaggattttttgattttgcgtctcaaccaccaaaatggaaagctggctcttctggggaagcaattgacaagcgatatactcttatatcaaaaacacaatctgaagtatgcgatgccttctttagtcgtttattttatagtattgaagcatctggcttaggttatgcttgtcttgatttgccacaagaagaggtcaataaattagctacacaatgcaaactttcaccagaagtctttctcgaaatatgcaacggatgcttgcgcgtcattggtgatttgtatcggtatcctaagtatcatgttgaggactggaacagttggcaagatgcaaaagccagattgaaaaaatatatcaataaatacgtgacacagcataagctttctgagaagcaattatttgatgcattgtggtcagctatttgccaacatggtaaacatgaccatttaaaaattaacccgctgcatttatgggtacgagttgcagttcccggtgatccagtttggcaatgcacatcatgtggacgtcctcacttacatcgtgcaggcggtatctgtacaaattgtcttgcagaattacccacatcacctaataaaaaatgctcagatttatacgctcgtaattattacgctacagaagcagttaataagcgccaacctgtgcgtttgcattgtgaagaattgacaggacaaaccgacgatcaagcagaaagacagcgccatttccgcaatattgttgtcaacatcggtgaacaagatagagattttatcccagtggtagatactatcgacatccttagtgttactaccacaatggaagtgggaattgatattggtagtttaatggctgtggtaatggcaaatatgccacctatgcgttttaattaccaacaaagagcaggtcgtgcaggtcgtcggggtcaacctttcgctattgtattaactatttgtcgtggtaacagtcacgatgaattttattatcaacatcccgaaaaaattacaggtgatccgccaccagttccctttctatcgatgtcacaaattgaaattgcacggcgtctattagcaaaagaatgtctgcgacgtgcgtttctatgtgctgatgttaagtggtgggatggtcccacgccgccagatagtcatggagaatttggtacagtaaaagactggctagaaaatgaatctcgtcgtgagcaagttcgccagtggttgcagagttcacctgaagttaccgaggtagtaaatgatttgcttattggtgtggaaaggattgactccattacctttgaaaattatgcgcgtcaggacttgtttaacaagataaacgagtgtgcaaataataaagaattgacaggaaagggattagcagaacgacttgcagaaggtggtgttttgcccatgttcggtatgccatccagagttcgggatttatatcatcacaatccatcaaaaaacaagaatattgctactatcgaccgtgatttagatttagctgttgcagaatttgcccctggtgcggaaaagactaaagataaacgaatttacacctctattggttttactgcaccgttacttccagataagaaaaatggctttgttcctgcttataatgacccgctttctccgcgaagatggatgttaagatgtcagcgctgccaacatacagaaacttctgataatgaatttgaaaatacagtctgtcccaaatgtagagcaataccagaacaaggttttaaattctttaaatgggcagtacctttggcttttcgtactagcctcaaccgtggtgcagatgcaaaggaagaacatgatgtattaatctcaggtgcgggtagtgttgctgagtcgcaacctcaaaattttaacttcgtagataacacaaatactcagaccgctttttctgaaactggtagagtattccatgttaatgataatcgcgggaatttgtttgaaggagcagtaggtaaagcttcttttggacgtggtgaaaaaattttagaatttcaatggattgctcaacgatttcaaaatcaacccaatggggtaaattttaaagaacctggcgaatctgaaaaactcgctattgttgctccgaaaacaactggcgttctccgcatcaaacctgcatctgtacccactggattatgtctcgatcccattgcacccggttctgctattaaagctgctttctattctgcggcttttattatccgtgctgtagcagcacaggaattagatattgatccagatgaattagatgtgagtggtttacggcaggttgaactagaagaaactggtgaaaaagtaggagaaattgtaattagtgatcgcctacccaatggttctggttttacattatggcttgcccaacactggcaagatatcctcatagaaaaaattgtcaaagcacaaaatacttttgttgatgccatgatgtcacagcagcatcgtaagaaatgtgattcttcctgttatgagtgcttacgacactaccgcaatataaactatcacggcttgcttgattggcgattgggtctctctttgctccgggcattagctgataataattttcgttgcggcttacacggcgatttttcagccccagacttagaaaactggctacaaacagcaactaaacttcgagatagtttttgtgcatctttcagcagttgttctccgcaaaatatcggaggtctgcctggttttacaatggatgagatagcagttattattgttcatccgttgtggaatctcaataaccccattggcttattagctgatgctgttgctacagtagcaccagacaggcaaattcgttacattgatacctttaatattttgcgccgtcctagctggtgttatcagtcactgggttcgccgcaggcataa

SEQ ID NO: 27834 - DNA, 1167 bp, Hapalosiphon sp. MRB220
gtgagtaacgataaacctatatctattagtctgtttgcgggagcttttggtttagacctggggatggagcaggcaggttttcacacggtaagcgtggtagaaatagattctgacgcgacaaagactatagttcgcaaccgaccacacctagctgagagcgctgtaccaagggatatccgacaagtctccgcccaaactctattagaggagggagggcgcgtgttaaacctgggtagagcgctatgccctggtgaagttgatttggtgactggaggaccgccctgtcagcccttcagtactgcaggcaagcgtcaatcgattggcgatccgcgcggcagcctgttgatggactttatgaggattattgcagaagtccagcctcgtttttttatcatggagaatgtcagagggctgctatctgcaccgattcgacaccgaccccactcacaaaggggaaaaggctttttgccgctagaaccggacgagatgcctggtgttgccctgcgcgtggttttagcagagatagagaaagttggctactctgtggtctacaaccttttagaagcagctgactacggtgttcctcaaaagaggcagcgcgtaattttcattggctcaagagataatgaacccttgtcattcccgctaaacactcactgtgaagatggcactaatttacctaaatggcacactcttcaggatgcatttgttggacttgttgactcaaagccagagtttattccatattcagaaaatcgcatcaagtatctaaagctactaaaagctggacagaactggagatacttgcctgacgagttaaagcaagaagctatgggaggagcctacaactctggaggcggcaaggttggttattacagacggctagcttgggacaagccctctcctaccgttacaacaagctcgcatcaaaaagctacagatatgtgccacccagaaaaactgcgtcctttaagtgtgcgggagtgtgctcagattcagacgttttcggatgactgggtattttatggttctacaacttctaagtatcgacaaattggaaatgcagttccagcacaacttgctagagcaatcggtgaacacgtttataacctcattacagaagagagtgtaaaaggaaaagagtatgcatatcaaatggaactttag

SEQ ID NO: 27835 - DNA, 2070 bp, Hapalosiphon sp. MRB220
atgaaaaacgtaaatctaactgtaaaaactactataaattactcagagtggaacgataaaatcgcacagcatttcttcaacccagaaatggctgggcgaactgtttatctttacgtcacagaggatttaattaattctttaggcgcatataaaggcattacctaccaagactttatccaaacagtaaaaaatgcagtaagtataaatggtatctgtaaaaaagcctgggggagtatgcaaaacccggaatggcgataccaacgacaaggttatcctccatacataggctacttagctttatttgttttggcagcgggtactgaaggtgatttttcttctaaagcctactatccgcgcttgcgggaattactgggtgaagaactgacatcccgaccatatccccactttgaccagatgcaaacactctggaaagatttagagaaatgggcaaatgtcgataaatcaggtgaactgggcattttcaacgccaacattactggcaggttggttcacgtcggtatacccatagcccaaactcttttgacggagagggaactgaaggcactacccgttatttttgcagaagcaggcttagaacctatttcccttccctctgaaagacatacagcttctttgttagtcaaacacggacgtaactatctgcgaagacgaacgttgcgattactggaagaaaccagcgaaggcgatgaactacgtcacgcactgattgaaaggattgttgatgagttacgcacctgggatggaactaccgaaataccgtctgagggaagaactcaggtttacggtgtcttaagactgtgttgcaaactcgacttgattgccaaacgtgccagcttcaccttacgttgtacgacaaagcatgaatttcctgaaaatggtctgattttcaattctaatcacgattcttactcttgcaccgaacagggtaatggttggtcttcacccatccgctgggaattaaatggtaaaaatattgacgcctcccagttggattggcgtcaggatttgcggatggaatccactgacaaacaatggtgttttaagttgccagcttccccaatccgagtgtttgttgaaggcagaagtttggggttaccaggacttgtagaagtggtgcgaattcctaaaggtttgcccttttatttagcagttcagcaagagtgttgcagtttgctagaaaaatggggtgcatccagttgcgaaggctttgagaaattgcatactgtcaaaggtttacctaacagatggcacttatttaaagtggctgctgcccatagtgatgaaatagtaaaaagcgaatatcctatattgtcattttcgactagcatcagacttgatttagaaggtggtgtacgccttgacaaaggaaattatttcttgaaattcgcaccaccaaaattagttttacaaggtggtgatgaatcagtcaaagtatattgcaatggcaaactgttacaagacaaatcgggagaaggtatttatgaactctctccagacattccagccgacaccaagcttgaaattgaagcctgtaagggtaaggatattattaagcgtttatctctatttttagtagaagatttacctttaatcaccagcatgaaaacgctatatcttgacagttttagttcggtgataaaaaatcaaaatgacaactctccaggggtaattggagcattggtaaagggagttgattgtcctgcttttaacttcaatactctcttaccaatccaaggaaagcaacgcattgtttttgtgggcaaagaaccggggcaagttgcaatttatccagaagaatcactacctattgattggtatcctgtttgggctattgccaaaggaagtctttttgatagagcaatgttttgtggcacaagcttaaaagaatcagagccgaagctatcaatttgtaaggataagaaaaaattgtttttttggagaaaaatcttattagataatcacaaacgaactctgcctcctatcggcgatattcgcctgaatcaattatggggaaaattccaaaaggaggcaaagcgtgtccagggatag

SEQ ID NO: 27836 - DNA, 5841 bp, Klebsiella pneumoniae BIDMC 46b
atgttagatccgattggcggttttcgccgcattcaggacttcttcatttcatatatagaaaccagctttcgaattgccgatccttcagtcgcggactcaagacgcaatcttttgaatagcagcggggaatttgccgcggagccctacattgaacctgttttacggtatgagtcttcggataaaacgcttgaagctttggccgagatggacggcgggccgctgaatagcttgtctcccaaaggccgtaaagcgttcgtcgaactagcgttatccggtctgttcgattctaaacctggcgacgaagtctggccgcgtcgttcggtccatgcgccgtatagccaccagactcaaatgttggagcgcggtattagccctggttgccccggcattgtgacatcgggaacaggctcgggaaaaacggaaagttttatgttgcctatactggctgcattatcgaacgaggctgtcagctgggccgcaccttgcaatggctatctgcaaaatcggtggtggaatagcgaaaaaacaaactgggtttctcgtcgcgaaggagaaaaacgtcaggcggcagtcagggcgttagtactttatccaatgaatgcgctggttgaagatcaaatggcgcgtttacgtaaaacattggattcagatgacgcgcggcaggtgatggaacatcgcttctccggaaatcggatcttcttcgggcaatataccagtgcaacaccgattaccggctatgccaaccatcctcgtctttccggagccacctcggaaaaaagtcgccgggcccgtaatcttgaaaaattacgtaaggcgttgaagcgaattgatagcgatcagcaggctgcgcgcgcattcgacgaaaaagaaaacgcttcggaaaagacccgatatatatttccttcgacagacggcggggaaatgatgtctcgctgggatatgcaggctgccccgcctgatgttcttgtcactaacgcctcaatgctaggggctatgctttcgcgcgaagtcgaagacggtatttttgatgctacgcgcgaatggttgatgaataacaacgatgcgtatttctatctggtattcgacgagctgcatttaatgcgcggttccgctggaaccgaaaccgcaatgttgattaagtcgctgattatcagacttgggcttgacgatccgaaacatcgctacaaactgcgtttgctggcgtcttccgcatcgctgccgatggatggagctgatggagaacaatcacggaaataccttcgggatctctttgcgccctttggcacttgccgcgattctctggatcccggtagcgataagcctgatttctggcgtaactgcgtcattcagggaaaaccttatataccgttgaagccagaaggaaaaatcgccgtgcggccttttgccgcattaatgcgggttgcccttgagaatcagggaaatgtcattcgccatttgaacatgacggacgcgctgagtcaggctttgtctgatgtcttcctggctctgagcgtgagtgcaaaaaatgatatgcaaggcattaaacaagcggcggaaaaagcggctgcgctattgaccaacgcttgtatagaagaagacggcgagttgccacgagcaatgcctcctggacttatcatagataagatttttctgaaggaagactcggataaaccagatgaattggaattagcattacgcgggttaatgctggtgcgcgcgctgccggaatgcggagtggtttgcgagaagaccgccaacgtcacaccagcttttcgcgtgcatacattcgtcagaaatattgaaggtttctttgcctccgtatcgccgggagagcaaaaggcgaaattcgcagatttttgcctagagcgagggctgtcgcacgcgccatcaacaccagccggaaaacgtggtcgccgtttgttcgaaatgttgtattgtgaagcgtgtggcgagttactgatcggggggcagaagggacagaatcacggtaaaatcatcgaattattaccttcagcgacaaatctggaaaatcttccagaacgccctggcgctgaatattacgatgatatgacactggatgagtttgcggttttctggcctgtcgatatagcttatcggccaccggtaggttgcgaaaaaggttgggatgtctgggaaaaagcggcgcttaatcctattacaggcatagtgaccattgggcaggaaacatcaacgacgaatactgacgtagttcgcgggtatatctatttccagaatcaggttaagcctaaaaaaggtgagccgccgaagaaaccttctgcgcaacctttctgctgccctagctgcggcattgactattccagccggcctgccagcaatcgttccagaacacccattcgcgcatttcgtaccggtgtgacgaaatcatcccaactggtagcaacggagctatttgaattactgcatgcgatcggcgcggaagcaaagagtattgttttctcagacagtcgacaggatgcggcatcaatggcgctggaaatcgaacggctgcacttgcgcgatctgcgcagggaaatattggtcgcagcttccagggcgatgattaacgaggccgaaagcgggtatatttcagacaaggatattgaagaaaggaaagccaaagctaaacaatctggagactacgatgagtatgtcaaactacatgaccttcaaaaaagccaagtcggaattaccgagctttgtaaatatcgacgggtaaaaatagacaaattgctggagtctgaaggcgactcaatcggaagaatcacatctgagctagtcgggttgggaatatcaccctataaatatcgttctaattcagaggagcatgatagtgctgtttggcatgctaatttcattaaagaagaggaatcggttagattcagtgaaagacttccttctcatgaactaatgaaaataaagacgaaaatatcttacgatcaatctgaactgatagatgacgttatcttcgccaatacttttttcgcgctggaagaaacaggactggcatacccatgtatctcagataaagatgacatgccggaaattgatgcttggctaagggtgttttccggtgcctatcgtgttaaagagaataaatatttcgatgcaagccgtactcgtgattggtatgttgggaaagatgttgaaaaagagaaaattaagcgagtcgccagagttttattcggtgataacaactatcaagatggtttgacgcgtatcttaaagcagtttactgatttgaaacatccagcaggattaattagtatcggcaagttgtttcttaaagttgctaaacttggcgataattactggcaatgcggtaattgtgggcgaattcacttacatttagggttcaaacattgtacccggtgcgtaaacccgctcgacattgaacccagcggagttgtcgaagagctatgggaagaaaattttcttggtaagcgcattgtacgtggagagcgagacggagttaaacgtttccggctgaacgtcgaagaattgacgggacaaacggatgatttctccgatcgtctgcgtaagttcaagggtattttcgtcgataagatgagtgaacttgaaaagctagatgcggaaatagatatgcttgctgttaccacgacaatggaagttggaattgatatcggttcacttcagtctgtttatcaggcgaacatgccgcctcagcggtttaactaccagcagcgcgtcggtcgagctgggcgacgcggtcaagctttttctttcgttatcacattttgtcgcggacgtactcatgatgcttactatttcgcccatcctcatgcgatcaccggtgatccgccgccgccgccctttctggcggtagatcacgacgccattccattaagacttatgcggaaagtatggcttagagctgcatttaatcttttacgcgaagaggatcataaaaacggaacaactttccccggagataaacttgtcccacctgatattcatggcgagtatgtttctacgcatgattactatcgtgacgatgaaacgaattggtctgaacgattactgggagcgttgaaagcaacacagaatatacatgatcgctttattgaagcagcaacgttcgatccagtgcaaagacaacgtctttattccgcattaaatgcggaaaaaataatctatgaaatcgctgaactgaacacttacgtccctgaagaagatatggggctagctcgtttcctggccgaacacggtaaactgccgatgtatggaatgccgactcgagtgcgcaacctttatttgggattgcgtaaaacaaaaggtctaaatgctcaagaagaatacgaatggtcgacgatggatcgagatcttgatctcgcagttttcgaatatgctcccggctctgtattgattaaggataagaaaaagcatgaggtaataggctttacaggcaattaccatgaaccacaggttcaaaataaccgaatatcggatctatcgacggtaggctcctggcaagagtcatgcagccatgtagcaatttgcccggcatgtggctccgccaagctggagttaaataagcctgacagcgacattaattgcgaggattgccgcactcctattagtcctgacgaattcaggctttatatcacgcccgccgcttttcgcacggatttcaaacccaaagacgatatagatagttttatccgcatgtcgttgaaaaccacggcgacagtgttgcatgaaggcgtcccaacaaaatgcgattctttcactgtgcaacgcggcgaagtgaccatcctgcgcctcaacgatggtcctattaatggagaaaaggaaggtgaacgatttactgtcgacttggtaaccgatcaaaaagcaccgatgcccttttctacatattgtccgtcagttaaaggcgagcaggctatcgattcaggatggctggaatcgcacaataacccgcgctggcagtgtagcggcaagaaaaaaagttttgggcttgtatcaagcaaagagacggaatcgcttcatatcgaattaacaaaattcgatgctcgccttaatctggatatggtcgccagattcggtgaatacatgaatttacctacgcgcgcggcggctatcagcgcgacccagatattaacgcataaggcagcgctctatctagatgtttcgccagatgaatttgaaatgcttgaacccagactacatcttggcaaacccatattacaaatcgccgatgcattaatcaacggttcaggattatgcagacggcttgctgaaccagcatctgctgacggcttacctttgatagtcacattattacatgagattctcgaagagaataacaactggccgatagttgattttctaaaaaaagatcatccaactcaatgcaaaaccgcgtgttacaagtgcatacaacgctatggcaaccgtcgatatcacggcttgttggactggcgtttaggtatggcctatttacgggcgatggttatgcccgaattcgcatgcggcctgaacgccgccgactggaaccagccggaaatgaaaggctggcgagaaagagcgtttgagttagcggaagacgtcgaggcgctacgaccaggaacaatcaaattgtcaaaagaacattcattacctgttcttatcgaaatacaggatggaaaagagctttggcgagcggccgtaacgcatccattatggcaatggagggacgccgaacgtgattcccttattgactgttttggcctagctggcggggagtcgcagctacgattcattgatacgtttgaactggaaagacgaccattgcgtgcgcttgcgaaccttaaacggagttaa

SEQ ID NO: 27837 - DNA, 1146 bp, Klebsiella pneumoniae BIDMC 46b
atggcacgagcaggcctgggaaagcagtggcgatgcctcttcgccaatgacatggatccgataaaagcatcgacctacatcgataactggggcgatgaacatttcgacatacgcgatgtacgcggaatcccgtctaatgacctgccgcgccatgctgatttaacctgggcctcattcccctgtcaggatctatcactggctgggaatggcttgggaatcggcgatagagattccagcgctgacgagattacgcgttccggcgctgtgtggccgtttctcgatttgataagcaaactcagtgaagaaaaccgaaagccgccacttcttgtcctggaaaatgtgcttggattgctaacgttggatcaaggcaggcatttcgccgcgatatgccatcagctaagtaaaacgggttaccgctatggcgcaataatcgttgatgcaaaacactttcttccgcaatccagaccgcgtgtttttattgtggcagttagtcgtcatatatctattcccacaaatctggtttcagaaaaaactcttcctgaatggcattcgtcgtcccttattcgtgcctgtgatgcaatagcagaagaagttcatgacgactgggtctggtggtcacccggtattacgcccgaagccaaaatgaaggaactgactgacataatagattgtgaagacacaaatgcgctatggcactctgctgatgaaactcaacggcttattcatatgatggcacctgcgaatcaggcgcgtttggcgaaggcgcaggaatcaggcgagacgatgataggcagcctttatttacgcatgcgcaaagaaaaaggcgtcaaccagcaacgggcggaaattacattctcgacggttcttggctgcctgagaaccccgaaaggcggggcttctcgtcctcgcattatagttgtcaacggcaatcaggtgaaaacgcgtttgttgtcggtcaaagaagcggcggcgttaatggggttgccggatgattttattctcccggaagcgtatcaatcggcatttaaagttatcggcgacgggcttgctgttcccgcagtccgttttctggctgaacgcatactggaaccgctggcgatagctgtccgaaatgatgagcgccggagggaggacaaacacaaatga

SEQ ID NO: 27838 - DNA, 2565 bp, Klebsiella pneumoniae BIDMC 46b
atgaagtggacgccgcctgttacgcccgatggctgggaaagtaagctgatcgattattttctccggttcggtcacgacggggatgcgcaggatattcgctggtttgaagttacgccttcgacgctcgcagcggcattcgccgacagcggcgtcggcgcggatgaaatagaaaaagcttttcaggcatgtatgtcgaggataccagatctgccgctgcgccttgaaagtggaatgatggaaagatccaatgacaagtctcccggatattttacttatcttgtaatgacgctacttatcagcagtcaattcgacgctcaagaagaaagtaatgatttccgcctgaagttacagaactggttgcaaaccgggcatagctaccagaatttggcaggcgtaaacgctatgtgggaagcgctagctggatggcttgaacaacggattcagaaagaggagccttaccgtcgtctgattcttcctgaaataccacccagttggagtcacatcggctacaccttacgactggcttttcccggaaaaacagacttgcgcttgatgacccgagttcttaggaatcacccgcaagccgtatccagcccccgactgttaatcgactatttccaattcgcgattcaaaaagaaaacgcatcttacgcaatgagtcaggcctttaacgagtttaaaagcgcctggtttgctggacgtagaacgctcgccgatatgcctttctggcgcctgcgtcagcgagctttggcgcagttccccgatgttgaaatgcgtaaagcgattattgatatgcggatcgatttggacgattcgcggtgttatttcagctcctctgatgagaacaacgatagtgttttcgctccttcgttatccgaagcgctaatttctgcatctgctggacacagtgaaaacctgggaaaagccgtgcagatcggcttaatcttttttcatcaagtcggccatggacgctggagagcaatcgcagttcccgataaatgttcttcacaattttacatcgcattatcctgtaagcactccacgcgtataagcaaataccttgacgatgcagttatagaaggtgactggattttgaccagacgccctcagagccgtcatctagcaatggatatactccgtgtgatgaaagcgtcgtcagattcgccggatgaacagattacccgtcctctgatttacgacggaataagagtaccggggggatggctggggttgcctgcatttatgccattcatcaaatcagacgcgcgaaattacagggtttatgctttggggaaaaattgcgcaaaaatcgatgtcaagaagatagatgggcaattaatatcatccatgccactcagcggcgagtttattattgagcctgagttggaagcagacaagaaaatgccactatggcggcggcgagtgcgtttttttgatcgcgctgttccacatccagcgctaggggaaagcgcaaaatatcatctcgagcgtcttactgaatggaagatttcgcaactgaaaacccctgtattccgcgccgaatcgcccttgttaatggaagatggcgatgtgcgttgtgaacatcttctggaggctatttacgcaaccggcgccagcggctgggaagaagttgaactggtctcacttctccagagcgttgctgatggtatcagcatatggcatctgcttcgcagtctgcatgatgctggtctgattgagccgcgcttacgccagtcctggaaaggtcgggtatggacgctagtgaaaccctcgctgtttcatattcgctatggaaaaagcagtctggtcattgtagaaggtgccatctgcgccaggcttatagatgattttcaaaaagcggtctcagaactgggcggaaaatatttccgtcgcagcggcgtaagtgtctggtctcctcctgtattcggcgcggagattgatgatcctgtcacgttatcccggattatggaatggccacttgtcgaggcaccgttgaagtcagatatgatgcctctcgcatttatgtcaacgctccgcaccgctgaacttcacgttcaggcggcaatctgggactggaattccgggcgtttcctgccgcatgtggattcagatggcgaaacgacgcgtttaacgcgccatgttcatccgggtggacgcgatcatgatgtgtatcgtgttgttacccaccgaaaaacggagttttttttatcccgaaccgccgcaattatcgccgcgaacgtggatgctcgccgccctacgttcaggaaaatcgctgataaccgctttatttgcattaccaacgattgcggcttgcctgacgcactggcgacaggattgcggcgcaacctgctcagaaacggcggcccgacggaagccggatatgcttaccctctcgacgacatatctttccgttggctaaaccaactgcttcctggatgtttctattcgctctcgtcggatgacgataatagcgccagccagttagtttccgcagctcgccattccggcggaaaaatgcgtcttcaatggcgaaacgggcttctagcgttatggactgggaaataa

SEQ ID NO: 27839 - DNA, 2091 bp, Klebsiella pneumoniae BIDMC 46b
atgaaagatatcccttggtatattggtcaatatgaccgcagaaattatcagtcttacttcaaagttgtcgcgcaggaaaccctagatggctggcgtgtgatcgacaatcctaggaagaaatttcctcgtacaggggaagtcgagttcaacggaactgacattttacaatttcgcccgcaagaatgggctgcttttcaggtgggcccaggccctcgaaacaagactcaggcgaaacacacccgtcgtatttatccttattatgatttatcttccgggctgtcgctactggaggcgcgtcgtcgattaagtttcgatggcataacggcagacggcgaaccgggactatgggctatccgtttcgggcctgacggatttattctggcgaatctggctgagtcaaaatcaggctgtctgatgctgtccagaaaccagagcgtctatgaatatgctttcaacgaaaacggtgtaattagtgtatccgacacatctgaatgcgggaaagcattttatatgcccgatactgatgcttcacccgctagagtccatgactggacgccggataagcagtacatcgaaaacgtcattcaacttctttcctgtgcgtgttcgacaacggagctcgcttcatggcttcgggtgcattcagacgagaaaagcggaaaattaaactccggcgtcaatgatcttctggctaccgctcaatcactccgctcaggcgaactggcaaagaaattggaagacgaagattgcctggcccgtcagctaactgaatcactactcagtgacggcagaatcgctgacttgctcgaacgtcagatacaacgtatcgctgaagaagagcaagcgacgttgcgcgctgaacaaaaaaaagcgctcgaagacgaattttccgccgaacgccagcaacgtcgagatgttcttgatgcggaaatggctacttttctggcaacccaaaagaatgaaatcgaacatcaaatcgcccaattacgacaaagcgatgaagaaaaattacaggctgattttacagagaaacaagcaaaaatcgagctgacgctaaaacatgagaaattgcgcctcgaaagggaaatagatcgcctgaaagacgtcatcacggatttatgcgctcagaacgaacatcaacgtcagacgctggtttctctgaccagtgagcgtgaagcgttagtggcttctcttgctgacgtcaaagaacattctgctcaggcgcaagccgaactcgggcatatgaatgctgctattgctgaaaaagctcgccggatggcgtattcagctattcctgaggtacgcctcccgacagaagcgaaaatcgtgtcctgcaatgagttcggtggttgcgtcagagggaacaaattgctaacacctgacggaaagaggttgatggtgcagtttctggcgttgatgctggctggagaatgtccattgttatctggcccagaaacgcaggatttccttgctattgccgaatcactgatttcttcgggccgctccatccgacagatcgccgatccaacgatgatttcctgtgaagatctttgggttcgtgcgggaaataatatggcaacgccgctttatcagggattattgttgagcgaggcttcccgcccccgaacgatcctcgccattattgaacgtgtcgaatgttccgccgcgcgcttctggctgccagcgctgaaagaccgattgcacagcggcgatttgccccgacgctttctgatttgcggtaccattgaaaacgaagattgtgaagaagcggagaaaataaaggaacagcatcttcacctgcggatggaaaacgtcatcattcgaaatgcgattgctctgtcccctttacatctttctttagaaaatcatagcgagctggatcccggcccggcatcgcaaagttctctcccggaaaaactcactatcgctgatgaaatgtctgctggacgtctggatctggcaaataccctacgggcgatgagaacggcgcatgaagtcgcgccgcttgatgatgaacacaaagcgatacatcagaagcatttagtcgatttatacgccgatttacagaataacgagctgtacgcccaataa

SEQ ID NO: 27840 - DNA, 5997 bp, Klebsiella pneumoniae subsp. pneumoniae T69
atgaataacccactggaatcatttgaatcaataagggatttttacatcacctatcttgaaactgcttttcgtataggttcgcccgatattcaggcataccgacgtagcttactggaacagcaaggtacattatgtgcagatctttttctggaaccaatgccaagatatcaggattatggtttaaccatcagtgatttacgtaatgtggctgaaggtgaggaatggttgccagggtttaccgagcaacaaagggacgcatttatcgatctttgtctgggagggcttttgcctcgcgataaatccgactccaccaaaggacgttttaaactttatacccaccagctagacatgctgaaaagaggggtacagcccgcaatgccgggcatcgttacatcaggaacagggtcaggtaaaacagaatcttttctgctgccagttctggctcaaattgtgaaagaagcgagtggttggccgaaaagtccctcgcttaaatgctggcagccgtggtggcataatggagtaaatactcagcctacgtttatgcgtgaggcagaagcatcagcacggccaaaagccgtgcgagcgctaattttgtatccaatgaacgcactggttgaagatcaaatggtgcgtatgcgtcgggcgcttgattcccgagaagcacatgaagcgatggatttacacttgggtggcaaccgtatcttttttggtcgttatactggcgcaacgaaagtcactggctggttaaaccatccccgaccggggagcgaggaaaaagagaaaaaagagaaaaaacgggtcgctggtaaaatcactgaattgcgcgaatatcttcaatccgtggaagacacgcatcgggaagctgtgcggcaggggattcgggatcatgatgataacctgcaattcaatttccctggtgtatcaggcggagaaatgcttagccgctgggaaatgcaaaaatcacctccggatatactgattactaacaccagtatgctttccacgatgttggtacgagagattgacgatcctatttttgaccaaacccgagaatggattgaacacgatcctgatgcctatttttatcttgtccttgacgaactgcatcttcagcgcggtacagcagggaccgaagtcagttatttgctcaaacatctcataaaccgtctggggctggatcaagaacagcaccgacataagctgcgtattctggcatccagtgcctcactgcccgttgatggccctgaaggtaagaaaagcgttgagtacttatgggggatgttcggtcagcgaggactgcctgtgagtgcagcagccaaagactgggcagattgcgtggtgaatggtgccatggttgctccagcacaggataatacgttgcatttccacggtgacctcaaccacttctgcaatacggtaaaacagctacagggatcctcactgccatctttgcaacactggtcaaacgttgcccgaagtatgggggtctatcatgacgagcagtgtatagaaaaactggctcaatgggttgttgtgcaggccgcctgtatgcttgaaaaaggttgctatacatgtgaaaagtctctgcgtgctacatcaataaatactctggcagcgcgtatatttccctcccattccacaggacgtgaggggattcgtgcattaatatggttacgtgctgctacagatagctggcctgagtggttttcacatccctttcccgacgatattccattgccacgttttcgcgcccatgcttttttacgggcgctggaaggattatatgcagcaccgctaccttccccgtcaagtgcatcaacagaagaaagagagcagcacttttttgccgatctgacggttgagtctggcctgcgttatggcgagcgtcactatgacaacaaaaaatcacgacgcgtagaattactctactgtgagtgttgcgccacactattttttggcggcaaaccctcttctttctcagcaacggatagccgcgtagagcttttacccaacgatcccgatattgatcaactacctgaacatgctaaatcggttatggttgaacgacgttccgccgaagaatatgcgttgtttatgccgtccgtcgatcgattctggcctagaggagaaggaactccagccgatgaggactcttttgggaagtggattaaggctggttacgatccgtttactgcggcgattcaacacacgttatcgcctataagatcgattgaacaaacacatattgcaggctggttctattatgtcccatcgggtgatttttcctctaggaaaagaggccagtcgtccagccagtcaccggggagtgcgctgcctttccagtgtccggcatgtggtacatcatataaatacggtaaaggtaaactatcacctattcgcagttttcgagtcggctttgcgaaaaccacgcagctcctggccagtacgttgatggcggaattacaacgctctggcgatcgggaacggctggtcacattttctgacagtcggcaggatgctgccaatgcggcgctcgatttggagtcaggtcaccatgatgatgttcgccgtgagattgttgtgcgctcgctgaaggaactgtcagcgagtcagtgctcccataaacaagtgaccatacagttagaacaacttaataaacgcagaaaagaactaattagcaaagagattaaagaggggcagctctctgcggatgaagacaaagaattaggacagctttttggcgaaaaacagcggctgagtgacttattgctactgccacaggcagacagcgtatcgctgagcagtatactggagcctgaagcaccaatcgcaggcaacgtccttaatcctctgttggcaacattagttgaagcgggtattcatcctaccgatcgaacggggatatctcctgttcctgagccttcaaaacaaaaacatgatgaagaaactatcacttttgcatggcagcaattatttgaaaaaaacaaacagaccaaatggtgttggaagaaacatccttcctatgaggataatctggacgttgcccggaaggaaatctcccgcgacctaaaacaactggtcggggaaagcgtgttcagtaaaacctattttgcgctggaagaagcaggatggggttatccctgccttcctctggctaacagctgcacgcgtgaacagttggctgtctatgacgctatgcttcgcgtattggcggatgcctatcgagtcgcaccgtcccagtacacaacaacagaaacgcgctggcatgttgcagacgatgtgaagcctaaaaatcggttgcgccgttttagcgatgagctttgtaaccactccagagccaagacattattgctgattggggactttctggtacacctcaaacgctctggtcatcagggcggcattattgacattggaaaagtgcactttcgtttagtagaggctactgctcctttctggcgctgtagtcactgtggtcgcgtgcatttgcacaaaggggcaaaactttgcacccgctgttatgcgccactacctgaaacatcttctggtaacgcgggggaattacaaacccaaaactatctcggtaaacgtatatcgtatgcttcccgtatcagtagaatgcgttctgaagaactcacgggcatgacggggaatccggcagcgagattacgccgttttaaaagtatcctgattgctgatgatgatgacatattgccaaaagggctggaggacttcgaacctcatcctgagttggatagagccgccagagaggtggatgtactctctgttaccaccacgatggaagtgggggttgatattggcgatctacgcgcagtttttcaggccaacatgccgccgcaacgttttaattaccagcaacgcgtagggcgagcgggacgacgtgggcaggcttttgcatttgtattaacggcatgtcgcagcaagagccatgatttattttacttccgtaacccggaaaagatcaccggcgatctccctccgccacctttcttaactactaaactggaaatgatctgccagcgcttagtgcgcaaaatatggctggtggccgcttttaagtggctcagagagcatgtagtggattcggggcagtcgtggcctgttgatggtgacaaacataaacccgacaatcacggagagttttttcaggttcattggctaaaagaaaatcaggcaaactggttgccgcgcattcgtaacgcgctgaaagaaaccatcaacgcgcgtgatgagtttgctcaagcgtgtatgcaacaggatgaaatattctaccgcacaataatccaccctctgacgccggaatgtctaatacaagatattaaatcagtactggacgacgatgctatggcaggaaagggactggcggaagcgttggccgaacagggaaaattccctatgtacggtatgccaactcgaacacgacttctgctgacaaggccggttagtacggacgaacatgatgtacagttcgccagcatggatcgcgatctggatattgcgattcaggaatttgcgccgggaaaatatctggtacaggacaaacgccgttactttaccgcaggctatgccggaatgctgaagcaaagctacaaaaacccggccgaatttttcactgaagctgacgaaccgggagagtgcagggcgatgaccgtttgcccggtgtgcaaagtctgggtactggtgggctcgatgaccgctgtatgcagcgcctgcggtggggtcatggatggtgctgagcaatattcgtgttacgtacccaacggatttattaccactcttgaagataaatctgcaaaagaagactttgaccaaaccctgacggtggccagcagagtatctattgctgaagcttactcaattgagaatgcagtatctgtacctgactctaatgttgccatccagctaaaatcccaaacctgccttaacaggttaaatcgtggtgtttatgcggataaaaaatggagtggtttcaatgcgatacaaggaaatttacgggttccattcagaaaggcgggagtatatcagccgctatgggcaaaccacgtatggatagacagtaaccttcttgaggctgatttatcacttaaaaaccgctttacccctatgcaggaaagccgaaaatcgttttatctctcggcacctaaagtaaccgatttactggcgttgatgttggtggatactccggcggatctccagttacagtacttgcaaggcgcactgactcctgcatttcgggcggccgcgctatctgcttcttttatcatcgtcaactatgcttcgaaagagctacttgatactgatccggaagaaattgaaattctggagcctcgcgtacaaattttaaaaaacggtatttctgcaccgatattacaaatggccgatcgtctggttaatggttctggattatgtgagcgactacagcagatcgggagctctggctctccgattgttcttgaagtgatgaatgagattatcaatgacgaaggatcctatccactgaaagagtttttagaaccacagcatcgcgacgtatgttttcaagcatgttattactgcctgcatcggtacggtaatcaggcttatcatggcttgctcgactggcgtctgggactggatgtcattcaactgcttttggataaaacctatgatgccggactacgtggagatttttcatcccccggcatcattgactggacggttaatgccaaacgactggccgaagaagcatcgtctttatttaaggggagtgaagtaaaaatcgtgggaaatatcccgctgataggtattagcccacaacgctgggcggcagtactgcatcctttctggagttatgacggggtttttaaagctaatcctgaacttgaggtgctctcgcttgaggaagatatagtatttacaaatacctttgagctttctcgccgtatgggaactgtgatggcaaaactgtgcacaacacctcgttcgagcgaaaaatga

SEQ ID NO: 27841 - DNA, 1086 bp, Klebsiella pneumoniae subsp. pneumoniae T69
atgaatagtatttttgcaagagaaggagatgaaatccgggttctttcactgttttcgggctgtggagggatggactttggtattgaatctgccggaggaaagattgtttttgctaacgatatcgttgaaaacgcgtgtaaaacattagcgaagtattttcctgatactgatgttaagcatggcgatatctctcaaattcaaacttttccatctgtggatgttgtcgttggtggctacccatgccagtcattttcgatggctggtaacagaaagcccagcgacgatgcgcggaccaatctttataagcaatttcttcgggtattgaatatcgttcgacctaagtattttgtggctgaaaacgtttcaggattacagcagttgggcgcaggtagctttttagaacaacaagttaacgcctatcgggctgcaggatatcaagttagtcaccatcttgttaatgcaaaatcttacggtgttccacagtcacgcaagcgcctgtttattattggtgtcagaaacgatctggggcaatattttgaatttccggcagcaacgcatggtaaagcgaccttaaagaacccgcacttaaaaccttatgtttcccatggtgaggctatccgcgatttgccattatggccagagggtgagttttacgaacgacctcacgatcccgaggggcacttctcatggtactttatgtccagaaatcgtaaggccaaatgggatagtcctgcttataccgtcgtagcgaactggcgacatgtgacgttgcatccagccagcccaatgatgaagttaacatggtcaaatcttgaggacggctggaagcagcgctgggatttttctgaagaatatgaacatgttgctattgattcaacccggcctaagctggaacaggctaggcgtttgtcatggcgggaatgtgccagaatacagacgtttcgtcatgattttgagcctattggtgatattgaatctcgatttactcagataggcaatgcagttcctccgttactggccgaaatcatttttcaacatctattttctggtgatgggttgaaaatgaatttgaggaagggcgaataa

SEQ ID NO: 27842 - DNA, 2778 bp, Klebsiella pneumoniae subsp. pneumoniae T69
atgagtatatctttccctatttctttagaagagtggaatgcagcactagttaacgccgttttttttgagccttcccgtgcagatgtatttttgagtcgaatcgatactactggaagaatttttgagcaattggctggttctcgtagtaaagaagaagctaagcaaagctttcttgattcatttggtaaggatgaaagaaaaatacaacgttatctcagagatgattcaacgcttgatagtctgactcgaataaaaggcatcccacctcatttttctattctatatttaacgttacttgccgccagtgctgataatgaaactcatgatgaaggagactttagggttaggttttctgtattattgggactgaatagaaataagaaatttatttttagagatttgcctagcttatggcggagagttgaacaatggagtcagagtaaacagggttgttctcggttatttttacccgatccccaaaatgaaaagttgattgggtattctaaaaggctttcttttccttgttatagagatgaagttcgtttgcgagccatattggttcgtaataatctggacagccattcaacatttgagtctgttaataaagtaatacaccagagaattgatggttttagtgaagtattcgtcagtgaattcaatgaattttatacgctattatcaactgcagccatgcagcaggcatatagtagcccgttctggggggctgtgagggatattacgcggcatgaagaaaatcaacaagccagagagaatgggcttttctgcattcacttagacgctaccgatccgcaacttccagaaatttatctgttaatggatgatgttggtgctcagactttggataccgttaaaactgaatcgttaccagaaaaattggagagttacagtagcatttattatcagaccaacgttaatgctacattaacgagtttactttcatttctacaaaaaagaaaaaaaggcttaattggatcgcgggttggcatggcgctacatgctgggtgtttaccccttttcagggatgattctgggtttatcagttcggatggtcattattttgacgatggcctggtttgtttgattattcgtcgtgaatatgctgtacatatccgcactaggtttgaacatactggcctgactgttatgacgctaggaaaaaatacagattctgaagattgggaagttctagtctttgacacgatgagtaggcaggaattaaccgaacttgccaaattacttcctggtgctgctcgtagatttatggttcagagttggatacctgctcgaccttatatcacaggtgcagcccgttttggacagtcaatattacttaacccagccagtacgccggttattcatatggtgggtgccattggcggggaatatgtaatcagagattccaatcatatagaactggtcagcggcatactaacaccaacacaaggcggtgaaggactatttatttctccggaaaaactcacttcattatcaggacaggcgttttgtcgctatcggttaacgcttgagaaacatgttgaaccgttggtttttgacattcacgtcctcgatcatgcgccggatgctccgtatcgtaaagttgccgaacagcatgactggcttattgatggtcaacggggaacattagtgccattaaacaatgttgagtcaatggagtgtctgaaaaaccaaaaaactacctcactaggcggatcatggtcgctatggcgacgtgatgaacgtgtgcctgtagagagtaaacagtttgatttgcacatgcttcctgccgcatttgactggttagctgaagcactggcactgcgttttcaaaaacgcagtacgctaccatttgatgagcttaatacacatataacgcccgtatcactagcgacaggtattcctgcatggcggttgcgccggttgctttttgcctcaggctggctttgcgtaatagaaagacgacatgcgccgtatccggtggtatcactggcaaaacgtacattatctgtttgtgagacggtacaaggactcactgcccgagtaagcggtatgttgacgaaaagcgagcgtcatcatctgcaaggtttgttgaaagagagtgaacgggtaagacgttggtcaacagtggataataattttgcacttggcagtattgaattgattttgtcaggagccgatcgcgtaaaagatttgcttgaacgattcaattggcagcttctagtcagaaaagatttttctgttggcccattaagtggcgtgctgttatccatgactcaaataaagcaagttccagctttgccacctgatatttatgtggcgttctggcagacaaaaaagaaccaatggtcagaggaaatccagccaacaaatagcgacctgttaatgcgctgtcgggaaaaacaacgtaatcgttattttattcgggcggatacggggtactggcaaactgatagctttgcctgggcgttaatggctcacatcatgaggtcggaaaaaacgcttggcactcaaagtcactatggcgatctcttctggtctaaatcactaattactttaccgatttctgtcactcagtggtggttacatttcgccggtggttgttgtaccgtcagtgatgacggaaggataatatttgctggtagaggggatgaattgtggggaggcgttgagtgtgatgataatgctgttttcccggttaaccgagcggtcactcggcgggcgagagctttggcgctacgcaggataagcagcataaattaa

SEQ ID NO: 27843 - DNA, 2814 bp, Klebsiella pneumoniae subsp. pneumoniae T69
gtgtctaaaaaacaacatatcattaaagaaagattgaggcagatgtatctctttggtgcagagccttttgagttgatgaactgcctgaaagaatcgcagcaaaagctgattatggctggtgctaaagcggacaatttgccaaaggttccgaacaagattttacattttttgagtgcattaccacctaaggcccattccattgtgttaacgtggtttcgtactcacgtacaatttccagaacaaggcgatccccaaaaaatcattcatgagattctgctcgcagaaaataacgataaagatatctcatcaccaaaaccgctatggcgcgcaattcttgggttctacgtcactcagccttgccctgacatcgtcgcacaatttcttcgcggtgaagaaattacactactccataatgatgaccctgatgggtccagcgatagtttacctgagcagtcaacgattagtgttactgatgaagatatcgagcagtgtctattcgtaagtcagggacgtgacatatcgccttcagatcgaataattccggcgttcgttgctgggcttgttgctatgttgaagggggaaacggaagttgcaggtcagtgggtgtcacagttatccaatcacccactgcctttggggcaaaaatttggtaggctcatctcaacgtttggcgtcgttcgtcctcaggaagaggctgacaacggaatagtattattggcagagcctgttgcgccagacgagatcaatggcgatatcgatggagtgtcctttgtcggtaaagtgacgaaagtgcttccctctggcgtattctttgtttcgcccgttggcctgtttattgacgatgaactgcgggatctttcagatgctcacagccatatgctctatcccgatcgtggcgaagttataggatttttaaatcattttacaaataatgtgacccatggggaattaggcatatggcaagcgagacacaagccatccgataaaacggcccagtgtgcattgactgactaccagtctcgcgtatattccgttgtcaaaatcccctatgattccggcgaaccggatgcgattcgtgaatggctattaacctgttaccaacctcaagataaatctcctactatcttcttcttaaccgatggtctggcgctaagattacctggagacattcttgatcctaaaaaatatgattttgacgtacctctggattcttatcgggaactaagttgtgtggaactgcgctctcagtcaatcactatagtgcctcaactccccggattgagcgaaaaatatgattgtgcgcctgccattacatggataaaacggctgttaaagttagactattcatcgacagattttcctgtttttagcaaatcacacttacagcgtttagctcactttatggctgaatatgagtcagataatcgaagtgcgtatttacgtgcattgacgcaacttgagaaggttgcggtttcaagagaatttctggacggtagcattcaacaactgttgacgttgccgacaataaagacgcaaatctgcgcagagaagcaagtaatactggctcagtatgaaagtgagcaggaacaactcagacagacgattgcatcactgatggataagaaggcgcagttggatgcagaaattaaccgacaggaaaagacgctaaaaagcgaaacaaaccgtataaaaaaagcgctacgccagcaggaagctgagctggattcacgaatcaggcaaacctttgagcaagcgtctcaggcgggtatagaaacgttggcacagacggcgttgttgcgaacgatgatcgctggttcggccacacccacacccgttataccatcagaacgaatcaccgaacccgcctcgagccttccgttacctcagtctttactaccgccggaagtaaatgaaataaaaagcaaaagagtgctacaggctgcgatcgaagaacaggcagcgattaccggactaagcgaaaatctgttgttcagtttgattgctgccgcaaatgttgtatcagttgtcggattaacaggaaaatacgcccagaaaacggtcgtttctttagccaatattctgtcgggaagcatatggggggaggtctctattcatggtgatctttttagtatcagcgacttaatgaaatcacctgtgctaatcaggagtacaaatagcacgagctctatgacgctgggtgacttcttggagcaccaacaatcaagcgggttaatgactatagtaaaactacgcgggtttaaccggatgccgccggaaacattacttcccgaacttaacgaatgcctgtttagcagtgaatattctgcgggattatgctggaaggatcaaaatcataccttgcggcacctttcgttaagttaccctgtattgtttgtattgacgtttgccgttggtaaaagtacgttcccattacaggggccggttgcccaccagttgcccgtatttatggccgaatatagcagtacacaggttgagcagactgaatactcaccagccgaatatacttcagatattgctcccgcgtgcgtggcctccaaattatggtcttcgttatacgccgatgctcaccctaaagataatcagcagcaaactatgcgggcggtgttaaacgcattgggttattccgacgaaaaatctcaggcgctggcaatgctggctttcactattgggcgcagtaccacagaaaaaataaccgcagaaattgagccattggctcctgcattgataccttatgttcaggaaatcactcacggtgcatctgtaaccgtgcttgatcatctgttccagctataa

SEQ ID NO: 27844 - DNA, 6204 bp, marine gamma proteobacterium HTCC2080
atgggtgctttccatgatttgcgttggtttttgcagaagtatgtgacgtcggcttttggaaccaactcgccatcctttgaggaagagagaaagcggatactggatgagccaggcgcttttttccaagaacctatgttggaaccgcttccagaatacaaaaccggatctcatgtaactgaactcgatcagtccggtcttcccggcttatctgcgccggctattgcagcattcaaagcattggtgtccgagggtttggtgcccgatgagtttgcgttgtatacacaccagcaaaatatgcttaaacaaagcttgtcaggcaaacatgcagttgtcgtgacgggtactggatcaggaaagacggagtcgtttcttctacccgtcttggcacagatagttagcgaagcttgttcccctaagcagcgttgggctgcaccttctattccgaatgcatcgaagtggactcaaaaatccttaccaaaatggtccgatacggccagtcaactcagaggagagtcgcgggttccggcagtccgagctttgattctttatccaatgaatgcactagttgaagaccagatatctagactacggtctgcattagattcagagaaatcgcgtctggtcctcgatgaatatgtcgagggcaaccgaatccgatttggtagatacaatggctcgacccccgtttcaggccatccagtaattagtgatggagcaggtggatcgaagtctaatcttagcaagcggggggagcttagaaccaagctaaaatctgcaattaagcagagtgaagatctagataaaaaaataacctcactgcaaaaactgatatctcacgcgctcgcgcaaaatgatggcgtggaggtgaaaaggcttgatgttgagctggacagactaatcgatcaaaggtctttcattcccagagttaatgttgattctgcggagatgtttcaccgatgggaaatgcagcgatctcctcccgatattctaattactaatacgagcatgctttcgattatgctcatgcgtcaaaagcaccctgattacccggacgacagatccgacgctgatgttttcgacgccacaagaagttggcttaaagatccaaggaatgtcttccagttagttattgacgaactccatttatatcgaggggctgatggaacagaagtggcctacttaattcgacttttccttgctcgcctcgggcttgacgctactagcactcagctacgaattttggcatcgagtgcatctttggacggaacagatgcctcaagctatgagttccttggagccatgtttggcttgtcattacctcaggcgaaggcttcatttcacatcgaagcaggcgagctagtttataaacctgtcgcgatctcgggcccgtccttgggccagaaattatttgatgccttagatacagccaacgacggcgctttatcccctgatttgctggacaacgcatacgagatcctcagccgctttggctccgccgaatacttactccagccattttttgaccctgttgaagaaagatacagagcgacccctttttctgaggtggtaaaaggctggttcccatttgcctcaaagaattctgctgaaagggcaggaggggcgttgctcagagttgttggagcttctgctgctaatccaaatctaggcaacttgaatttgcctagactcagatttcactggatgatgaagaatatctctggcgtttgggcgacgggcaacttagctgaatatggatcagatgaaagaaggcgggttggtaagctctcggctgaagctgcaacagggctctctaagaatagattgcttgaggttttgtactgtgaatgctgcggtactcaactgctctcgggctttcgcattcctttatctaaagtaaagacagaactatcttttctaccaggtaatcctgagcagttacctgatgatggatctgttgttcgaacagatgagaccgactacgccaccatcggtgtaatctacttgttacccacaaaggattcggccgccgacagtcttgaagactggcagcagggctcaattgctcgaggtttttttggagatcctgtctctagggctcaagcgtcttggcaaccggctatttatgactttgaaagtggtgtagtgacgcttggtacctttgaaaacatcacaaaaagcgaggtgcattgccttttctttgatttaattgcatctccagaagagagtgttgactacaaggctatgccgcaaaagtgcccccagtgccattcagactattcacgccgcaagggggggcgctattcacctatccgagcatttgcgacgggtttggtgcaaatgtctttattgttgtctaagcatttaatgatgagtttacccaagggctcatcgaagaaattggtggctttctcagatagtaggcaagcggcagcaaggctagctgacgatgtcgagaaagagcaatggtctcacctcattcaacacttcgtactcgatgagatatcgtctaatgtaaaaaattcaaattttgtcgcgattaaacaattactcgaaatatgtgatgcagagggtatctcggcaggcgcgaaatttttgactcggctcaaggcgtcattacccgatcagtcatttagggaaatagtatccgtattcgaagactacaaaacgatcactgaatatccagacctcgcggatgactttaaaaaagatcgtgtggcgaagtcgagattagcaacgccagagacagtgcggctagatgacgtcttcagtattcctacgccagacaaaccgctgtctgggctttggtcgaatctggtgaagctcggcgtgccgccggctggtccagatgtgaggtttcagaggtggcctgaactgtttgattttacagatgggatgccctctttaagaccgagcgatgagctcacttcggaagatgggacgctcctacgaaatttgggtcaggaaattcgaaaagcgtcatggaaggccatttcaggtaaattgctatacgacttggaagcgaaagggtttggatatttcgttattccacctaattcgaaggttactcctcccggaagcttaacggtccagactttctctgagatatgttcttcagttctccgaattttgacggaggagcgtttggttaatccctatccattcgatcagggtggggctgaagcatggagggatgacgagccaaataacaaatctagatccgaaaagaaaaagcggattttaaattatctggaggcttgtgcagtcacttggacaacacaaatgggcacgttgcaagaggcggtaaggacgcagcttcaatctgcgcaacaccagtggggggttgtagagctgtcgtatctttggataaccgtcgttgatgcaagctctcaagtcatagagtgtccttcgtgtggacgaattcatctgcatgactctgggaaagtatgttctagatgctttaagtctctatctacaaacgatcgtgtcatgacagcaggtagcctcatagacaaaaattattatgcgctgctcgcgagcagcgaggactctaacctgagagtgcatgctgaagagcttactgggcagacaacagcgcagtctcaacgtcagcgtcacttccgagaagttttttacgagaacgaaaaaattattgaagatgattcgacctctcgggacgttaatccagctgtagatgcgattgatctgttatcggtaactaccacaatggaggtcggagttgatataggctcgctgcaagcggtattgcaagcaaatatgccaccagagcggtttaattatcagcagcgagtaggtcgggcaggccgaaagaggcagcctttttcagtcgcacttacgtactcacgcggtcagactcacgatcgaatccattttgatcatccaaaagagatgacgggtggtactcccccacagccttcactatcagttggatcagatcaagctatccttgcgcgccgactaatggccaaggaggttctccgattagggtttagacaggctgggatgacctgggaggattctggcagccctcctgataccaatggggaaatgggcgtggttagagattttttagaaagcccaaagcttaagcaggcaatatcgacttggttagcgacaaacaccgtgacaataaaaaaatgcgcggctgagatagcgcgtggaaccgaaattgaagccgacactctctttgagtacgcaacagaaaaattattgccgttgtgtgatgagatcctgtccagtcaggcagacttagataagggcgtagcttcatcgctagctgaggcaggtgtactcccgatgtacggtatgccaacgatggtgagggatctttattttgacctaccaaacgcatcatccagcaatgagccgaagaccttagatcgagatctttctcaggcgattctggagttcgctccaaataatgagttggtgtgggataagaggctattgagtgtgaaaggtatatccggacatattcgtccctcaggatataaaaatggaaattgggaggttaagacacctgcagtcagttctgttcagcggcaaatcttttgcaaagcatgccgacattttcaagtacatgagataaaactggaagaagtagatgaagattcgtttgtcgtctgtccgagttgtggagattcgcaggcggagcgatattgcgcagtgacgccagtcgcgtttatcacagacttcaaagtcgatactccgaccagtcatgcggattcaaataggtctaaagccgcgacgtctgtggtggtatcgccgaaattgattgatgcgaaaattcggaaagaggggcgagctgagttgtcgtttagtgctcagggcgaggtttataaagttagcaaggagatgtctggcggttcctttaaattcaagagggttggagtagtttcagttccaccaaaaagctccgataaaaatccgcagaaggttttctctgattcgcaggatatctgggtaacagctgatcagtcgccggatgtgagcgttagattttttgctccgaaaacgacagaccttttgggtataagggccaacgacggtaacggtctgggtttttttgatgtcgataggcaagtcgcagctcgcagagcggcttggtattcagctgcaacaattcttcaacgcgcaatcgccttggagctagatgttgattcaacttccattgaaatcgcatccgtccactttcatagcactgataagtcgagtggggctgagctttatttagccgatgagcacccaaatggcgcagggttagttgattgggccaacaggaattggagcgccttattgctgggttgcaccagtgcagagggcaacttagctcagatgggtaggtttcttatagaggcaaatgagcgcgcttctttgggtgagagttggcgaagtcccgatgcgttgttaaagggctttagaaacaagaatattcatgggctgatcgactggcagttgggtatagatttactttccgttttacgcgatgccgattacatgcctggtttttctagagactattcagtggccttatcgtctgtgaacggggattgggtagctcgtgctactgaggctgcatcaatgttggctgcagccttgggagaagacgaaaatagtgtccgtaggctggatgacgactcgccaattataggagtagtcagtaccaagggttctcagacttacatgaatattgttgcccatcccctttggtcctatcgccctggcgaggggactctaatttcaaagtccatagatgaacttttggaggtgtcaggctgcaatcatgtcatgttgatagatactttcaatatagagcgacgcgtttcttgggtaataggaaacaaagataatcgcgatatttttatgactcacgatgtgatgttagagggcacagattccggcgctgacgataccttttttgatatgtggatggatacggatattggtgacacctttgattggcttgattcgagctggatgaaacttacccctcaagatttgtggtcagcggaagatggcgagtggctcatttcagatggacaggtcactaaaggtagcgctccagaacttgtaagcttgcggcagataccggggaaaaaagctgcaaagcgcaaggctggagggaaatatgaaccgagtaaaaatccgggcctaaagattattgcaagaagggtaggagagtcataa

SEQ ID NO: 27845 - DNA, 1392 bp, marine gamma proteobacterium HTCC2080
atggctcgcccaccaaaaggtagcttaacgagtattttgagtgcatttatgaaaaacacacccttaacgatgatcgatttattcgctggttgtggtggattatctctaggtatggagcaagcgggatttacgcccatctttgtgaatgagctaaatgatgacgcacgtgcctcttatttactgaatcgagacttcgatctaaaagggaagccatttaatcaatgccatgagcttcactccgctgacatatacgagctcacacaaagccgacttaagcagctcaaaaaacatttgctcgatcttggcctcattacagaccatgactcccacacctcactagatctaatttgtggcggaccaccttgccaaggctactctggcatcggtcatagaagatcttatgccgttgagaaaaaagatgtgccctcaaaccagctttacgaaaaaatggcagaaattatcgaatttttcagacccaaaattttcctatttgaaaatgtaaaaggcctgctttcatcaaagtggaccgatgagggtgctaaaggcgagatttggcaagatgtttggaatcggtttaacgcgatcgaaggctacacgattcattggcaacttgtctctgcgaaagactacggtgtgccacaaaataggcctagggttctgctggtaggtatacgcaacgacgcgatgatgtcagatttggaaaagctccagcccatagtcgaggcacaagcttatgatattggagctgcggtcaaatggggctttcttccagagcctacgaaagactatcccgatccaaaaattctgctgggagatttggtggatgatccggtgaaagatatcctcctcagcggtaaatatccgaatgatttctctacaaagcgctacccaaagtcagcttcccacaagcttcaaaagcagctaagaactagacctggaagtaaaagtgccgagcgaaaaggcaatgaagttacggaacatgagtacagcaaacataaaccatcggtagtaaagaaatttgccgctatgattgaaaacgacggcgttatccccgatgaattcaagacaaagaaatttgcacaaagactattaaagcccgagtggccacctgaagggccgaacattaccgccacgtcattaccggatgactacgttcactttagtcaacctagaacattgagtgtccgtgagtgggcgcgactacagatgtttccagattggtatcggttcgcaggtaagcgcacgacaggtggaacccgcagggcaggcaacccacttgagggcaattttgacagagaggtcccgaagtacacccaaattggaaatgcggttccggtgaaactcgcgctggaaattggtcggcatttcgcaacaaaactgctaaaccaataa

SEQ ID NO: 27846 - DNA, 3003 bp, marine gamma proteobacterium HTCC2080
atgagcacacctttaaatttatatgacgaatggaacgcgcttttgctcaaggagtacttcggtcctgcaaacgatggtgaacaggtgtggatacaaacgacccgagaggagcttgacgactttgggtttcgtcttggtggcactgcaggcttaattgatgccgtaaagacaggaccctcttggtctaattggtcccccaaacacattgtgcttattgtaaattccttggtcaggcagagaaatagtgcggcttcgaggatggctgcatataaggatcccgggcgacatgaggagctttacgaaaacttagatgcccccgcctacatgccctatgtagcgttgttcgtgctcgccgcctctgaagtgggtgagggcggttactacgctacgacagccgagctttccgatggcttttttgagagttctgaagacagtcgagagcttctttgctccgtttggaatgaccttagagattggaccaacgacctcgctggcgaatatggaaggttttctagttttaagatcggcaagcacgcctacgtcgggttggcgaaagcgcaggctttggtcacacagaaagacagaatcgagttgccgaagatttttgggaggttgggtttaaagcctgctcaacagttcactaccagcttaaccaagcagattgcagaatctgttgctttctcagagcagtgcagtaacggaatgcgagaagcctgcaatgatcttagtacctatgaagatgctttaaatgaaattttttccaatttactaaatgaatgggaagaaactacaggagagcgcagagcaaagttaagaggtcaggctctcgcagaaatacctaaacttcaggtgatgcttagggatacttttgacgggtggtcaatttgttggaggtcccggctagacgggaatttcgagaatatccaactaaagattggggatagcccgtatcacggggatacagatcctattcgtggtcacataatattccgatcgtcacagccaaatgcgcaggatggcgcttggcagctattgaatgatggggctcagtcactagcaagtatcgaagcaaacgtcgaatactcaggagacgatcgactaccggagacaattagtcttgagctgtcaaagctttccacacgggggctttgttggatcgataccactgagggttcctgcactgctctcgctgaggctgaaatgcctgtttcggggcctctttatttattgtcacggctaactgatctgagtcagcagttggggaatgagcttggctcgaagtttgagcggattgctgatactgatgggctgtcctcgaagtgggggttgtgggtgatcgagcatgttgatgatcttcgccccagtgaacggtcggcggtgcaaagattgattggagacgacagcggtgccgaagagcgtgctcgtatctccttttacggcggttgcgttattcagagggcggggggacgaatgtatcttgactacgatctgccacacgtcgaggtgcaaatgccaccgaattctgtgcttgagtgtgatgggctgaccattacggagctagctccctcactaggctccaaaagtggacaaaaacatgtttctgcgaagcattactcgctcgcgcgtctggaaggcagcaataagctgcagtttgagcttagtgttaagcagggtagtaaaaaactttgtactaagagactgaaaatagcgtctgaggcaggtgctgcggttgggctacataaagatttttcagtaggaatttacggtgaacctaggttggattcgaacggcattaggggctacacacttcctgcagaagatgccgttcatttgacccccaactttgatcgctaccaaaagccctctttgtttgatagctggaaaattgaaacctcgcctacagattggttatcagtgcaatttatggatgcgctagcgtctaaaggttcgctcttatttggagaggcaaagcagctaatcagtagactaaacctctcatcttcggataaatggttgtcgcccataccttttttgtacgacatgcagtccttagggcacctcgaaattcagacggatcaaagaggtcatctaataagaattcacgcttgcgagccaataatttatgaggtctgcgatacgactaatccaaacctctcccgatggaggttttcgggaactttccgacaaattgtatgggtgaatctgattaaggcgaacgaggtacgtgtttttgcccttagagggattcttaatattttttgggagactagtgactctcgaagcttacattctttcgctcgggataataatttttttatggttgcaaatccggcggcgaacatattgagttgggcgggctcagtttcggggttgcggtcaagaattggtgagagaaccatagcggagagaagtagtccgtctaatctggagcgatttaatcctaatcaggctcgcttcactaccgatgctttgggcagcatgaaggtagatgcaagtaggcaggtcgagttattccgactagacgatccaatcattccagctatgcgggtatctatgctgggatctataaacaaagaggatcgtgcaacgtatagttatatcgaggactcaagttgggctgtgtggttggcttttacatcttttattgacttcgcaagcacgttgcccggctatcccgcattgagtccatggcctttgtgttaccgctctgaaactaactcgctaattctgcctgcccgactgcgattgccctctattgtagagcgcgctttgtgcgcttctgcgggactccttccaacaaaagtaaaatgcttaacttctgacaattcgccggatgatagatttgagctgttctgcgaggaatctatgcgaaaggtcgcctctgtacctgctgtgtatcacgacatggctgagggtacttggctggtttatgaaggtgtacccgaatatattgcttcgattctggcctcgaagttggactgcaagctgtggattgaattatga

SEQ ID NO: 27847 - DNA, 5952 bp, Massilia sp. Leaf139
atggaagacccgattagctcgttcggcgcaatccgcgacttctacatcacgtacctggaaactgcgttccgcatcggcgaccctggtatccaggcaaagcgccgcgaactgcttgaacagaccggcacgctatgtaccgaagcctatcttgagccgcttcccgcttacaaggatctcggcctgcgcgccgacgacctcgtctccgataaatatggaaaggaatggctgcctggctttttaccgcaagaacgcaaggcctttgcggagctgtgccttgcgggcctactgccggcagacggcggcgacccggcaaagggccggttcaagctgtacagccaccagctggagatgctccggaaaggcgtggggagcggaacgccgggcatcgttacatcgggcacaggctcgggcaagaccgagtccttcctcctgccgatctttgcagcgctcgcaaaagaagcgatgaaatggccggccagtcctaacctgcagaagtgggcgccgtggtggcgcaacgaatcaggcgcgccaaccttccagcgcgaaacgcacgaatcgccaaaacgcccgaaggccgtccgcgccctggtgctttatccgatgaacgcactggtcgaagaccagatggtaaggcttaggaaagccctggactcggatgccgcccatgccgcaatgaaccgcaacttcaacggcaaccgcatcttctacggccgctacaccggcgcgaccaaagtcaccgggtggctgaagcatccgcggatcactaccgccgccgagcagaagaaagcggaggagcgaaccggggagcttcgcaactattttcgcaagctggaagaaacacaggctgcagtccagcaggtattggaagaggacggcacggacgaatcgctgccattcaatttcccgcgtgttccaggcaacgaggccgttagccgctgggacatccatagaacgccgccagacatcctcatcacgaatacaagcatgctcgctacgatgcttgtgcgcgagatcgacgagcctgtgtttgccttgacccggcagtggctcgagtcggatccggatgcctatttctacctcgtcatcgacgagctgcacctgcagcgcggttcccccgggaccgaagtcggctatctgctgcgcatgctgctgtccgaactaggactcacgcggcctgagcaccagcacaagctccgcatcctctgttcgagcgcatcccttccgctggagggccaggcagggcagcaaagcctggactacctgtggggcctgtttggaaaggccggcattggggacggcgctacccgccaggactgggcgggggcgatcgtcaaaggcgagtctcccgcagtaaagcaagaaacgtttaacggcaatgtggacgtgctctgcagggctctccgggaggccaaaggccaggcagggagcggatccggcttcccaagctgtggcggttggaaagcaatcgcaacagcgcttgaaattgcgcagcagggccgcagcgaagaagagatcgctgcagactgcgttgccaaggctgggcgcctgctaaggagcgggtgcgccgtgggagcggacggcaatccccgcgcgacctcggctgctggtatcggccatgcccttttcgggcctggggcgcagtcgcacgaagcagcagaactccttgtctgggccagggcactttccgacacatggcgcaagcgcttcggacatagtctagaaccggtagacccgattccccgcttccgggtccacaccttcctgcgcgcgctggaagggctgttcgccgcgccgcttcctgcgcctgctggcctcgctgcgcctgaacgcgcggagtacctgttcggcgacctatcggtggactcgggcgtgcgctatggcacgcgcaaaaccggagaaaagcgtgcacggaacgtcgacatgctttactgcgaatgctgcggcgtgcttttctacggcggaaagtatgcccgcccacaagggcagctagaccggatcgagcttctgccaaacgatccggacaccgaggcgctgccagagcgggcgaaagcgagcatggtagagcagcgctcggcagaggattacagcatcttcatgcctaccgtgagccgcttctggccgcttggcagcgaggagctctccgaggaggacgcccaaggcacatgggcgcgggcggaatacgacccttttaccgcgaccatcaaggtgctgccgccgcacaaggagcctggcaacggaattcttggctggcattacctagccgaagcgccgcacttctccggtgatagcaggcgcggccagaatctgccttcggacccaggtacagcccttccgttccaatgtccggcctgcgctgtgtcgtaccgttttggccggggaaagacgtcgcctatccggggcttccgggtcggttttgccaagacaacccagatcctggccagcacgctgatgaacgaattgcggcgcacaaatccaggcgagcggctgatatctttctccgacagccgccaggatgccgcgaaggctgcctacgatctcgaaagcggccaccatgaagacgtgcgccgggaactcgttatacgcagtctcgaaggtctcaggcagaatctggcgtcgcccgggagcataaaagacgaactggcaaagctcaaggccgcgatccagcagcgcgcaatcaacggccagatcgacgaagagttttcgcggctatcggaagaacacaagaatctgtcagcactggagaaggctgccggtacggattgcgtcgcggtcgccgatattctagagcccgcagcaccgcagccgggaacgcgcaccaaggccgtgctcaatgcgcttgtcagccgcgggatccacccgatcgatccgaccggcatctctcctgtccccgagccgagctttggcaagcaagtcacattcgcctggcagcagctgtttacccggtccggaaaggactgggcgtggacctaccatcctggctatgtcggagagctggcagaaggcgccgaaaagatcgcacaggatctggtccggctcgtcggcgaagtcctgtttagcaagacgtattttgcagtcgaagaatctggatggggctatccatgcttcccgctcgccgaaggcgaaaccagggaatcccaggctcccttcgatgcgatgatgcgggtacttactgactcgaaccgcctcgacacctccccttacgcgtacaagcagaacccgtggaattccccgcaggacgcgacgcgccgcctgcgtacattcgtgcaggcctattgcgaggcaaccggggggacagtagacatggtgctgcagcgcttcctcgacctgctggcccagaaaggccaccctggcgggatcgtcatggctggcaaggtgtactacaggccgctgcctgcggaggctgcgtactggcggtgcagcatctgcggcagggttcacctgcaccgcggcgcacagatatgcaccaggtgccgctcaccgctgccccagcaggccagcggaaaggtatcggaactgcgcgagaacaacttcgtgggcaagcgcgtctcggaatcccacggcgtctaccgcctgcgtgccgaagagctgacgggcatgacaaacaatcccgcggcgcgcctgcgccggttcaaagggatcctggttcaggacgacgacgacatccttccagcagggttcccacagctgccgccagactccaagcttgaccgcgatgcccggattgtcgacgtcctttccgttaccacgacaatggaagttggcgtcgacatcggagacctgcgcgcagtattccaggcaaacatgccgccccagaggttcaactaccagcagcgcgtcggccgcgccggccgccgcggacaggcgttttctttcgtgctgactgtttgccgtagcaagagccacgatctgcactacttccggaatccggaacagatcacgggcgacccgcctccgcctccgttccttacgaccagcctcaaccagattgcacagcggcttattctcaagcagtggctggttgcggcgttccgcaacctgcggctggcacactcgaaaaagtggcctggcgacgagctgaagtcggcgccagacaaccatggcgaattcttcaagaccgcaacgttaaaggcaaagaaagcggaatggttcccaaagatccgcgccgagctcgaggcgctcgcatcgcaaagagacaggttcgccctcctctgcacccagggcgacaaagcacgtgccgatgcaattaccgctgggcttacggccgcagcagttatgaacgaagtggaaagggcggttaatgacccagcgatggaaggaaagggtttggccgaagctcttgccgaacgcggcttgttcccgatgtatggcatgccgacgcgcacgcggctattgcacacccggcccaccagcaccaagtacgacgcggtttcgttcgccacgatagatcgggatctggatgtagcgatccaggaattcgctcccggcaggctgctgacccaggacaagcggcggtatctcacggccggctacgccggaagcatgatttaccaggacagcttccgcaagcaaagcttccactccatgcccggcgatctcggggagcttcagaacttcgccgaatgtcccgtgtgccaatcgtgggcgcctgcggaagcggttgccgaaggcgctgtatgtaagtcgtgcaagtctgaactgtcaggagcgctagagtacaaaacctacgtgccacgcggtttcatcacttcgctggaagcgcgcaagccagacgaaatcctcgacgaagcgtcgatacggcccaaccggactgtcactgcagaagcagaagacatccccgtccagctgtggaccggctcgaatctggcaactggcctgagcggacagtcgcgcgttctgcggatgaacaagggacaatcggtcgagaacatgttcccgggtttcacggcagtcaagggcgacctcgaagcaagctatgtcgccgggggagtgcggcggaaggcctgggtcaacggcgtctacatcgataatattgcggccaaggccgatgccgcttcgccccatgggctgaagaaccggttcaagccgggcgaaactgccgtggagggcttctatttgctcgcacccaaaatgacggattcgctcgtgcttcttccgagctcggtgccagcccacctgcactgtatctcgtcccgggaagacggaacccgtcttttgaccggggcattccgcgcggctgcgctctccgcatgcttcatggtgattgactatgcgtccagagtccttctggacgtcgatcctgacgaattccagattctggaacctcgggtgaagcgccgcgacgatggctcgttcattccgttcatgcagatttcggatgacctggtcaatggctcggggctgtgcaacaggttgaaccagccgggagccacagggcagccaatcgtactggaggtaatccgcgaaatcctttcaggacagggaaaatcccccctgcccggcatgctcgaggaaggccaccgctcgaaatgcctgactggatgctaccgttgcctacacagatacggcaaccagacctaccacggcctgcttgactggcgcctcggatcgactgtcctcaagctcctgctcgacgggcaccatactgccggcctggatggcgattttacagcgcccggtgtcgccgactggccagccgttgcacggcagctcgcggaagaagctgcaggtttcctgtcgaccccggtgacgatgacggggaacattcctctgattgcgagaggacacggcaaatgggcagccgttattcacccgctttggaactgggatgccgtccttgcggcaaatccggaattagaggacatgtacatgcaatccgaggggatgtctgccgtaacgacctttgacctgtcccgccgcatgggcgacgtgcttcaccggctgaagtcatcttga

SEQ ID NO: 27848 - DNA, 1092 bp, Massilia sp. Leaf139
atgaatttgaacacgattgaaatgtgcgctggcgccggcggacaggccttgggcctgcacaatgcgggcttcgtgcacgaagtcctcatcgagatagatgaatttgcttgcaagacgctgcatcacaacaacaacaagctcgggtttggctggaaggaaatcgttgaaggcgacctgaaggtgtttgcggagcagcgggcagctgaattccacggcaagattgcgctcgtcgctggcggcgtgccctgtcccccgttcagcaaggcgggcaaacagcttggcgctaaggacgaacgcgacctttttccgactgctcttgagattgtccggaaggtacagccccaagcagtactgcttgagaacgttgcaggactgatggaaccgcagttcgcggactaccgcaagctgatccagggccagctgctggagatgggatacgcgtcagactggaagctgctgaacgcaagcgactatggagtgccccagctccgtccccgtttcatccttgttgcgttgaaagagcctctgtttgaatactttaactggccggagccgagccaggtgccgaccccgacggttggcgagacgctgttcgacttgatggctggccgcggctggtccggcgccgatgcgtggcgggagaaggcctgctttatcgccccgacgctcgttggcggttccaagaaacatggcgggccagacctcgggccggccagggccaaggcggcgtggtacaagcttggaatcaatggccaccggctcgcggcagacgacgagtacccgcatgcagagtttcagggagcactgctgcgcgatggccgcgtaagggaaggttttgaaaatatgcctctcctgaacgtccgcatggccgcccgcattcaggggttcccggattactgggattttgcgggctccaaaacccatgcataccgccaggtaggaaatgcatttccgccaccagtggctgaagctgtcggtttgcggatcgcccatgctattcgcgaacatgagcgccacaaggctggccttgctgcagcggcgcagcaggctgctttgcaagaaacgcctgagctgcgctgcgcagcgggctga

SEQ ID NO: 27849 - DNA, 2823 bp, Massilia sp. Leaf139
atggcctggcaatcatggacgctcagcgactggaacagggcgctggtcgaggctgtctttttcgactccggccgcctgaaccgcgaaataacgcgcatccagacctctgaaaaattcctggcccagtgcacaggagaccccgcctgcaatcccctagatgcgcaacgggcctttatcgcctcgtttggttcgacttcggattgcatccggcggcgtttcaagtggccacaaccgtctcccagcagaactgccaaagacaatattcctgaagtcttcgctgcactttatttgacattgctagcagcaagcgccgatgaggaaacctatacagagggaaacttccgaaaccgctttgtcgagctgctaaagcccgttaacgtggctgcccccaattttagcgtcctgccaaagctatggctccatgtcgaggattggagccggctgcgtgcaaagcagctcggcgactgcaggatccttcgactgccgcatccaggcatcgaagtcctcatcggccattcgaagcgcctcgcatttcccgcctaccgcgacgaaatcaaacttcagtctcttctgcacagccggaagctcagcagcggctcggattttcgccatattgccagcgcgatcgcgtcactgccaaaggaattcagcgcagcgtttcttgaagagttcaagattttccagctcctcgttgcgcaggctagatacggcgaggcctacaacagccctctctggcgggcagtacaggcgataacgtgggacgacgaccaggctacttcgcagcggatcggaagcttttgccttggcgttgacgccgccgatcctggctggcccgagttctatctgcttacagatgagcgcggccgcagcagcctcggcaacgcggcattctgcaagaaccttccagtcgctaccgattatctgtacgccgcacatctgcccgactgcgcgtcctggacgcccgcacaacttttaggcttaacagcgtctagaccgcgcctggcgcaggccaggctctggaagcatctggccgctggctgcgccgcgcttttccccagtgcccagaatagccttacctccggcggcagctactatgatggcgggcccgcttgcctcctggtgcacgagaaactcgtgcctgcaatccgcagctcctcatcccaccttgggctgaagccagccgaggccaaggccgggggggcttttggcgcctggaccgttctgttctttgactccattagcacggcctcgatggcgaggctcgcagaagcgctccccgaagccgcacgccaggccctgcccggcagctggcgcccgccgcggatatcgtgcagcggcggggcctggtacggccagtcattgctgcttagtccggcgagcacccccctgttcggactgtccggagccgcctccggctcgtacgagctgattggcgcggacacgaagcctgtaactggccagcttgaagaagtggacggaaagttccggataccgccgtccgcactcgctgctgcgccagcattcgatacggcgtacgtctctctgtcgcgggacggaaaggctatggaagggatgcgcgttccgctcgcaaaaaatatccctatggccccgcctatgcggcttgccgatcctaatgcatggctggcggacggaccatgcggccgccttgccgggctagccgctgaacctgggtttgcagacagcccggccggtcaggcgcgcatgcccgcacttcatccccgcttcagccgcagcgagctggcattcgaagcagcgacagaaagccgggatctagacgccgtgcccgatccgtacggatggctgtgcgaagcgcttgcactgcgtttccagcggcgccagacactgtcatatgccgacctctccagccatttgcggcccgcatgcgccgcggcggacgcgcgtcactgggctgtcaggaatctgctgttcagcgcgggctggattgtccagctgcagaaaagaagctcgccccatccggtagtagccgccgcacccagaacaatagcgctgtatggcacggctgggagcatgcacacggcccggatcgccggcatgtttccagagtccgaatgcgccctcctccgcgcctcgctcggcccggcagagtcggcggtccgcctcgcgccggctggagacctgttcggcatcggcgcaatacaggtcgaactcaccagcgaagcgcggattgccgagctggcacgccagttcgaacttgagatactcagcagggaacccggaacgccgccagttttccttcctccgcgagttttcgagcccgccgggggggcagcggatgctatgcgaagcgccgccgatgccgaatcctggagccccgcgcagcgcaaatggggccctgcaggcggcctgggtacagcgccagtgcccggaacgatcgtacggatcagccgccagcaaaggcgcgcgttctgggtcgcagcgcccggaggctggctcgaaaccgacagcgaggcctgggcgttcatgattggcctcgccgttgagaacaagccggtcggccaagtagacgctgcgggaaactgctggcttgacgtacggctcggcaggcttccgctgccgctggtgcgctggtggatgcactggggcggaggctgcgccgccgtggcgccatcaggcgaaatcgtgctggccagcggtagcggcgcggctgcctggagcgatttacgaagctggtttgcggccatcgccgcagcagcgccatcccaacaatgccatgatgctgcgctcgaacggcgcaggctagccctgcgcctccgcaaagcgcagcagccggctggctactaa

SEQ ID NO: 27850 - DNA, 2619 bp, Massilia sp. Leaf139
atgtttttaaccggcgcagacgagcatgagctggcccagtgcctgaagaagaagaaactgcatctgctcaaagcgggcgcgcgcgccgacaaccttccggagcggccagaagagcaagctaggttcatcagcacgctgcgcgaggaaccgatggcctgtatccgcgactggttctatgcaaacgcaaatttcgaggatcttccggatgtgcaggatgcctgcaggatcctggcggacgaagctgaagctgcggccctggacaggggtggacggcgcctgcactggcggtccgttcttgctgcgtttgtccagcagcgcaacagccatgcggttgacgctttcctccaacattcgtctgtcgcccggtcgccggttctgcctcaagcgatgaaagacgagggtattatcgtggtcaagccttcacacgcccgcgagcccgccaagagcagtgctccggacagcgcggcagccgggaaaattgccggggcaattcccagcatgcggcccggcagtcttgccagcgcgctgcccctccggctgagcgaagtcctcctgaacgacaaatccgtccttacggttctcggcaggcgcacaacagtgctgccgacagggcagtttttcataaagatcagcggcatcctgctcgacggcacccctgtctatctgacgcccgatgaatccgaactggtctttccagactcgggcgacgcaaccggttttccgaataccgtccatgtcggcagcagctcggctgagagcctctcggtctggcaggtagagcacaagagcccggacaagaaggtgcagtatgtggtgacagattttatgtcgcatacctacgaggtcttcgatatcccgcatccttcttctgagcccgatctagtgcgggactggatcaaggaagtttacaagcctgcccatgacgtcttccccgtcttccggctccaagatggcccaatcgtgaagcttcctgccgaagtgaccgatccccggaccgcgaatttcgatgccgccctgcccctttaccgcgaacacccgacggtgaagtggagcggccggacaatcgtcatcgagcccttccccgccagccgcctgcagtatgactgcgcgccaatccgtaccgccgtccggaaactgttccgcgaatccgccgagctgtcaggactgccagtcctgacgaagcggcagattagcgagcttgcggatgcggcagcacggcattccacggacgccacgatcaaacagtcggtccagcgcgcaaaagcccggctcgagcagctgttcgacaacaaggaggagctgcgttcgctgatggaagagatcgtgctgctgccctccgttgcagaggcgatcggagccgagaaaacgcgtgccgcagcggccgtacgcgaagaggccgagagttcgagagccgagcttggaaagctggcggccgagaagaagcagcttcagtccgagatcgaaaacctcaagcaggcaaggaaaaaagaatcagcagcagccgcgcgcgaaatcaagcaggccttcgagcgggccggagccgacggcctgaagacacttgccgaactttccgttttcaaaaacatactcggcctctccgctgcgcacccggctggcactgcccctgctgcgcagcctgcggagcgcgaggccgcgcagggtgcggctctcgagcagccggctctgcccaagcacatccatatcgccagcgcggagcagctccgtccggtactcgccagctggcagctccacaacgggctgagcacgcggatgctccaggcactgatcgcagcagcggcgacacaaggggtggccatactcgcaggaacgcggcggcacgaggctgccgccgcgctcgcatctaccctcgccgcgggcaccagctgcgccgtctccgttagcgcggacatgttcaacacttccgatctcatgaacgcccctgctacggttactgatgcgcatggcagccgcgccgggcagctgggcgcctttatcgcccgccagcaagctgccgggatggtatctatcgtccggatccgcggcgctaaccgggcgcctcccgagtcgctgatccccgagctgctggagattgcgggaacgcccgtcggcggcagcgcaattacatgggcacgcaaggacggctcgctccagctcattacagctgagtgccctgttgtattcctactggaactcgctcacggccgctccgtgtttccgctgatgccaccgcttgcatgggaaatccccatcatcgataccgacgcgccatgggcggactaccacgaacccgagttcgagattccttctccgtgcgcggccatcgcaccggaactgttcgcggcgttctcgccgcccggccctgtccctcttccatccgcacgcggaattccacgcaatgccatcgaagccgccaggaagatgaagggcgcatgcatggcggcaggccttggcgcatctgaaagcgcactagttccgctggtggcgctagcccactgcagggcagatagcggcacgctggctgccatgatcgacgccgctggcggcgagctcgctccggctttcaaagcatatgcggctgaagccgcctttacacaaacttttgacatgggagcagtttga

SEQ ID NO: 27851 - DNA, 6144 bp, Methanosarcina mazei LYC
atgaatgaccctataggagcttttgatgaagtaaaagcaaactttattcgttatataaaaacagcttttggtacccgcttcgaatcaatcgaaaaagagagagaggaaatcttaacaagttccgatgtgttatgtcaagacccttgggtagaaccactaccacagtacaagagttcaggaaagaaaattaagtcttctgacagaaattgtgaagttagttccaaagatctgggtggagctcttacacagaaacaaatagaagattttaaagaatttgtttcttgtggtcttttcaagaaggatatccccctatacactcatcaacttgagatgttaactaagtcccttcaaaaaggaaaacattgtgttattacttctgggactggatctggaaagacggagtccttcatgttaccattatttgcatacttaataaaagagtcttcagaccaaagtatttggaaaaagcctgcagagaaattggaacaccaagaagactggtggtgtgcagaagctgattgttggagagaagaaaagttacagtcgggggtttcatgtagggttcctcaaaggaaaaatgaagaagaagcaaaagaaactggaaggccatctgctgtccgtgcaatgataatataccccatgaacgctttagttgaagatcagctaacaaggttaagaaagactcttgattcagaaagtgctttgaattggtttacaaataacagaagaggtaatcgtttttattttgggaggtacacaggtgtaactccaattcctggaaatgagtttgaacctccaaacggtaaaaggctgaaaccagacaaagaccgaataaacagactcagagataaattacagggcatccaaaaggtttctgagaacgctgtagaatattataaaagcttgtctgaagacgacgacgaagcaactaaagaggcaaaaagagaatcagtatacttttttcaacaacttaatggttcagaaatgagaagccggtgggacatgcaagacttccctccagatatactgattactaacttttcaatgctgagcataatgctcatgagggaagaagacagcaaaatatttgaaagaactagagaatggttggacgggggagatgaccgtgtgttccatcttattatcgatgagatccacctctacagagggactgcagggactgaagtggcatacctccttaggctccttctcctaagactaggcctgtcacctgagagtcccaagcttaagatattagggtcaagtgcatctcttggagaagatgacggagaagcaaaaaagtttttacaccagttctttggtttcccaaaagatacccttgaaattattcatggtgaacaagaaaaacaaaacagtggattacacgaggacagaaaagtagattgggaaaaacttgcaaatgttttctgtagtttcgtaacagctaaagaaaatagtgaggtaatagtaagtcctccacttgatgcatacaaggaaagtgtacaagaactcataacaatttttggactccaaaaaaaggaaaacgaagaagactggaaagcttcaatggtagcagttgtagagtcagaaagtcttggacttgggaaccggatgttacatgcatgttctcccgaggaggtaagaaccagggctgtacccctcgaatactttggaaaacgtctatttttccctttatatgatgaagaaaaaacaagaacagtaagaaaaaaaataagggctgcagtaagagggcttttcattgtaagggaactctgtgataagttcagagatccaacttatgtaggagaggagttcgcaatttacgtgaagaataagtatggaactcagtcaaaactcccttcattcaggcttcactggttttttaggaacattgacggcttatgggcagctacacgtctagttgacaactcaagtgacagtcgtcccgtgggtgaactgtatacccaaccttacattatgtcaaaggataaagagccctgcagagtattagaactcctttactgtgagcattgcgggacagtatatctaggagggaaccgtttacttacaggagaaaacggaaacaaattagagttattacccgttgaacctgaccttgaaggtgtacctgacaaaggagtaattcagattgtagagatgcgtaattataaagattatgctattttctggccagtgggcgaaagacagtccttacaccctgattctataggttcttggcctctttcaaaggagaaaattaacgattataaaggttcatggaaagaggcatggttagacactagaacaggaaaagtcttacttgagcaaactaacaagatggggaactcgtgggtcaagggatatttgtttgttgctgtaaaagataaaagtctgttagatataaatgaagatttagaaacctctctattaataaaggcccttccatctcattgtgcatcttgtggagcagactatcataagaaaaaacgcgtatcgcccataagagggtttagaactgggttcgcaaaggttactcagttacttacagacgaactattttcacaactcccaccaaaatcccaaaaaatggtcgttttttctgacagtcgagaagaagcagcacggattgcagctagtgttgaaagaaatcattactatcaattgtttagagaaatatttaacgaggaactccgcgtttttgcagagggtaaacctaatcttctaggagaccttgaacgcaactatgaatacttgaaagatcttgaagaaattgggaatgcctcagagatatattcgaaaaaatcagaacttttccttagagataacaaaatataccaagacaaaatttgggctgaccttcttacattaaaagacgaagtcccgaagaatttacctgcacaattaaggaaaaaacgcgaaaaagaatatgaagaagcacttgcaagggtgaactctataaagaaaaacggcgaagaaagaaaagttattctaaaggagattattgctccgtacagagatgcagatgagattgaccctggtgctttaataagacgttttgtgatgttaggagtaaacccgggagggccagatatcagctcccaaaatttggaagtatatattgataaaaacgagggaaaacggataagacgtgtaatatcctggaaagatctatttgattttaacactggtaactggaaagacactactgataagtctgaaattgaagctagaaaaataatactcttaaaagtaagagaagaaacctgtaagcttctatttaatacactatactttgggtttgagtcttcaggattaggatacgtgaaagctaatctaagtccagaatatttagaagaatgcgctcaaagcttaaacttagatcctgagacttttcttgaagtttgtgattctggaattcgtattttaggggatctgtaccgtcacgaagcttcagaatatgaacaaacagaatggacaagttatcaagttgcaaaaaggacgaaaagatttagtcactttgtcaaatcacttgctgaccacttaggtatttctgaggactctttaggtaataccttatttaaagcccttagaaactctggacaccacaaaggtgttatttcaactgaaaatataattatcaaagtttcttcagaagatgaccctgtatggatatgtgagaattgccgacgtcctcaccttcatgcttctgccggtgtatgtactaactgtgggaacccgttagatgaagagccgagtaatacttgcaaagacatatgggatgagaactattactcctcccttacattacaagatagagaatctcttcggttacattgtgaagaattaacaggacagacggataaccaaggagagagacaaaggcaatttcgtaacattttcgttaacaaagatgatgcagaatcagagtatgtaaagaaagtagacgaagtcgacctccttagtgttactactacaatggaggtgggggttgacattggcaacctacaagcgataatgttagcaaatatgccaccggaacgtttcaattaccaacagagagcagggcgtgctgggaggagaggtcaagcgtttgcagtagtgacaactttatgtaggggaggtaggagtcacgacgactattattacaaagacccttcccatatcaccggagatgaaccacctcttccgtttttagcgatgggtgaagaccaagagcagatattaaaaaggttattagccaaagaatgtcttagagttgcttttagaagtgcaggagtaaggtggtggcacggtccaaaaaataaagatgttcatggcgagttcggtaccccaacgctctggcaggaaaattcagaaattagcaagaaagttatatcttggctcaaaactaacgattatcgcgaggaagtcataaatgctttattggtaggtagtgatgtatcagacattaaaagtgaaatgaataaatacctgtcatatttagggagtgagctagtcaatcaaattaataacgcagttgaatgttctgaaattgctggagatggtctagcagaaaagttggccgaatctgcagccctacctatgtttggaatgcctacacgcataagatctctttatcacgacctcccaatcaacgaaaatgaaccccggacggtagaacgtgaacttgaccttgcaattacagaatttgctcctggagctcaaaagacaaaagacaaagcagtccacacagccataggttttacagctccagttgttaggagagggccacggtgggttcaagccggtgatactaatcctatcccttttgtccgttgggtttcccgctgtaggaactgtggtaatatcgagacttttgaagtagaaactactaaacctgaaacttgtaatgtttgtcttcaggcaggagaggaagaaatcgaatattatagagtggctacacctgcagggtttaggactgatatgtccataggtagcgactcgatagaggatcaaccatattttgggatgatttctacaacttctgagaagattgaaccaaaaatagaacaggagagattcaactgcaccatttctttttcagacaattgtcccatgtggcgtataaacgacaacagacaagaaaaggagccaaagctgtttagaggtgctagggttaatacatggaacaaggttcatggtattccaatcaagttacaagaccaatggatagctgaacaatatatggcaaaaaatatggaacgcggttatgaacctgaatatgaagaacttgctctagcttcaagaaaaattacgaacgttatcagctttatgccaaagagtgtaaagagagggatcttacttaatccattttcttcaggagaaatggtaaaagcagctgtatattctgctgctttcatgattcagtcgataattgctcaaagacttgacattgaccctgaagaattggacatatgccgtatacagggaacatatgttccagggactcaggagttggtaggccgagtaataataagtgatagtttaccaaatggttcgggttttgccaagtgggcatatgataactgggaggaaatagagtccgaaatcctttcaacttctccccataactcctatatgggaaaaataatttctgaaggacatgttaatggtgacgcacatgttccaccttgtaggactgcatgttaccaatgtcttttttctttcagaaatatgtcataccacggccttttagactggcgcttgggcctctcttacttgagattacttcacgaccttaattactcctgcggtatagatggtaacttcagatatccagaattacaggactggaaaaacacagccgagatggaagctaagaaatttgccaaatcatttggatttgaataccaagagaatgatgacttgccgcttccctatataaccaggtctgagaaggacttaaaaattgctgtaattatccaccatccactatgggatgcgaacgataggactgatattttagcaaaatgttttgctttagcgaaacataaagggtatacaccttttgggattgacacttttaacttagtgcgtcgccaaagctggtgctattctaaactccaaaaagaggtttctgaatttttccagaggggagaaacatga

SEQ ID NO: 27852 - DNA, 1470 bp, Methanosarcina mazei LYC
atgccaaaaataaaaaatagtgctagaaataaatttgagaatttgaaatgggagtactataaaaaaattcaagaacctattaatggaatcactaaaagtcaagtgcgtgcctattttggcttgattacttggatttacgaaaaagagtacatacaaagtggggaagaaaagctcaatgcccattttaatgcgcttgagacagcattaaatatttatgataaaaaaagaaaaaaagatgaagttgtaagtagttttaaagaaaacttacatgtttggagagagtcaaataaaaaattcataccacgtgatccaggtggggaacctatctgtcgaccaccggtgagaatgatcacagaatgggagaaaaacgggctaacacaaatttctttgttttcaggcgcttttggcctagatttaggttttatggcagcaggttttgacccgagagttgccctagatatagataaaagttcttcttctacaataaaggcaaacttaccagatatccctttcataaattgtgatataaatagtgtaacgacgaaaaaattacttgaagaggcaggattaggtataggcgaagttgatgtcctcgttggtgggcccccttgtcagccgttctctaccgcagggaagaggcttggtcttaaagatccaagggcttccccattgagggagttcataagggttgtaaaggaagcacaacccagatgcttcgtgatggaggaagtacctggtttacaatctgctaggttaagacacgtctctattgctgaaaggagtaatagaactctgcttccagatgaggaaagtggttcggcctttaagcttattaccgaaatgcttaaagaaaccagatataatatcaaatatgaagtcttgaacgcagcagactatggtgcgccacagagtaggaaaagacttatatttattggccttagagagggctttccttgtatgccggaaccaactcattctaatacatctcaattgaagattgggagtaagcaacctttactcccttggactactttatgggacgtaagtgcagacctccaaggatgtaatcaagaatctgctagtctatcaaataaaactagagagtacatagagctggtaccaccaggtggaaattggaaaactctgcctgatgatacgaaggagatagctatgggtggtgcctatacctctggtggtggaaagacaggttactacagaagactttcatggaacgaaccctctccaacagtcgttgcttcacttactcaaatggcaactttattatgtcatcctgaagaatcaagatctcttagtatagatgagtacaaaagggttcaaggttttcctgatgactggacgatccctgggactgttcccacaatgtataaacttataggaaatgctgttcctgttcacctttctcatgcgatagcgataaaagtaaaggaaatgctgataaatgaaaactga

SEQ ID NO: 27853 - DNA, 2094 bp, Methanosarcina mazei LYC
atgggattaagttattcaggatggaacgatttaatttccagatactattttaatgaaaagatggctggacgtgaggtagtcttatttgcaaatacagaccttattgagagcttaggtaagcctttcgaagctgattttaatgacttcatccgaaaactaaagattggtccaatttatttatctaaaaagtataaagacatttaccaaatagcttatgacacatataaatatgggaaaaagtataattttccatatccaccttatcttgcttacttagctctgttcgtctgtacagccacaattgatggaaattttgatgataaagcttactatccaaggttagcaaagctattaggcgaagaggacaggtacccaaaagcacgcaccagtgatatgaaatatctgtgggaagaccttgaaaaatggagtaaagatatcagaggagaagaatttggtaagtttgcgaagagaattaggggaggaaatattcatattggaattccactttcgcagacgatcatttctgagaaagaacgcgcaaatctcccattctttttttccaaagcagaccttgacccaggagacttaccttcagatgaagctcttaaagcaaaattaaaactgtatggagaccagtactttcaaaagcgtacactgggactaattgattcctcaaggtctgatcataagtacctttctgaagcactattagattttatcctagaagaattggaaaactgggacggaaaaatatcaagtacaattgtcgaaagatatgtagagcctacacttaaatcagaaagacattcagaatttacgaaggtctatttgaggatctgtttaactgaggattttgccagatatataatttctttgaggataaaaacaaaagaagaatatccagataatgatcttgagtttaaagtagaaggaagagaaacgaaatttacctgtagtgagacaaaccagccagaatggtcacgcaggttagaagaacaggtaagtaaacccaatgaagttgcagacgattcacaatttaactggctagaaggcctcgagttaagggacgaggacaacaaatggctggcaaaattgaggccttcaagtgtaagggttttccttccagggaattttgagggacttaatgaagactgggtagagtcccaacaccttgaatatgggtgtaaatttttggtcgcttgtcacgatttgcataaagaccaaatttctgaatggggacagagcaacaccgaatcatttgaagaaaaaaagatatatggcctgcctaattggtcactattttttggaaaaaatgcatataactcatgcagcaagtatgaagcactatcattacctcaaaaagtccgcttacggttaaaaggaggggtgaaagttggaagaggaaaccagtacctcaactttgccccaccttatttagttttggaaggtgctcaaggagacgaatctcttacggtgaatggaataaaactttttactgaccaagaagaggatattcgaagatacacactacctgagaatctcgagataggagaaacacttacagtcgaggttactaaagctggcgagaaaatttgcaatatccgaacaattaagctagttgaaccatttttgatagaagacttcagtcaaatacccaagagaaaccaccaaggaaacataataaaagagatacaggcacctcgatcttttgcccagggagctattgtttacgggtgtgagcttcatgatcatgtaccaattggactccccacttatttgtcacacagaattatttttctaggagcgaccccagggcagtttgttaactggccagatgatgagcttcccagggactggaaccccgtatggggaatagctaaatttaaacaaaactgggaagtaaatttctgtgggtcagtagaggatcttaaaaaaaatccttctaccaaagaaaaagtagattgcaggaagaaaataaagaagtggagagagtacatctggggtataagaaggacggtaaaggatccaacactccctattttaaaagaactttggatcacttataaggaagttgcaaagaatgttagaagctga

SEQ ID NO: 27854 - DNA, 5883 bp, Methylobacterium oryzae CBMB20
atgctcgacccgatcggcggcttcgaccgcctccgcgagttcttcgtctcctatctcgacaccgcgttccggattcggcacgccgacctctcggacacgcgaggtgcgctcctcaggtcggccggccatctcgcggcggtgcccttcctggaacccgtgccccgctatcgaccgtgcggctaccgactggaacgcctcgcggaggacttcgcgggcaatcccatagggcatctcccgcgtcccgcacgtacggccttcgccgagttggcgctgtccggcctgtttccaggacgcgacgccacgggggccgaagtcggacgtgcgggcaccttcgatcccttcacacaccagatgcagatgctggaaaggggaacccgacccgggcgccccgggatcgtcacgtccggcaccggctcgggaaagaccgagtccttcatgcttccgatcctggcgaccgtcgcggccgaagccgtgcgttggggtgcgcccgcaccggggtatctcgccgaccgctggtggaccgacgcgccggagcgcttcgttccgcggcggacgggcgaggccggaaaccgcccggcggcggtgcgggcactgatcctgtatccgatgaacgcgctcgtcgaagatcagatgacgcgcctgcgccgcactctggactcgccggaggccgaggcagtggcgcgccggcgcttcgccggaaaccgcatattcttcggacgctacaccagcgccacgccggtgacgggacatctccagcatcccaggcgggcgggcgatgcgagggaggcccgacgggtcgaacgcagaaccgagcagttgtcgcgacgcctgacgacgattgaggaagatcgggaaaaggcccgtcttttcgacgagcaggaggcggcgcgcgcccgccgggagaaccgcgaggcacccgatcccacccgctacctgttcccgtccaccctgggcgcggagctctgcacgcgttgggacatgcaggccaccccaccggatctgctcgtcacgaacgtgtcgatgctcggcacgatgctgtcccgggaggtcgacgcaccgatcttcgagagcacccgtgcctggatcgagagcgatccggacgcctatttcttcctcgtcctcgacgaactccatctcgtgcgcggctccgcggggacggaggtggcgggcctcgtgcgggccctcgtggagcgtctcgggctcgcgcagtcggaacaccgccacaagctgcgcatcctggcttcgagcgcctctctgccgaccggtggtcccgagggcgagcggagcttccgctatctcgacgacttcttcggtcccttcggcaccgtcgccgctccgggggcgccagcggccgccacgcaggcgttctggcgcgactgcatcgttccgggcaatccggaactgcctcccgcgccggccgcgctaccgctcgatccggctccgttcgcccgcttggcggagctcctcggcgcttccggcttcgcccggaccgtcgagcccggtccggcgatcgaggaagccgtctcggcggcacaccgcgccctcctgggcgagccgccggccgagttcggtgcgacggtccgtgcggccgtggaggccgcggctgcggccctcgtccacgcctgcacggcgacgggcgacgcccgggatgtgcgggccaccggcatcgacgtcgtggcccggcgcctgttcggcgaggccggtctcagtgcggaggcgcttcgcggactgacgattctgcgcggtctcggcgacagagccgccgcccacggatggcaggcgccgcgcgagacgacggcgagcttccgcatccacatgttcgtacggagcatcgaggggctcttcgcgacgccgagatcggccggcggcgcgacggtctgggacggcgtgacggtggagcggggaacgacctacaccgagttggccgagtacggcttcagacgtgcgttcgagctcgtctactgcgaggcctgcggcgaggcgttcgtgggcgggatgcgcggggtgtcaggcaacggcgcagccgccgtcgagctccttccggcttcgcccgatctggagaacctccccgacggcgcggcgagcggtcactacgaggatctgagctacgacgcgttcgcgatgttctggccctcgcgtcgcgagccggatccggagcggcccggcggcgaactgtgggagcccgcggttctggatacccggtccggactcgtgtccccgccgaacggtgagatcgacgatccggcccgcgtgcccggtcgtctctaccggcataccggagccttcagccatcatcgccgttcggggtcgcgcggaacggccggcccggattgctgccccgcctgcggaacggactacacgcagcgtaagaaggaacgcttctccccgatccggagcttccgcaccggcttcgcgaagacgtcccagctcctggcgagcgaactcttcgatctgctccacgcgagcggcgtcgcggccaaggcgattgtcttctcggacagccgtcaagaggctgcgaaggccgcgctgcagattgagaggcgccaccaccaggatctcaggcgccgcctcctgatcgagatgctccgacggcagcgcgacgccgtcgacgtctcggccgaacgcaggcgcatccaggaagcgatgcaactcgccgtcgcggagggacggttcgacgatgtcggtcctctgaccgtccgcctccaggctctgccgacgaacacggatccccgccgcattccgctccggagcgtcgtcgagcgcgcgatcgcagacgcgggagccgaccgtcgcacgaaccctatgctggccgagatgatccgtctcggcgtccacccgaccgacgaggtgggcatctcggacatcgaagggttcgattggcagcggctcttcgagcagtccgacggagcttggtcgtggcgcaccagcggtgcgcaggctgccgaactccagacggcacgcgaccgcgtgtaccagaagcagatcccgcacatcgacgaggtgctcttcgcgaagacctacttcgccctggaggagaccgggctcggctatccgaccctgttcgccgaagcggagccggacgcggaccggctggacgcctatctgcgcgtgttctcggacgcgtaccgggtgagttcgaacaagtgggtgctcgcaggcgatccgacgctctggccgtccgccgaccaggtgccgcagacgaatcgagtccggcgtttcgcggcggctacgaatcctacggatcccgtaggcgagctggcgagggttctggaggccttccgggcgaggaaccatccgaacggcatcgtcgacgcggcgccgctgcatgtacggctctccgaccgaggcgacccgtactaccgctgcgaaaactgcgaccgggttcatctccatcgggggaccggcgtctgcacccggtgccggagcgcccttccgacggaacggacgggcgtcgtggaggagctctggaaccgccacttcctggcacgtcagatcgaccgcgggctcgccgaggggacgggttcgttccgcctgcgctgcgaggagctcaccggtcagaccgacgagccggccgagcgtctccgccgtttcaagggcatcttcattcacgacgcggccagccccacgcccgaactcgaccgggctgcggccgaaatcgacctcctgtcggtgacaacgaccatggaggtggggatcgacatcggcccgctgcaggccgtgtatcaggcgaacatgccgccccaacgcttcaactaccagcagcgtgtcggacgcgccggccgacgcggccagtcgttctcgctcgtggcgacgctgtgccggagccgtagccacgacctgcactacttccgtcatccggagtcgatgaccggcgatcggcccccgccgccgttcctggcgaccgaccatctcgacatcccgcagcgcctgctccggaaggtctggctgtcggcggcattttccgtcctgagagacgaggacggtccgcggtacctcggcgacgacgctccgcccgacgtgcacggcgagtacatacccgcaaccgcatactacgccgacgggagcacctggcccgaccgcctgcgcggagcgttgcgacagaccattgatcgccgggatggattcgcggcggtgctcgccgcgggtcgcgaggggcgcagggacgcgctcctggccgcgatggatcccgacgtcctcgtagcacgcatcacagccctgacggaggccgggcgcgtctacggcggtggcttcgcgcagtttctcgcggaatacggtctgctgccgatgtacgggatgcccacacgtgtccgggcgctctacatcgggcctaaggcagtcaatgccggcgaggccgagtgggacacggtcgaccgcgatctggacgtcgcgatctacgagttcgcccccgggcaggaactcgtccgcgacaagcggcggcaccagtcgatcggcttcaccgcgcccattcagaacccccgacagctgcccggtacgcagttcttcccgcctctggtaccttccgaccgctggtggtccgagcgtcactacctcgcgcagtgcgggacgtgcggcggcacgacgtcgagacccgatctgccgctcacggacgtggtctgcgaggactgctcgacggaactggacgcgaacgcattccgcgagttcgtggtgccggccggcttccgcacgagcttcaggccgcttcccgtcgacgaggattcccgcgtcgaatcggtcgggcgcacggtcaccgcggcgatccaccgcctggaggtcgagccggtcgccggcacgaacatggccgtccatgcgggaacgggagcgaccgtactccgcctcaacgagggtccgcgcgacgccggcggcgggcgtgcgggctacgacgtgcggcacgtgacccagcggcggctcggactgcccacgggcgccggccacttcactgtcttggagaaccagttcgtcgccacggacgtcgtcgacgaggctccgacgcgctggcagccgggagccatcggggtcgaagccggacgccggctcctgtcgcggaagcagaccgaggcgatctacatcggcctaagaacgataccggccggtcttgggctggaccggatcggacgtcagacgtggcagacgagcgtccgtgcagctgcaatcagcgccactcagctgatcgttcaacgtgcggctctggagctcgacgtggcgccggaggagttcgaggcgctcgaaccgcgtctgcgcgagggccttccgcttcttcagatcgccgacttcctcgtcaatggatccggcttctgccgtcggctcggagagagcgaggcggacggacggaggatcgtggtccggctgatcgcttcgatgctggacgagcccgccgatccgctcgtcggttcgtacttcgcggaagatcacagggccgattgcgcacgggcctgctaccgatgtctccagcgctacggcaaccgatcctaccacggtctgctcgactggcggctcgggctcggtttcctccgcgcgttcgtcgacccggactaccgctccggcctggatggcgactggacacggcacagggaactcgcggactggcctcgcatcgccgccaccgtcgccgaggaactggctcgtcagaactccacggaacgtacgacgacgactctggggcgtgcggggctgccggccctgcgggtccggcgggccgggaacgtcgagcattacctcgtcgtccatccgttctggcgcaccgacggtccggcacgtgcggccgagcccctggcgagcgcgatcgcgcaagccggaggcccagtctacttcgtcgacgccttcgacgccgcccgcaggccggtgaaagccctggagaacgcgcgctcaaggccacgcgacgtctga

SEQ ID NO: 27855 - DNA, 1023 bp, Methylobacterium oryzae CBMB20
atggaggccgaagggctcgaagtactcgtcgggtacgacctcgatccggcctgccggtacccctacgaggcgaacaacttcgcccgattcgaactcgccgacgtcagagcactgaaggcgtcggatctggaagaggcttggcgcgggtgcgacgttcgggtcctggcaggctgcgcgccctgccaaccgttctcccgctacaaccggcggaatgcgccgcgcgacgaacgctggatcctgctcgaagccttcgggagactggtcgacgagacccgacccgagatcgtgacgatggagaacgtgcccgaactcgtgaggcacgaggtacacggccgatttctggataccttgagggatgccggctacctggtctccgagcacatcgtggagtgcacggactacggcattccccaacagcgtcggcggctcatcgtgttggcctccaggctcggaccgatcgagctcgtcgatccgggctgcttcggttcctcgcccgcgacggtgcgcgacacgatttcgccgatgcccgtgctgaaggcgggacaggccgacaggtgcgatccgctccaccgctccagcgctctgacgggaatcaatcacgatcggatccgcgcctccaggcccggaggatcgtggaaggattggaagtcggaactcgtcgctccctgccacacgcggcgcgaagggcgcggctaccgctcggtctacgggcggatggagtgggaccgtcccgcaccgacgatcacgacgcaggcctacgccttcgggagtggccgcttcggtcatcccgagcaggaccgggcactctcgctgcgcgaggcggcgctcctccagacctttccgcgcgagtacgccttcgttccgagaggtcggccgatcgagatgcgcacgatcgggcgactgataggcaatgccgttcccccgaagctcggacgggtcgtcgggcggagcatctccagacacttggcattccggaatcaccggatcccgacggaacagagacccgagcaggccggaccgtga

SEQ ID NO: 27856 - DNA, 2778 bp, Methylobacterium oryzae CBMB20
gtgtcgcgccggagcaacgtcgcaccgccgactcgtctcgcggcaacccgcaatctcacttcttcggtagacgacagatgcgcaacttgtagtatcgctctggaggagtgcccgaacaaacgggtacggcgggggaacgtggcgagaggggctcttccgagcaatggtcgcgagtgggaactcgcgctcgtgcggcactatctccgatgcgacgggccattcggggcgtcgccgctcgcgttcgtggatgccacgggcgaggagctcgcacgcgccgtcggagccgatgccgcccacgtggaggacgttcgaagcgcctttctcgggtccttcggaagcccttccctgctgcgcgacgtcctgagcggggcttccaggccgacctattctggcgtcgaagctcccggctggttcagatatctcttcctcagttgcctcgtcgccgccgcagagacgggaggctgcaacgccggagtctaccgggagcgtctgaggacgcttttgggggcagaggcgaccatctccgatctgcggggactgccactcctctggggacggctcgccgaatggtgcgacgcgcgacgtctcgaaggagaaccgttccggcgcgtcgtcctacccgatcgcgggcacatgacgcagatcggcgagtccgtgcggatcgccttcccgtcgcgactggatcgtcttcgcctcgaacaactcgcggcagattggaatgcggccgagttcacgtcgcctacctgcgtcatcaaattcgtcaggaaccgtctcgacgggctgccgtggtccgaaggcttcgtcgccgccttcctcgacttcgggatgcgctaccgtcgcggagagagactcctggcggatcacccgttctgggttctgatccgacggacgctggcgtcgatcggtgaaggcgacgagcgttccgcggcgggtatttccattcgattgatcgccggcctcgacgacgaaaccctcgtggagctctcggccagaactcagatcccaggtctcggtctgaggccggatgcagaagcgggcttctcatgcacggtttccaccgaggcgatgatcgaagcggtcggagcggcagcgcgcctcggcgggttcgggcgtcttcgtggcgtcgtcgcggcactcgacaggggcgtgatgccgttcgtcgagacttcctggggcgtctgggcgttcttggcatctccggactcgggccccgtccgcattctgggccgccatggcgccgtccggtcgagcggtaatccgggcatatggcaggcggccgcggatggatggtggctgtcctctcagatccccatcggagtgtacgaggagatcctcggcaggatcggcaagccgctggagccgtccgatcgtctccgctctctgcgcatcgaaggcggcatcagaactggtgcctgcttcctggggcgtccgaccttcctgcccgtggtcgcggcaccggacggcgcgacgctgaccctgcaggcgtcgagagtcgaacggggtgaactcggcctcgctgcagaggctcggggaccagtgcccctcgtcgccgaagcaccggtcgccggcgcatggcgcctgaccgctcgggagatcgaagggagcggtactgagaacgagttgcggctctcgttcgtggaccgagccttcgaacacaatgtcggagccggttcggcggaaggatgggaaaacgaggtcgaactcgtcctcttgccgggaattctcgggtctcggacgaccgatgttccgcccgcggcaccctcggaagatgaaacctgccgcgacgatctgctcgaagcagtctacgccggaggcgtcggcggctggtccgaggccgacctcttccctctgctccgacgcgcagtgggcgggggcgggggcggaccacgtccgtgggatgtcctgagagctctccgcgagggcggatgggtcgagccgcgtctcgacccccgctggggagccagacgttggatcctgcgtccgatgcggctcctgcgtcgcgacgaccggacggcggttctcgacggggcttggtgcgcgaccggtctcgaccgcttcgaggccgcctgtcgccgagcaggtgccgcggcggaggtccgtcccggtcggggaccgtggtcggtgccgaccatggtcgtccggagcgccgatctcgttgccgtcgccgcggcgaccggagtgccgatcgtcgacttaccccgcatcggagcggcaccggcccccgcctgctggccctcgacgatccatcctctcgcagcccggatggtcgcgggaatctggtgctgggagcgcgggcgctttctggcggcagccggtggtgcgacgggaagcgtgcgtctggagcgttgggtccgcccgcggcgcgacgcgcgcgatgtctaccgcatttccggaagtgccagtggcgatctcgtcctcgaaagccggacggcggcgatcctggaggcgcatcggcgcgccggcattcctctgctgcatcacgccgagaacgaactggtccggctgcgggcggagggaaacctgccggcggagatcgtcggcgctctccgcttcgcacatctggcttcttcgggaccgatccgacgcgaaaccggcgagtggacctacgcctatccctgcagccgagacgacgcccgagagctcgtcgccatcttcggcgcggccgtcgcaggttcggcacccgctccggatcacgctcggtaccgactgagccgcaagctcggtccgcgcggcagggccctcctgaatcccgccgccgctctccgtccggtgctctga

SEQ ID NO: 27857 - DNA, 2055 bp, Methylobacterium oryzae CBMB20
atgctcgccaaacgaaccgataatcgaacgttccatctcggtcggtgcatgttccggaacgagcggttcacgcgtctggaaccactgctgtcgaacgccggcgacggttgggtcgccgtgacggaccgcaggcggacctttccggacgcgggatccgttttcaccctcgatcggcccgccgtcggatcgtcggaaggttcgctctggctcttccgatgcgagcccaacggccgcggcggcgaggaccgtttcgtcgccgtcgacttgcacgagccgaaggagatcttggatttcggtttcgcggacgcggaaactgcccgacgcgccgtcgtggagcgggggttggacctgccacatactccgacgcgcgaagtcgtcgtggtgttcgctgtggatcgggcggttcgactcgaactggcgcgcagcgagatcgacggactctggaggccggccgccgacgtggcgctggagactctggaggtccatcggttcgatcccgcgcgccacagaggtgctcggatcgggcgccgggccttcctgctgcccgcggcggagttcgaggcgccctccggtaccatcgactggtctctcgacctcgtcttcctgccgaaggtgctgcgcagaatccgccggacgattccgctccagtcgggcggagaattggcgactatctcgctcaggacgatcgaacgtctggtcacggcgttgcgcgacggagagatgctggccggcgatccgcactccaacgaagccatgctcgcccggcttcgagacgcgacgccggtgctctccgcgagtctgaccgccgcgaccgagctcggcgacacgctgctccagctacccgcggtgcagacccgtttgcaggaggagatcgcggctcttcacgcgcgaaccgtagccgatctgcgacgggagctgcagccgatggtccgtgcggagatcgaagtggaagaggcggcggctcgtgcggtgcttcgtgacttggaggagcaggttgccgccgccgcggcgcgcagggacgagagccgacgcgagctcgccgaactctcgcgggagcgggaggagcaccgcaccgggctcgccggcgacgtcgaggcgcttctgacgaccgtcgcgcggacggcggatgcattccgccagacgacggacgtggcggtcaggttcggcatcgcagatgcggctgccgaagcggcagccccgtggtcggtgccggccatggagacgggcgaggatctggaggctacgaaccttgccgccgcgctgacggctcgggaacgctccgcgggctttcggcagggggctctcgtcgagctggatgcggtcgcacgttccggtggcattccggtcctgttcggcgaggaggcggagcgtttcatagaggcgtatgccgcatgcgtctccggcgggctcgcccgacgcatggcactcgacccggcgacgctgggcctcgacgatctgtggcggcagtccgtcggaggcggtccgaccgttctggcccgggcgtggtcgtcggccgtccggaatccgcagcgcgtcgaactcgtggtcctcgacgatctcgacgctgcgctggaatgcctgtggctgccccgcctcgtcgcccggctctcctctccgcatcgaccgtcgaacctgctcgttctcgcgaccctgatggagagcggcccggagcgcggcccgtctcttgaggtcctcaggagcgccgtaccgattctcgcgggtgcggaggccggagccgcagctgccgcggtggcgtcgaatccgcctgctccgacccgactcgtcttcgtcgcgccgcctccggtggatccggcctcgctgcagaggttggcggttgatctcgtgcaatcgccgggaatcgatcccgccaccgccgtacgggccgctgcgctcctgcggtccgccctcccgacgatgggcgcggacgcggccttcgccttcgcacgcgacgccgcaatccagattcgggcgcggacgcacgccgatccgggcggatcggcgctggagcgcagcttcgcccgcctcgcccgacgcaattcctccccacggacctga

SEQ ID NO: 27858 - DNA, 5892 bp, Methylobacterium sp. AMS5
atgctggatcccgtcggcggcttcgcccgcatgcacgacttcttcgtgtcctacgtggacacctccttccgcatcgccgaccctgcggtggcgcgggaaaggcgcgagctcctgctgaccccggacgtgctagccacggaaccgctcgtcgagccggtcctccgctacgcggccaacgaacgcacgcttgagcaactcctcgggaccgagatcctcgcgcccctgagcccggaagggcagcgcgcattcgtcgagctcgccctgagcgggctgttcgacggggcagaggccgaaggcgcgctcaagcggaaatcgccgtacccgccctacacccaccaggtgcggatgctggagcgcggcatccgccccggccatccaagcatcgtcacgtcgggaactgggtccgggaagaccgagagcttcatgctcccgatcctcgcgagtctggcctccgaggcagtgaaatggtcgagtccggaggacggctatctcgggaacacgtggtggcggaagggccagaggttcaacaggcgcaagtcgcagcggaccggagaggccgccgaccggcctgcggccgtccgcgccctgatcctctatccgatgaacgccctcgtcgccgaccagatggtccggctgaggaaagcgctcgattccgacgccgcgcgcgccgtcatggacgagcgtttcgatgggaacaggatcttcttcggcaactacacgggcgacacccccgtgaccgggcacgagacccatccccgcctggccgacgacgaggtggagaggaacaggcgcacgcggcgcggcgcgaagctgcggctggccatgtcgcggatggaggaggaccaaagggacgcccgggcccacgacgcgcggacgcggtccaagtcagggggcaaatccttcgaggagaccaagtacatcttcccgtcgctggacggcggcgagatggtgtcgcgctgggacatgcaggcatgcccgcctgacatcctggtcacgaacgcctccatgctcggcgcgatgctgtcccgggaggtcgaggacgccgtcttcgacaagacgagggcctggatcgagggcgacgaaaacgcgtacttctaccttgtcttcgacgagctccacctggtgcggggctcggcgggcaccgaagtcgccttcctcgtcaagtcgctcctcacccggctcgggctcgacgacccgaggcaccggcacaagctccgcatcctggcgtcgagcgcgtcactgccgatggaggaccacgccggcgagcagagccgccggtacctgcgggacctattcgccccgttcggcacctatgcggggccgggggccgagggccgcacggacgcggcgttctggagcacgtgcgtcgtgcccggcgaccccgagaaggtcgacgcgccggccgggaaggtcgaccccgcccctttcagggccctcctcgcgaccgcagccgaagacagccgcctggtcgcctcctacggcgagaccgacgcgaacgcgtccgcggtgcgggcgctcgccgaaagcctcggcctgccgtcggcggcaacggcggaagccgccggcgccgtgtccgcccgggccgccgcgctgctcgtgaggggttgctcggggacggggcaagcccgagcgacgccgctctccgacatcggcaaggaggtgttcggcgcggcggaccgcgaggcggtgcgcggcctgatgctagcgcgcgccctgccggacggcggcgcctggggcgcgaaggcgccgacgggcacgccgtccttccgggtgcacaccttcatccgcaacgtcgaagggctgttcggggcgcccgtggcctcggatgatggcaagacgcggttcaccgacctgaccatcgtgcggggcgtcacgcacggtcctcccggggcaggtggcgcacagggtcggcgcctcttcgagatgctctactgcgaggcttgcggcgacctcttcctcggggggcagcgcgggcaggccacggcggacgagcggcagttcgagctgctgccgacctcgtccgacctagaaagcgcgcccgaccgcggggcccccgagctctacgaccgcatgaccttcgaccagttcgcggtgttctggccctcgacggcccgaccggtcctgccggagggtggatgggacgagtggcaaaccgcgacgctcgacgccgtgaccggggtcctgtcggcctacgaggccgaggagcgcccgggcctggtccgcggccacgtctacttccaggccgatgcggcggccgggccgggcgggcgcaagactgcgcagccgttctcctgcccccgctgcggcaccgactactcgaacaggccctcgaccatccgcacccgctcgccggtccgcgcgttccggaccggcttcgtgcaggcttcgcagctcgtttcgaccgaactcttcgagttcctgcacgccatcaggaccgaggacggcgcagagcccaagagcatcatcttctcggacagccggcaggacgcggcgaaccaagcgcttgagatcgagcgcctgcacctgcgcgacctgcgccgcgaggttttcgtcgactcagccctccgcatgatcgaggccgccggtaagtcctacgtgagcgaggaggagaaggagaggatcgaggaggagatgatcgtctccggccggcggaaggagctccgcaagctctatgccgagtgggataaggccgagagcgatagcggcgtgaacctcgcgacgaggaaggtgcgcgtcgaccgcctgctgcagtaccgggatgacgaggacggcagcggcggcaacatttcctacgtgatgtccgagctggtgcgcctcggcatccatcccttcgacgaggtcgggcgcaagaccttcaaggggcagccctggtacaaggcgttcagcctccgcggcgggaaggccgacttcgcctcgaacctcacgaccatcgagaagcgggaactcggcaccgccgtcctcaaggcccagtccgaactcgtcgacgacgtgatcttctcgaacacgttcttcgcactggaggagacgggcctgggctatccctcggtctcggccgcggacggggaggaggtggaccgcctggatgcctggctccgtgtcttcgcgggtgcctaccgggtcgaggagaaccaatatttctcctgggagcggaacaaggagtggcatcggctggagaacgtcccccagcggaacaaggtcagccgctacgcccgggccgtgttcggggaggacgcgcccgctcggttctcgcaggtccttgtggacctcgaacgcgagggacacggcggcggagtgatccgggtcggcaagctgttcctgcgcatgtcggacgccggcgaccgctactggcgctgcgggtcctgcgagcgggtccacctcaggctgggctacggcgtctgcacccgctgcaggaaggagctgccgcgcgaggcgtccggcaccgtggaggagttgtggaacgcgaatttcctcgggcggcgcatcgtccgcggcagggaggagaacgtccgccgcttcgggatcaagtgcgaggagctaaccggccagaccgacgacttctcggaacgcctgcgccggttcaaggggatcttcgtgggagccgagggcgaggagccggacgcgctgctgaaggcggacaaggagatcgacctcctctccgtcaccacgaccatggaggtcggcatcgacatcggctcgctgcagaccgtgctgcaagccaacatgccgccgcagcgcttcaactaccagcaacgggtcgggcgcgccggtcgccgcgggcaggcgttctcgttcgtgacgaccttctgccgggggcggagccacgacgagtattacttccggcacccgcgcgcgatcacgggcgacgctccgccgccgccgttcctggccgccgaccacctccccatcccgcggcgcctgctccggaaggtctggttgagggccgcgttcgcacgcctgcgcgacgcgtgtgccagcgccggccagccctacccgggcgacggcctcgtcccgccggacatccacggcgaattcgtgccgaccgatgcgttctacgcggaggattcgccctggcccgagcggctccgcggggcgctcgccgcgaccgaggcttccatgaggcgtttcgtcgaggcgtccgtcctgtccggggagcaccgctccgaacttctcggctgggcggtcccggacaccctggtaggcgagatcctggagttgcgggacgcgcggcccgccgggcgcgccggcctcgcccagttcctagccgaacgcgggctgctgccgatgtacggcatgccgacccgggtgaggcagctctacaccggccttgtcgagaccggcacgaagaccaacggccaggacgattgggactggtcgacgatggaccgcgacgtcgagcttgcggtcttcgagtacgccccgggcgccctgctgacgaaggacaagctcaagcacagggtcatcggcttcacgggcacccttccggagcccgagcgcgagaacgccaaccgcatcgacgtcaaggcgccgttgaacccctgggtcagcgaccgagcctacgtcgcccgctgcgcctcctgcggctccgcggcctacaggccgcagcggccggacgaacgcgtagcctgcgacgactgccgtgcggacgtccacccggacgagttcgcctggtacgtgacgcctgcggccttccggaccgacttcaggccggaggcaaacaagccggacgacgtcggcatcatgtcgacccgcaccgtggcaacggtcctgcgccacggcgaaggccacgactgcggcaacgtgaaggtctggagcggggccggcgtcacggtcatgcacctgaacgacggcgcggcgggcgaggacggcgagccgacccggttcgcggtgcaggagatgagcgacacttgggtcctcaagggacagcccgcgctgcgcgccacgaacctcgtttgccaggcggtcgacacggagcttgctagcgaggaggagcgggggcggtggcgcgacggggttccggtcgaggaaaccttcggcctggtcgcgcgcaaggagaccgacgcgctctacctggagctcctctcgttcgacaggcggctcaacctcgacatggtcgccaagcaggggcgcatgtcgagcacggcggcacgcgccgccgccgtgagcgccacgcacatcctcgtccagaaggccgcgctcgcgctcgacgtctcgcccgacgagttcgagcccctggagccgcgcctgcggggcacgcagcccctcatccaggtcgccgacgccctgatcaacggctcgggcctgtgccgccggctcggcgagccacgggcggacggcaggcccgagatcctccacatgatcggcgagatcctgggggctgcggaggcgtggccgatgaacgtcctcctggagccgacgcacaggtcgaactgccacacgtcctgctaccgctgcgtccagcagtacgggaaccggcgggcccacagcctcctcgattggcgcatgggcatcgcgtacctgagggccttggtgacgaccggctacgcctgcggcgcagacgggaacttcgacgagccggagctctcggactggctcgggcgtgcccggaacctggccgcgtcggtcgccgcgatgcgtccgggctccctccgcgtcgagcccgccggccgcatcgggctgccgtgcatcgtcgagggcgccggggaggcggccgcgaggctcgtcgtcgtccatcccttgtggcggacggaccccggggcggttgggaggctgctcggagccgaggcccggccgacggaccggtgcgtgaacaccttcgaactcgaacgccgtccgttgaaggcgctcgaactcgccaaggtgagggagcccgctccaagcttcaacgaggcgtaa

SEQ ID NO: 27859 - DNA, 948 bp, Methylobacterium sp. AMS5
atgcctaaggcggtttctctgttcactggttgcggcggtagcgacgcgggcctgttggccgccggcttcgacgttgtcatggcgaatgacgtcatgggctatgcccgcgacgtctacctcgcgaacatgcccgcgacggattacgtgctgggcagcatcacggacgtccgcaagttcccgaaggtggacctgctcgccggctgctacccgtgccaaggcttcagcgtcggcggcgtccgcgaggccgaccggaagatcaactatctctaccgggagttcgaccgggccctgcgggacatcaagcctaaggcattcatcgtcgagaacgtctcggggatgcggaactccaacaaccagcacctggccgtcaaccagctcacgcgtttccggatggccgggtacagggtcgcatggtcggttctcgacgcgcgtgcctacggcgttgcccaggaacgcactaggatgttcttcgtcggtatccgctcggaccttggcctcaggtacgagttccccgagccgacgcacagccttccgggcgaggatgtgcccggactgccgccctgcccgactatacgggaccggatcggggatttgcctctctggccggacggcgagtacgacgaccagcccttccactggtactacctgtccagggaccgctggcgcgactgggagcaggtgagccggaccatcgtggccaacagcaggcacacgcccctccacccggtgagcccccgcctcaagcgcatcggcacagacgaatggcgtttcgtagaggacggcccggcccggcgcctatcctaccgtgaggccgcgcgcctgcaggggttcgctgacatgacgttcccggaaactggaggcacgcgcctccgttaccgcgtcatcggcaacgcagtgccgccgccgctcttcaaggccgtggcatcggctatcccggacatctggtga

SEQ ID NO: 27860 - DNA, 2556 bp, Methylobacterium sp. AMS5
atggagtgggagcgcgctctcacccatcatttcctcatggtcgggtccggcggggatgcctcgccgatccgctctttcgaggtctccgacggtaccatcgccgaggcggccggcctcagcggccccgatgcccgcgagctggcgatggcatcgttcacgcgccacgtggttcaggccggcgggctgccgaacgccctccgccagggcctgcacccgaacatggacgcacaggggttgccggggtgcttcgcctacctcgtcctgaccctctacgtggcgagcctgcgcggcaacggcgaggagcgcaacggcgacttccggcataagctgcgccggttcttgggcagcgaacgctcgttcatgaacatgccgggcgtggccgggatgtgggccagcctccagcggtggctggcacggcgccggttgattgacgcgcgcttccgggagctcgtgttccccgaggtgcccgtgaagtggtcgcacatcggcatcagcttgaaatttgcgttccccacgaagacggacgcgacgctcatggcgtcgttcctccacgacaagccagccgccgccggcgagccgcgcaggctgctcgcggagttcgcgccggtgatcgaccgcgggcgccgctcggccggcatggcggatgcgttcgaggatttcaaggatgccttcgccgcgggcgaacgtctcctggaagaccaccgcttctggcgcttggtccgatcatgttccactggggggcgggccgaggcgtcatcacctgcctttgtctcctgcgggttcgacgaggaggcccagcccgtcttctctgccgcacttgaggacgggacgaagctctcgcccgggccgcggacgctttcagaggccgtctccgacctgacggcggccggcggcccggcagcgttctcgccggcttaccttgtcttccggcagaccggcttcgggcggtggaaatcgacggagggtttcgagcgcgccgggccgcgcgtccggttgggactgccgcgcgctgcgcaccggcggctgcagaggggtagtcagcggttcgtcgagagcggcgactggctgttcaccgccgagccggtccgggtagccctggccgaggagatggtggcttctttcacggcagccccgtcctcggagaggctggctgccatctcggtctctggcggggtccgcaccggcggcctctggctcggccggccggccttcatgccgtacgtcgatgcgggtgggtcggagctgctggtgcgagcgggcccgggcgccgccggcaccgtgagcctggattgccagggccgcgaccccgaacgcctgcaggccgacggaccggtcagcggcacctggttcctggagccgccgggcggccggcagcggtcctgccgccaagtcgccttcgcgccgaacgcgcagctgcaccgggatgccttggccggcgacgaagccggcgagatcctcctcgactgggccgggggctcggcgcaagcacgcttccccgggcaactcccggccgaagcgggctggagtcaagcgcaaggcgctatgtcggacctcgtcgaggcggtctatgccggcgggcggcgcgggtgggacgagggggacttggtcgccatcgtgggcgaggctttcggcgaagccgcggatccctgggccatgctgcgcgtgctcagggatgcgaccgtcgtccaaccccgcctcaggcaccgttggcgtggaagggcctggacgctccagcccccagccctcatgccgtggggaaacggagcggttgtgcagggcgccgtctgcgaggctgaggctgacgtcttccgcaaagccgccgcctcggtcggggctgtccctttccgggtgcaggggccgtccgacctcgcgccgcccctgacgggatgcgtgggcggcgacctgcaggccctcgccgcgcggatgggctggcggatcgagcaggcctccatctgcccggacgaacggccgatcgccttccgggaaaccgaccacacgctgctcgggaaggaaccggcctcgcgctgggattgggaggcggcgaagttcgtggccgacgggcgccgaggcgacggggcagtcagcctgacgcgttggacgcaggccgcaagccgcgaccacgacgtctaccaggttctcgccgagggacgggagcgccgcctccactcccgggatgcagccctcgtcctcgcccattgcctggcgcggcgaccgttgttcacggtcgccggcggctacctggaagcccaggtccgcggcgcgttccttccggacgccatcgcggcccagctgcggctgtcgacgctcgcgaacgcgggcttggccgacgggcggccgaggtaccgcgtaacgcccgaggatgcggcgcgggccgcccgcttgctgcccggggcggtggcgggcgcggcccgcgcagctgtcgggcatgacgccgatcgggtagcctcggtgaggcattcgtccggccggattcgcgccgcctggacgggcggcgcgctgaggaccttgtcggccggcgggccggggtggggaaggtttctcaatgaaggttcgtga

SEQ ID NO: 27861 - DNA, 2148 bp, Methylobacterium sp. AMS5
atgaaggttcgtgaccgggagtacgtcggtcgcagcgggcggggccgcgacgcgagcgcgttggtcacccccgtggcggagcggtctgaggacggggcttggtcggccctggccgacgtcagggcgctgttccccaagcacggtcagatcgaggtgcgcggcatcgtcgccaactcgatcagggagggcgactgggtcgcgttcggctcggtcccgaacgacaggcacgggtcgtccgcgagcttccgcgccgccgccccgcgccggctcacccccttccttgcggccggcggcgaagtctcgccggaagggcgccgccggcttgtcgtggaggcagggctggaggccggcccggcaggcgattggtcagtgcaggtgtcgcccgaggcgttcgtgcgggtgaagctgcagcaaggagaggacgggcgcttccgggcctccggtcctgacctcgcctccttgacgctctggcgcctcaccccggatctcgtgatcgacctcggcgccgagcatgctgcgcccaggctctgcgaccaccagagggcggagcagctgccgggcacggtgaactggtcccgggacgacgagtacatccggatggttgcggctgcgctcggtccggaacggcgcggaccggacatcgccgcgctgctcgcatgggcgctgagccagcataccgacgttctcacgggccgcgtgtcgacccttgtcggcgccgatgcagggacgctggccgaaatcgagcgggccggcacgctgtcctgtcggctcgccggcgaacgcgagctcctgaacctgttcagggccgggctgatgtcagacccgagcctcaaggaactgatcgaccaagccgctgcggacgccgccgaggccacccgcccggccctggagagcgcagttcggaccgagatcgagcgcgagatggccgccgagcgcgccgcggcgcacgaacaggtccgggcgctcatcgcgggcttggaggccgaggagatagcggcgctggaagcccgctgcgccgccgaggccgccaagcgggacgaggatctcgcggaagcgcgccgcaggggcatggaggcggtcgaagccgcaaccgctgagcggctgcgggaagcggaggctgctgccgccgggatggacgcccgttgcgcctcgctggctggcgaggtggaggagctcgaagggcgtaggcagggcctcgccgcctctgtcgcggcgctcgccgacgaggagcggaacaagctcgaaatcgtggagcgcctggtcaaggccggcgagggtgctgccgcgctgcgcaagccggcggcagtgaccgcggtcctggcgccgtggccccccgggagcggaaacgagcgccggctcgggctgcgggaccttgccggcctcgcggaggaagcgggcctgctgtcgcaggcgggcatggaaaccttcctgcgcgtcgcggtcctcgtcgaggccggcgaggtgcccgtcctgcacggaccggataccggcggcttcgtggaggcggccgggcgcctgatggccgccggccgggtggcgaggctctacgcagacccgacgctgatcacgttcgacgacctgtgggcccgggccggttccggtatcccgacgccgctggcggccgccctggcgagcgccgccgagggatgcgcggccctcggcgtcgtggagcgcgccgagcattcgggcgcgcgcttctggtacccgcaacttgccgatgcggcgcggcagggccggcttcccgccgccctcatcccgctcgtcacggtagcggacccgaagtccgaggaggccgccgcggtggcggcggaaggccccatggtggccgtcgagggcatcttcgccgacggcgcggcggcggtcgccccgctggtcttcgcggagctagcggcggcgcccgccgcctttgccaaggggagctgtgagcccgatccgggggaagctgccaagttcctccgcaagcacgcggccggactggaccttccggcggccatgaggctgtcgcgcatccacgccgccgcgtcctccgccgggggcgcggaggacggaccgcgcatggctgcggcgctcaagaccatcctgttcgggccggaggaagccgtcccgcacgccgccgcgcagaagcttcacctcgccgccagagcctga

SEQ ID NO: 27862 - DNA, 5442 bp, Microbacterium sp. MEJ108Y
atgacaagcagcagcgggcatcttgacgcgatccagacgttcgagcacctccgtgacgcctacttccgctactacgacacacccttcggcctcgccgacgaacgtctccaggccgaacgccgcaccctgctggaccgcgacggaggtgtctaccgcaagcctctgctcgaactccggccggaatacgaaagcaccggccgatctctcgccgagtccgtcaccgcggccggcgcggaccccgatctcgcccaattcgctagcaccggcctgctccagggggtcccctcgctctaccggcatcaggaagaggctctcgctgcgggagtccagcaaagacggcacatggtcatcaccgcaggcacggggtcgggtaagaccgaatccttcctcatgcccgtcctctcctcgctgctgagtgagtcccgtagctggacaggacagggcgcaacaccggccgactggtggaccggcggcaacaatccattccgcgcccagcgcgacggggaaacaggccgcgacgccgccgtgcgcgccatcgtcctgtacccgatgaacgcgctcgtcgacgaccagctcatccgcctacgccgcgccctcgacaacgacaacatccgcgcctggctggacgagaaccgcaatgggcaccgcttctacttcggccgttacaccggagccaccccggtcactggcacccgggacaacagcctcgccctcgcagaactgcggcgttacctgcgtgagactgaccggcgcggcatccgtgcacggcacctcgcagctcagaagaccgacgacgaccttcggtacttcgtgccgcgcctcgacggcgcggaaatgcgttcgcgctgggacatgctcgactacccgcccgacgtcctcatcacgaactattccatgctcaatgtgatgctgctgcgagagcgcgacggtcacttcttcgacgccacccgccgatggctcgacaaccccgccaacgtcttcaccctggtcgtcgacgagctccacacctaccgaggaactgcaggcacggaagtcgcatacctgctgcgcaccctcaagcgccgcctcggcctggacacacgacccgaccagttccgtgttctcgcggcctccgcgtctctcgatcccggacgcgacagcgactaccttcacgagttcttcgacgccgacccgggaacattcaccttcgtcgctgggtccgcgatcgcgcctccgccgtaccagatcccgcccgcaatcgacccggccgcgcttgcatcgctggacgccacaactgctaccactgatggcagggccgccggcgccgtcagcgcgctccggggcgtcctctccggcgacggaaccggcggggcgaaaacacttagccaagtcgccgaggagatctttccgggcacgcccgccgacatctccgagcaagcgatcaccaacgttctcgccgggctcgcgcaagacccgaagcccggcgacccgaagttccgggcccacctgttcttccgcaacgtcgtcgggatgtgggcatgctgcgaccccagctgcaccgccgtcaccgaaccgcacgctgaccggaccatcggaaaactttacgcagagcccgcgacccgatgcgaatgcggcgctcgcgtactcgagctgctgtactgccagaactgcggcgacgtcatgctcggcggcttcgctccagaaggggaacttcaagtggccgctgtcaaaaccatgctcctcgccgacgtccccgaactcgctaagctccctgaccaggtcacccttcaacggacggccgacaactacctcgtctactggccgcgccccgaagcagccctgactaacctcgactcaccatcctggaaccgcgacagcaacgccgtcgaatacaccttccgtcagagcaagctcaaccccgcctccggagaactcagcaacctcaccaacggattcaccggttggagcttccacgcccgaatcgcccgaaaccgcgccacaggcgaactacgccgcgcccccgagacagtcagcccctacccgacgcagtgcccgaactgcggtgacgactgggaaatccagtacggccgcaacgggcggctgcctgcggccgatccagcgacgcagcggtctcccatccggcagatgcgcacaggtttcgagaagatcaaccaggtgctcaccaccgagctcgccaacgacctaagcgacgccgagcgcaagctcatcgtcttcaccgacagccgccaggacgccgcgaaactctccgcaggactcagcctccggcactaccaggatttactacgccagctgctctacacgagacttgccacttctgggggcaccgcgcacgatgttgcactcgccgaagcccacgtgcttcagaacgagaaaaccgccgagtccttcgccgccctcgatcgcctcaagcagcgcaatgcggccgctctcgccgaactccgcgaagtctgggacggcaagccggggaccggcccgggcgacgccgaacgactgaagagcaaccttgcagccccgccctctctgcgcgaactcgcttccgaagtatcggcggatctcctcggactcgggatgaaccctggaggtccccatgcccggctccgggaaacctccgacgatcccgccgtgtcgtggtccgaactctacgactgggaggtcagtccgccatcaccaaaaccgggcctgaccgatccgcagaaagcgctgctaaacgatattggcagttccctggaagaggaactgctcgaaggtctgttctccgggggaggcagggacttcgaatccctcggtctcggctggctgaccctcagctcagacaccgcgcccgccgatgcgcccgccgatccagccgccgggcaggcgcgcgccgcgctgcgcatcctcgccgaccagcgcaggttcttcggcctacgccgcaagcgcgacgacccgactccgaaactgcggaaattctgggccgcagtagccacggcagaagccgttggcgccgacagcgtccgcgacgacgccctcaccggagcgggcggtgcggtcgtggaatacctgatcgacccgtccgccgtagtcttgcgaatgagcgacggacgcgcatggatctgcgccaaatgcagccgccagcacctcagcaccggaaacggctactgcaccaaatgcgcgaccccgctgccagcgactgcagcccagaccgatctgagccaggattactactcctggaaagccacacggggcgacggcagattccggctcaacaccgctgaactgaccggccaaaccgaccgcatcgacgcacaatcccgtcaatcacgcttccagaacgtattcctcggatcaggcgagaacgagctcaccgacgctatcgatctcctgtccgtgaccacgacgatggaagcaggcgtcgacatcggcgcgctctcggccgtcgtcctaggcaacatgcccccaacccgattcaactaccagcagcgcgtcggccgcgcggggcgccgcaactcaccggtcgcgatcgccctgaccgtatgccgaggccgcagccacgacgagtactacttcgaacggccagatcgaatcaccaacgaacccacgccgaagccctacctcgtgctcaaccggccagaaatcttcgctcgctcacttcgcagcgaagtcctccgccaggcgtccgccgacttcatagccgtcgccagcggggaagacgccagcgccaacgtgcatggcgcattcgggaagaccgccgactggcaggcaatgctccggccccggctcgaacagtggctccacgaccacccggacgccgtccgggacgccgcgagatccctcgccagcagcaccgcattccacagcaccgccgacgagcaggccgccaaatgcgccagaaccctcatcgacgatatcgactctgccgcgacgaacccgagacacgaggacctcagccagctcctcgcggaacagggcctcctgcccatgttcggattccccacctcagtccgctacctctacctgaaccggcccaagcgctcctacccgtggccgccgtccggggtgatcgatcgcgacctcagcatggccgtgagccagttcgcgccgatgagcgaagtcgtccgtgacggaaccgtttacccggtcgtcggtattactgcgttcagacccgctgggccccgtccgcagccggtaacggagccgctcggcgcggagtcgccgctgtcgatctgccgtgcctgttcctacctcggcgaacagcaggccgtcggccaggtcacgaatacctgcccgcaatgcggggccggaccaagtttctacacgagcgtgccgctgcacgaaccgcttggattccgtggcgggcgcggcaccgatttcgacggcaacttctcctggagtccgcgcgcgatggccgcacgggcaatgaccgacatggacgccctcacccttcaggcgcccggcaacgccctcatcctctccgggccgggctcccggtacgtcatcaacgacaacggcgggcagctcttcaccctccgcgcggcaacccccggcggccccgagtggggcgggtacgtctctacgcgcgccatagacgccggactgcttcatccctccttcgctaccggagaaccgatcagcgtcgccctcggcgccatccagcacaccgacttcctcttcgctggcgccgccgcacctacggatgctgcgtcgggactccgcctgaacctcgtcaccggcgtccggcagccttacggcgctcaggaagcaaccgacagccgtcgcgccggatggtactcgctcgcgttccttctgcgcaccgtcgcgtcggcagcactcgatatccagcccctcgaactcgccgccggtatctattccggaatgaccggcagcgaacccgcaacatacgccttcctggccgacaccctggaaaacggagccggcttcagcacgcacctgggttcatccgcgttcctgcccgaattcctcgatgcagtatccaactatctctctgaactggaggagccgtcgcacgcggacgcctgcacctcatcctgttaccgctgcctgcgcgactacggcaatatggcctaccacgccctgctcgactggcggctcgccagggacctattccggctcctcaagagacaaccgctgagcatcgatacggtggcggaagcagccgccatcgaacggtgggcccgtgcctacaacgcgacgccaatcagcagcagtgtcccggccgcacgatacgacagccccagcgaaggctcgttcgcggtgatcgcccgccatgctttcgaagcatccgaggacaccctcatcgcgccccgcctcgccgaggcaatggccgagatcgagacagccgaagaaggcctggacggagcaatcttcgttgactccttcaccctcgaccgcgacccacgtcgcgtgctcaagctcatctccgattccgagccggcaggcacatga

SEQ ID NO: 27863 - DNA, 996 bp, Microbacterium sp. MEJ108Y
atgacgaaagcgcctgaattgagtgtcctggagatctgcgcgggcgccggagggcagtcgtccggactggagatggccggattcggccactcgctcgcggtcgagatcgaccgcgacgccgccgcgaccctccggctgaaccgtcccgaatgggacgtacacgagggcgacgtccgcgaggtcaacggccgcgactacaaaggcatcgaccttctggccgggggagtgccctgcccgccattttcgatcgccggcaagcagctcggcgccgacgacgagcgtgacctgttcccggaagccatccgactagtgcgtgaagcacgcccgaccgccgtcatgctcgagaacgtcaaaggcctcgcctcagcacggtttaccccataccgccaatccatcctggatgccctcgatgcgatggggtacgacgcggactggcagctcttcaactccagcgagttcggcgttcctcagctgcgaccccggttcatcctcgtcgcgatgaagcgacgtaacttccgcaagttcgaatggccccgcgcacacggcaccccgccaaccgtcggacgagtcctcgagccgctcatggcatcccgaggatgggaaggcgcggcagagtgggccaagcgcgccaacagtattgccccgacaatcgtcggaggctcccgcaagcacggtggtgctgacctagggcccacccgcgcgaagcaggcatggctgcaactcggtgtagacggcaagggaatcgtcgaggaagcacccggcgcagacaccccgatggacttcgtaccacgattgacgaacgagatggctgctcgcgtccagggcttcgccccggagtggaagttctccggccgcaagacctcggtgtaccggcagatcgggaatgcatttcctccgccggtcgcgaacgccatcggcggatcgatcgccgaagcactcggcgcggtagtcgcacgtcgcacgaccaccggcagcacgctccgggcggtcagctaa

SEQ ID NO: 27864 - DNA, 2052 bp, Microbacterium sp. MEJ108Y
atgacagcggagtacgaggaatggcagaggctgctctctgacgcgttcctgctcccgcatgatggtccgaccgtgctgttcctcgacgacagcgaaatcacgcgcctccttcccggggccgaagacgctggccgtcatcttggggaagccgtccgcagccgcgtccgcatcaccgagggccggtcgatgttcagctccatcacggccgcttatcaacaatggcagcggggctcacaaaaagagccgccacccgtcctgccggtcatcgccatcactgtactggccgcaaccaggatgcgctccgactccgaggcgcgatccacgaactactatcttcggctcgcacaagcactcctaccggacgcaacccaacaagagaccgagaccctgcgtaacgatctcagggagggcggtgccttcctcaacgcagtagagatgtggcgtgggctacattcgtggctcgatgcgcaggacgggaccgtcggcgtctcaacgatccgcgatcatccgcacctccagaggatcggctacccgctgtcgcaggcgctcgtgcgacagagcgatcgccttgcgctgacccgcttcttccaagcccttgatttccgtcccggctccgcgccccacgcagaagtgatcctcggcgcactcgacatctggaccgcagcactgcaaaaccgactgagcgatggcttcatgcgcgcactcggcgataccgacatccgcccgctgctcgctgccgttgtagaagcccacgcccgagcgtgggacggtcgggtactgacaagtgacgggaagcagcggattgcaatgcgcctcagcatcgacctcgatgcctggcaggcccgctggctattccccgtgcccctaggcggacccgaaacgctcaccgtgctcgccaccgacagcgggcaggaagtccagctcacggccacccctggcctcgcccactacgccgcccgggaatcccttgcagtgagcccagagctactgctatccggcacgcggttgcgcggcagggaattcacagcagaatttccgccctcagccgtgatcttcctgctccccgatccacaaaccggcacatggtcctccgtccccgggatgcttcccttcgaagaacacctggtcgcgattagcggtgcccacaccggagaattccagcaagtactccgtgaagccgccaccgagggatggcgcctgataccgcagcgcggatctgtactcttgcccggctacgccctcttccgaaacgtccgcttcacagacggacaggctctcgagctcattctgtcgcgactgcccggccttcgccgcatcggagtgactcccgcagccattccccgcgcccggctagtccgcgggcttcccctcgccaccagcatctccgcaacccactatctcgtcggcggagaaccggacctcctgcttccctccggacccgatccgcgccccgcaaccgtgacactcgacggccgacgggagcatctccaagcgaacggcttcccgctggaactacgccgcttcgtcagcggcacgggacggcacctcgtggacgccgacgggcaagcactcgccttcacgaccctcgaagaaggtccagatcccgcccagccaagcggtaccgcgaccctcggctggaccagcggcgcgcgcatgagcggatctggccaagcgctcgctgtagtcggcgccctcgtcaccgataccacggacatgatcccggtactcgcccgacgcagtcgagacgaatcctggctcctgcatcatgacggacgcaccgaacgcataaccgaaccggttccgcccagcttcctctccagcatcgatatcgacattcactctccctctttcgagatcagtgcgcccgcgaccgctcgctggctcgcccagcggcgcggcgcccgctggcacctcacggagatcggccccgcagatccgagcgaacacacgctcgccatagacatcctcgacgcctggaagcgagcatgcagcgacacgaacggcgcgcagctctggaaagtgcagctcagcatgtctgcaggctcggcatga

SEQ ID NO: 27865 - DNA, 5439 bp, Micromonospora sp. M42
atgactgatcgcaccttgtccgccagtaacaaccgatcgtcgacgttccccgtgcctacccaggtttacggtgagctccgggacgcctaccttaggtacttcgatacggcattctggttgcgggacgaaccgctccggcgggagcgacgacaactactgcaagaacccggcctcatcttcaccgacatcctgctcgagccggtcgtcccatacgatgcggactacccgctgaagcaggcggcagaggcagcaggtctcgatcctgctgcggctcgcattgtcggcgaggctttgttcggcgatttcgttgcccctggcgaagagatatttctgcggtcccaccaggccgaggcgctcatccactcgcttcgccctggcgaaggacggcggaatgttgtcgtcacgtccggcacaggttccggtaagactgagtccttcctgctcccggtactcgcccggctcgttcgcgaggcacttacctggcgcagtcagcctgcacccgaccgctggtggcaggcaccggacaacgcgctgcagtggcggccgctacgcgacctcgagaaccgccctgccgccctacggacagttgtcctttatccgacgaatgcactcgtcgaggaccagatcggccgacttcgccgggctctgcggcgaatcgccgcgacagggcaagtcccacagctgtggttcggtcggtacacgggtgccaccctcgggtccggcaaccggccgggttccggagacgggtcgaaagtccgtgaagcggcggccgagattaggagcgccgagcaggactatcaggcactcgtgcgtgcctatcaggatgacacggatcgacgtgcggtcgagcacatgttgtctcagttctccgaccccgctcttggtgagatggtcacgaggtgggacatggtcgcctcgccacccgacctcatggtgaccaactactccatgctcaacgcaatgctgatgagggacatcgagcaggagctctttcagaagacggcagactggctcgctgccgaccggcagaacaactttttcaccattgtgatcgacgagatgcacctgtatcgggggacacagggcagcgaggttgcgatggtcgttcgcaatctgctttcccgcatcggtctcgacgcagactcgccgcaactgcggtgcctcgccactagcgcgtcgctgagcgacgacgagaagggcggcgagtatctggagcagttcttcggcgtgcctcgctcgagtttccaggtcacggccggggtgccgcgaccagtgccaaaccgcgagccgctgtcacgcatagaattcgaggaaatcgcgcgaacccttcctgaagaaccgacggtccgttctgcggccctggccgctattgcggacaagcaccgcctttcggaggcgatagccgctgcctgtcgagagaagccgaaccagccgctgcgagccacacgtctctctgtcatcgaggggcgactgttcgataagactgtggacgccggcgccgcgatggacgtcgtactgtcggcggtcgccgaagcgggaagcggcccggccagcatcccgctgcgcgcccatatgtttgtccgcaccgcgagcggactctgggcctgcgcgaacccgaactgcagccaggtttcgtccgagcacgtctacgctgggcgcgcgatcggcaaactattcagccgcccggctaccacctgcccatgtggcggtcgggttctggaggtactgtattgcttcgactgtggcgaggttagcctaggcggctacatcatcgaacggcatacggccagcaacccaccggagctggtcatcggcgctaatcccatcgagattccgtcaccgcagacccgtccggtcaacatgcgacccctcaaccagtacatatggtattggccgggacaatccgccacgggcgcctggcagcacaagacgccgcagggccggagcgcgaccttcagcttccggcccgtggagctggatcccacatccggccgcatcatcgagacgatgacaagcgcgaccggattcaccctggccgtctccggtctcggctcgagcgcaacggcgaaaccaccagcgcttccagaacgttgcccgcggtgcgatgccaagaactataacggggacctgcggcgattttggcgcgggattgtgcggtcgccaatccgtggccaccgatccggtcagtcgcaggcgatccagttgtacctctcgcagttatttcggagcatgggctccactgcggctgagtctcgcacgattctcttcaccgatagccgcgatgatgccgcccgcaccgcctctgcggtggcccggaaccatcatcgggacctggtgcgtcagctcatccggcacgagctagaggagcgccagccagatccagtcgatctggtgttcaagtcggtaaaggagccgctcgccccggatgagctccctcccctgatgacgttccagcagcagcatccggatgtctacggcgcggccattcgggcggctgctggcgcggcgtcgccgagtgatcacgcactcatcgccgaataccgtcaggcgagcgatcccacggcgcggatcccctggacgcaagcagccattcggctggaaacgaggatgctcgctcgcggggtccacccggctggacccgcgcgatctgtgcgggagtggcagggcgagccgtggtatcgaatcttcgatcctcctgagccggagctgtggagcccgcttgccccgcatacacgcatggcgggcatccagctctaccggcaaatgctggcaactgccatggcggaggcggtgttcgaccgggctcaccgcgacctagagtccaccgggctggtgatggtcgagccgcgggctccgcagctctctggcagcggccttgacgccgaactcagcctgcagattctgcgctcggtcattcggatcatgggcatccaagggcggtacgcaggcggtcgctggttcagcccgcagaccgacatgccgcgacctgtccgggcctacgtccacgccgtcgcggacaaactaggcgtcgacagaagcggactcgaggtttgggtgacgcgcgagatccgtgaccgaatcgccccggactggggacttcgggtcagcagtgccgacgcgcccttcgtgctggtgaagggtggtgacgcagtctgggtctgcccgagatgtaactatcggcacctgcatgcgtctgcaggcgtctgcgcggcacgcggctgccaccatgtcggactcgagcagcgccacggagatcaaatcgagcaggattactatgcctggctcgccgacctgtctccgcgacgtatggcggtcgcggagctgaccggccagacaaagccgctgacgttgcagcgaaagcgccagcgctggttcaaggaggcactgctcaagccgccgaccgagaaccacctgaccacgccgctggacgtccttagcgtgacaaccaccatggaggtgggcgttgacatcggctccctacgttcgaccatcatggcgaacgttccgccgcaacggttcaactatcagcaacgcgtgggccgggccggccggcagggacagccttactcatacgccctgaccgtcgcccgctcccgcacccatgatgactactacttcaacgccactgagcgaatgaccggggacacacccccgcagccattcctcgacctgcggcggacgcggatcgcgcggcgcgtggtcgcggctgagctgctgcgccgcgccttcgccgcctgcgaaccagtcccggaacgcacgccggacagcatccatgggatcttcggcacccgcgatgactggccggcataccgcccgcaggtccaggcatggctggctgcagcggcggacgtccccgcgatcatcgccgcgctgacggtccgatcgggcattgcctccgccgagatcaaggaactggagcggtgggccgccagcgatctaatcggcgacatcgatgcagctgtctccaaccccttctaccaacagaaggagctcagccagatcctggccaatgcgggagtgttgccgatgttcggcttcccgacgcgggtgcgctatctctacaagagccacccccgggacaagcggcagctcgaggcggcggcggtctccgaccgatcgctggacatggcaatcgccagcttcgttcccggcgcagaggtcgtccgggacgacgaaattcacaccgcggtgggatttgccgcctttgacgtcagagggaactccgtcttgcccgtcgacccgctcggcccgccaatcagcgttagcagatgcgaggactgcggcagcacatcactggccgcgccggcccctgcctgcgcagtctgtggcggaagggtgaacacctttgacatgtaccagccgctcggcttccgcaccgactatcggccccgcgactacgacgtcgacggcgagaccgtcgccgttgtgggtgcgcccgagctggcgatcgcctcggcgccgagccgttcgtcatcggttgggggcctcctggtcgaggtctatgagatggccgacattctccgaatcaatgacaacctcggtcggctctttcccatggaggacgcggtcgaccgcagcgtcgtggtgaccgatgaatctctctacagcaacgaagtctctatccctaaaacccggggacgccgcagcgacgccgctatcggcgatgtgcgtaagaccgacgctctcgtcgtgactctcaaccggctggctctgcctggtggcatcatcccgaccgcacgcgaggtccagcctgccgggcttccggcgctatggtcgctggccgaagtgctccgcaagggcttccaggcagagctagacgtggactccagcgagttaaccgtgggtctgagcccggcccgggtaggcgacgaacagacccatcgcatcttcgtcgcggatagcctagagaacggggctggctatgcatcgctcctcggccaacccgagttgttcgcacaggtgctcaaccgcgtgctcgacgatctgcgacagcggtggcaggcaagccggcacgccgcggaatgcaccgtgtcgtgtcccgactgccttaggtcttttgacaaccaacggatccatggcgcactggactggcggcttgcactcgacatggccgaacttggactggcccgagaggtcgactggggccgctggcttgatcgcggtgacgtcctaacccggggtttcatcaactccttcgggcagtacggcatcgagcgacaccgggttaacggcctctgggtgctgtcgagcctcgcccggcagaaggcggtggtcctcattcatccgttgtggcgtaccgatccgtcgctcttccgtccggagcagaccgacgcaatgcgccaggtacaggagacgttcctgagtgtgaagacggcggatctcttcgagctcgatcggacgcccgttgcggtagctgggcgtttgctgtcttcggcatga

SEQ ID NO: 27866 - DNA, 1179 bp, Micromonospora sp. M42
gtgacccagctagcgttgatcccctccgatgccggcgttaccaagcccgccgctgccgagttcttcgccgggatagggctcgtccgcatcggcctggaagaagctggcatcagagtcatctggtcgaacgacatcgaaccggacaagcgggacatgtacgttcggcacttccaagacctggagcacgagcacactttccaactcggtgacgtggccaaggtgacaggaggcgagatgcccgaggggctgagtctcgcttgggcatcgttcccatgcactgacctgtctttggcgggcgctcgacggggcctggcgggcagcgagtcggggacgttctggcacttggttcgcgtgctggaagagatgggcgagcggcgcccccccgtcgtggcgctcgagaacgtggtgggactggccaccagccatgggggcgaggacctagctgcggccatccgtgcgctcaatgatcttggctactccgtggatgtccttacgctcgacgcgcgccggtttgtgccgcagtcacggcctcggctattcctcgtcggtgcgatcgatccaccagcagacgagcccgtgcccaacagcgagttgcggccggactggctccaggcgcctttcggtgattccagcctgagaactcaccgggcgatgttgcctgcgcccccgcctcccctgaccaccggattgactcagctggctgacaagctgccgctcgacagcgatctgtggtgggacgggctgcgcagagctgccttcatcgagtccttgtcgcccatccaggcagagcggttggaagccttgcgaaaactgcgcaggatctcgcgtcggaccgcgtatcgccggacacgaggcggcaagccgacctgggaaatccgtccagatgacatctcgggatgcctgcgcaccgcgcgaggtggctcctcgaagcaggccgtcgtggaggctggtcacggcaaggtgcgggtgcggtggatgactcccggggaatacgcccgcctcatgggtgccggtgactaccacctcgaagggctccgcaccaaccaggccctgtttggcttcggtgacgctgtatgcgtgccggtagtgtcgtggcttgcccgtgagtacctcatgccgctcgtgcgcggggagctgcgagctgccgacccgccgcatctggcggtggtgggtgcctga

SEQ ID NO: 27867 - DNA, 3084 bp, Micromonospora sp. M42
atgtctcgctgggaagcgtatgacgcttggaatgaagcgatagccgaggtcttcttctcggaagagctaggaggccagccggtttatatcgatgtcgacagtgacaccattccgctgctcggtgagaagaccgggactccatctgatgaggttgaggaggcgctcgccactgctgtacgggaggttctgtgcctcgcggggagtcggcacaccttcggtgagatcctcacgcatctcaccacctggcttggagcgtggcgccgcactgcccatacctcgcgtccaaccctcagtccaccccctatcctggccctgttggcggtgttcagcatggctgcggagcgcatgggccgtgacgccgatatgggacccaataactacttcggcaggctagcgcagctcctcggggctcgggaccaacacgaaaagcagcgccttaaggcgcactaccgccagcacgtcgtgactttctggaatgtgctggcgacctggctcaccggccttgacggcatgcgcggcctcccgtcggccgtggccatctcccaccgatacattggtctctccatctcgcaggctctggttcgcgaacatgaccgcagtaagctgccgcgatttttcgccgactacgggctccatcccgggcaggaggtggcaccccaggagatgcagccactccttgacgagtggatccggcgagacccgcctccgatcagtaagaatctcgcttcgctctggatccggcatgcggccacgcgggaacgtattgccagtgtcgtctcgctcgagttgcagaactgggacggcagcagcaccgaggtaattccgctctctgcagaggcgcttcggccgcgtggagaggttaggctggttgccttgactcgatcgagcatgttcggcagcagcctggagctcagtgtcgtggctcgcatcccggggcctgctgagccccactgcatgcagatcgacagcgcgattggtgacgataagccggtcctcgaactcatgccgtgggtaaatggttggcaccgccttccacggcctgcgggccttgagaagtcctcgatcctcgatggtgtcctggtcctgtccagtgaagatggcaagaccgtccaacgacggccccgacgagtggtgccgctgcgcaaggacgagaccctcggcctgttcctcgaagtggagcgactgcagctggccgaggacggcttggtctttgcgtccaactcgctggcaggggaggtcgcggatgtgctcaagcacgtggcccgcccgggattccagagagtgcagggcggatctgaaggtgtgccagccggttgggtcctcttccgggatgtgcagatcctgggattgctgccgtccgaggctaggtcccgagcgcgcgccgacgtcaatgtgctcctgccgtcggtctcctcgcaggtggccttctccgaagggctcaagcttccgggccggctgcgtaagttctcggcatatgcgccgccggagatccgagcagtgtcgaccggtgcagagcacatccgccttcaggtagcgcgtcgagacgccgagagcattgtgggcgacgtcgacccaaacgccctcgagcgggtggcctgcgaacgtgagggtgagggggctgcgctaattctgcatacggccgatgagcatctccccgtgggtgactacgaggctttgctgtttgttgacggtgccaacgatcccacacagcgcctgcccttcctgctgcggtcggccgactcggttgacctcgcaatgtggacccgctgccggcgcctggcgcatcagccggcggtccaccaggggtgggctgcgttgagcgcagaaccgtatgaagaagagtcgtcgccagtcatcgatggggctgtcgcaaccgaggcgtcaccgctatctccagccgtgcaggcaccccgctccgtctggtggacgcagcagcggccaacccagtatggcgaggtcgccagcgcggtcctgaccacccctgacgcgagatcatgtcttgtcaccggcgctcactattacgagctgccctacgcgagcacttcgtttgtatccggggtatgccgtaactgcggccttgtgaagcgatttccgaacaatcattgggcggctcagaaaagcaagcgggctcgagacaaggtcgaggcaatgtatcgcgtcgacgtccacgacgtggagccggtgcgggcggagcctttgacctgggacgttggcctcgatgggctcatgcacgctggcggcggcccaatttctgcgcttgagggcatcgcgctgcaaattgaaggctccttgctcttcgtcgacacctttactcggactcttgaagcgcttgctcacatcgcagtccgacgggatgagcggactctagaggcggtcgagtgggagatcgccccaccggccttggcccagctcgccgacggtgcctacttgctaaccggctactggccgccaagctatgtcgaaacccttgaggagctggcggccgaggctggggccaaggtcgggatcgaaaccaccagcccgggaccgagccgacggaccctcagcggattggcaccgaagaccgcccaggaactggccagcgcgataggggaggtgacggtcgccgcagatgccgcccgggccatcctccgcgctgctccggatctcaccgccgtggaggcgtcgcttccgacaatcaccatgccaggtgctcgtcggatccaacactttcatcttggctcggccgcctgggtcccccagcgtcatgccgaaaccttgggtgccttccgcctcgagtcattcggcagcacctacatcgtgcgacgggacgttgagctcgcgaacggaacggcccgcgtcggcacagcgcaactcgtcaaacaccttgaggcgctcagggcgggccggccgttgctggcatacgacccagcggcccaggcgcttgatgtgccgctcggtgccgacttgccagggctttatgggcgggcggcggtcctatgtgcagggcgtccacctgctccgatcaaagagcgtcggctccttcgctactacaacgtgccagccgacgtcgcagacatgctagctacccgtctcgcccgctga

SEQ ID NO: 27868 - DNA, 5418 bp, Modestobacter marinus
ttgagcgtcgaagccctgagtcacgacctgaccgacaccttcctgcggtactacgacactgcgtacgggcttcgcgacgaagcaatcatgcgcgagcgaagagaactcctgcgcggccagagtgctctgttccaggagccgttccttgagctgctccctgactacgtcctggccgatgccgacctcgcggcaagctgccagcgcgccggggtgcctgaactcgctggcttggctgccgccggcctcttggccgggcgcgaccggctgttcgcccaccaggagcgggcgctgcaagaagcactgagcggccgccacaccgtcgttacctcgggcacgggctcgggcaagacggaggccttcctcttgccggtcctggcgcgtcttgttcgcgaatccgcatcctggagttctcccccgcgcgatggtggttcgtggtggaccggccctcaaggatgggagccacagcgggcggggagccccagccggcccgcagccatccgggcgctcgtcctgtatccgatgaacgcccttgttgaggaccagctcgtgcgacttcgccgggcccttgacggtcccgccgcgcgccggtggctggacagcacccgaaggggaaaccggttctacttcggtcggtacacgggccggacacccgtatctgccgtccggagcaactccagcacgacagaacttcgggctgtcctccggaagctggacgagcgcggtcgacggctgagggcacggattgaagccgagcagcgcgctggccttccggtccgggaagacgacgcctacttcctcccccggcttgacggcgcggagatgcggtcgcgctgggacatgcacgatgcacccccggacatcctcatcaccaactacagcatgctgaacgtcgtcctcatgcgggaccgcgaagaggacatgctggcggcgacccgcgcctggctcgacgccagccctgatcacgtattcaccctcgtcgtcgacgagctgcactcctaccgcggcacgtcaggcaccgaagtcgcctacctcttgcgcaagctcttggaccgccttggtctgcacgagcgccccgagcagctgtcggtgctcgccgcctccgcctcactcgaagccgggcgcgcccgcgacatggccttcctggagcagttcttcggccagcctcaggaccggttcgccgtcgttcccggcgctcttgcccgcccggccggcacggggtccgtagatggggccgctccagcgcttgcagaggcgcgcgaagccctcatggacggtcagctgccctccggcctcactcgacggctcggagtgcaggcggccatgttcaacgccggccaggacgagggccgactccgggcacgcagcttcgctgactgggcttcccgactcttccccggattggccccgcaggaccagcgggaggcgatgaatgacctcctggcctgcatggatgcggaccccgacgggacgcggctccggatgcatttgttcttccgaaacctcaacggcctgtgggcgtgtgccgatccggcctgcgcgctcgtgtcaacacgagaacaagacgacaaggcaccacggcagcgcccgatcggacgcctctacgcacagccccggtatcgatgcgactgtggagcgcgcgtcctggaactcctctactgccagacttgcggcgagctcttcctcggcgggtaccgatcaccggtcgccgaccaaagccagtacctcgtgtctaccgtcaccgacctggaagaacttcccgagcgtgctgcgctggcgcgcaatgccgcgaattacaccctcttctggcccacatcggacccaactcagaagccgctcaccagcaagtggacgcgcaccccctacgagatgggcatggcccgacgccacctgaacgtccacaccggtgaggtcgctgctcccgaaccagggagcagcgggaacggctgggggtactacgtgacggccggaaagaacggcgaccccagccgcctgcctgcattcccgaacaagtgcccgcactgcggcgacgaccgcgagctgaagctgaactggctgaaggccgaggaccccaagcggaaccgctccccgatccggacgatgggtaccggtttcgagaaggtgaaccagctcctgtccgacgtcctcatgcgcgatctcggcgacgaacgcaagctcgtcgtcttctccgacagccgtcaagatgcggcacggatcgccgccggcctggagaagtcgcactaccaggacctcgtccgccagctggtcgtcgccgtgctcgacaggcccgtcgatatagacccacagaaggcggcggagtactggtcgaacccggacgccggggccgacgcccagagtgcatgggacgccgtctcgcaggccgacaaggcgctggccgacgcggtccgccgtgtcggcatgggaaagcctcaagcggacgacgaatcgacgatcgcgagtcgtttggaggaactccgcagccggggctacaccctggcggaactcgcgaacctggttgaaccgctgctgctctcgcttggggtccacccaggcggaccggcccccagcttgcagagctatgacgccgctgcgtggacggacctctacgactggaaggcgacgccgccggcacgccgacccaccaacctcctcacccccgcacaacaggccctatcggaccgagttcacggagccctgctcgaggaagtgcagaggagcgtcttctccagcacgggtagggacgtcgaggcactaggcctcgcccgggcgaccagtccagtggaaagcagtgctccgactggcatgtcgtcgacgaccttccaagaggtgtgcgacagcgtcgtacgcctcatgggcctgcgccgactttttcccgaacaggaaaagaacggtcgtgaccagctgccgcgcaatgcccgcgagtacctgggagtcatcgcggaaggcgaccgcggcatgacggacgaactcatacaagcggttcgtcgcgccctcggagtcggcgacaagaacttgctcgacagcacacgcgtgcggctgcgacccgccggcgccacacagtggcgatgcacacgctgccgaaggaggcacctgcagccgtccggtggacggtgcacgcagtgccgagggctcctcggccccgccgaggaacgacgactggcgggctccgacacgagcatcgaggcagctgactactacgcatggctggcacgggatgcgggtgaaccgttcccgctccgggtggaagagctgactggccagaccgacaccaacgacggtcaggcgcgacaagctcgcttccagaacgtcttcctcgacgaggaggtcccccagaccagtgcaatcgatgtgctcagcgtcacgacgaccatggaggccggcgtcgatatcggcggtctgcgagcggtggtcctcgcgaacatgccgccgatgcgcttcaactatcagcagcgcgtcggtcgcgccggtcgacgaaacgacaggctctcggtcgccatgacggtctgtcgtgggactcgcagccacgacgagcactactttgcccacccggagcagatcacgggagacccgcccccggctccatacgtcgacctcgccaggccggacatcctcaagcgagcgatggccgctgagttccttcggcgagccttcctcgccgctcgcgaggactcaccgggcttcgcccctgggagcaatgcccacggtcagtttggagatgtcgccgcctggccggcagtgcagcagcacgtcgtgtcctggctgaaggccaatgcgcccgaggctgagcacattctcgatgtgctgttgcaacatgctgcgccacccctgcaagcacgccgcgccgagctgatgagctgggcggtgacggaactgccagccgcggtcgacaggatcgcccacgcggacaccggcaactctgcgctcgcacagcgtcttgccgaggccggcgagctgccgatgttcggtttcccgactcgcgagcgcacgctgtatcacgaacagccgcatggacgcgagcccgatggcacgatcagccggcagctcgacattgcgatcagcgagttcgcgccagggagcgagatcgtgaaagacaagtcggtctacgtgcctgtgggcctcgtcgagtacgtccggcgcgggacgcgttgggtgccgatcggcgatccccgcggtcccatcgccaaggtggggctctgtcgcgcctgtggtgcggtcgacccctcgggcactccttcagcgtgccctacttgccgaacgccggcgagcgatgacggcgtctaccgggtggtcgaagtcggcgagcccgagggcttcaggaccagctatcagaggcccgctgactacgacggcacgtacgagttcactcctcgagcgggccatgcacgcctgtcgctagagaacgccggtgaactagaggtacgtggacaccacgagctggacctccgtttcggcaaggcagacgttctggtggtaaacgactcggccggcgcggacttccgcttcaccagcgtcgcggcccaggacgggctcctttctttggacttgcttgccgacgacgaacgtcgcaaggagcttggactgccgaagccggtcggggaccacagcggcgtgaccccgatcgccctgggcgcctggtcccgaactgacgccttgctcgccgggcttcggtcagtgccagacgggctcgatctcaacccgatgcggacgtcggcacgggccgcgtggctctcgttcggcttcctgctccgcaacgcggcgagcaagcttctcgacgtgggggtcggcgagttcaaggtgggcgtcttcccgcgacctgggaagggcaacgacgctgtcagtggagcggcgtttctcgcagacagccttgagaatggcgctggatacgcaacccatcttgggcaggacgcggggcccttgctgtctaccgcgcgtcagctggcagtcgaatacgcggagcatgctcgtactggggctggctgcgatagcagttgctaccggtgcctacgcgaccacacgaacgccgcttaccaccctctgcttgactggcggctcgccctcgacctcctcgacgctgcggagggtcagcccgtcagcctggacaagctggaccagctggccgcccaacttgccgacacctttgccgcgaacttcggcggcgtggtccactcggccggcggcctgccgctgatcgaggacgactttggcagcactctgctcgtcgttcatcctctcgagagcttccgcgaggggacttcgagccagcgtgttatcgccgcgcacaaggagatggccgagcgaggccacggtatctcgatgatcactcacacctacgatctcgtaaggcgccctggagtcgtatggacgcggctggccgccactaacggatctgcgccgtggggttcgctgggaagctcccggtga

SEQ ID NO: 27869 - DNA, 1068 bp, Modestobacter marinus
gtgagccacggtgttgccatcagcctgttctccggatgcggcggcctcgacgttggggtcgagcaagccaactacgaggtccgcgccgccgtcgagttgaatcaggacgcagccgactcgcacgagaagaacttctcgcacctcggcgcacctgtcatccgacgcgacatccttgacgtaccgacccgcgacatcctccgtgcggccggcttgactggccgcgaacgcccagacctacttatcggtggccccccatgcacccccttcagtaagagcgggttctggctcgactggaagcgcgcgggcctggacccggacgcctcacttcttcaggcctacacccgggtgctcgcggaggcgaagccgcgactgtttgtcctggagaacgtgtacgcactcacctacaacaacaaggcgtctcggccggcattcgaccggctgctccgagagatcgacgacgccgggtacaccttcacctggcgtgtgctcaacgccgccgactacggcgtcccgcaggctcgcccgcggttgatcatcgttggtgcaccgaagagccgtcgaaagacgccactgctacctgaacccacgcacaccggcaagtgggagcgccgctcgaccggctccgccgaagggctcccccacgtctcggcgggtaaggcgctggccgggctcatcaccgagccggagccgagcgagatcgtcggcggccaattcggccacctgctcccgggcgtccctcccggggacaactatctcttctacacggcggagcgtgggcaccccgacccgctgttcaagtggcgcagccggttctggtccttcctcctcaagctcgacccggaacgccccgctccgacaatccaggcacagcccggcccatacgtcggccccttccactgggaaaaccgccggctgcgcgtggcagagatgaagcggctgttcggctaccctgacgacttccacctcgttgggagccgcaactccgcacaggcgcagctcggcaacagcgtgccgccgcccctcgcccgccaggtcgtcgaagctctacacacttcaacctcgtcctga

SEQ ID NO: 27870 - DNA, 2007 bp, Modestobacter marinus
ttgctgagggccgtcagggctcgcgtcaagcacagccagcccctggacccatgggtgcgacaagccatccagtggcgccgagaggggagcgtcgggaacccgccgtgggtggccgtgctcgcagtgaccgtgctagccgcgtcgggggccggcagggaagaagacggccgcgtgctgcacgagcgggcctactaccgtccactccgacagctcctgggacttctggccggtgcccaaccgcccgggttcgacagcgacatccgaatgctctggaccttcctgaaggaatggctggacgaccacctcgagggctctcgagggctctcgacggcacgcgctccccgtcacctgtcgaacgtgggctgggctatgtcgcaggtcgtgctgacatcggcggagcggtcccgactgccagagttcttccagctcatcggcgccgtcccaggcgaggacatcacccccgacgcactgctcgcgagctacctgcggtggggatcgaggcgcagagcgtctcggatccatgacgacgtccgtgcgcaatcgaacttcgcggaaatgctcggggcagcactccaccaagccctgatttcctgggatgggcgtccgcgtgacgagcgcggacggaccacgcttccccttctgctcggctactacagctcacgagggcagcttcggctcgtctcccgggcggcccacggactggagaatcgtggtctgaaggtcggtgcggacgaggtctacatcggagcgcgagacgagctgttcgtggtgcccggtgatccggacacggccctagctggtcgccctattcgagcatcactctctccgtcggagcaggaccccgtctcggtggcgatcgatatccagatgcgactccttagtacggacatccacgtgctcgcctccaacggcgagctggggatgtgggttgaggtggccgccgcgtcactcgaccaggaacacgtgatcatcgtccgcgatcaagtcgccccggaagccgagcgcgcgatgacggatctggggggcggggccatgcggctgccccgcatccgactgccggcgggctggtgcgcgtatcaccgttttcacccaacgcgactggcacaggtcccggttcacctctcagccctcgtccctggccgaacggaattggcccagttgaccggggggctccccgtcgatcgcctacggaagctctggctgaccgacggccctcctgacgtgatcctgccggaaattctagatgcgcaagcaggccgagtgctgcggctggacggcgccgagctgccgtggcccgacgacaatcgcctgcggctgcggtcccttgggcttcactccggcgatcacgaactgagcgtcgccgggcgcacgatgcgactcactctcctcgacgaggtggtggaccacgcgggccacggcgacgctcggctcacggtcgagcgacagcccgtcgaacaaaccttcctggcgagagcccgggcggccggcgccagccacgggtcaccgacgtcccccaccgacgcatgcatcaccgtcaccctgtgcggcgcccggctaagcacgaccgaaggcagcctgccgcttcttccgcgcccacaccaactgcgggttggcgggtgctactacgtgctcggggctcctgggcaggccgctcgactccggccggtcgcgccgccctggctcacggccgtcgagccaccgctgtattcgcgcgacgctgaccttgagtcgaccattgtcggcctttccttcgcgccacgctggttgctctacgtgccagcaggccgacgggcgacggtcaccgatatctcggacgtctccgcgcgtgccggccgtgacactgcagttcgcgcgcccgatttcggcgcggagatctggcagcaagcttcacggcatcttgaactcgccgaagtcgcgcctcaggacatgtcggcctggcgggcctggttgtctgctgctggctcggcgggccagtaccgccgctcaactattggacggcagccgtga

SEQ ID NO: 27871 - DNA, 5838 bp, Morganella morganii SC01
atgttagatcccattggcggttttcgccgtatccaagacttcttcatttcatacatagaaactaacttccgaattgccgacccttcagtcgcgatttcaagacgcaatcttctaaatagtagcggtgaattcgctgcggaaccctatatagaacccgttttacggtatgagtcgtcgggtaaaatgcttgaagatctggtcgatatagacggcgggccgctgaatagcctgtctcctgaaggccgaaaggcgtttgtcgaattggcgttatccggtctgttcgattcgcgccctggcgacgcaaactggccgcgtcgttcagtccatgcgccttatagccaccagactcaaatgctggaacgcggtctgcgtcccggctgtcctggcatagtgacgtcgggtacaggttcgggaaaaacggaaagttttatgttgcctattctggctgcattatcaaatgaggctgtcaactggaacaggcctgacagcagctacctacaaaatcgatggtggcatggtgcagaaaagaactgggtttctcgtcgcgaaggtgaaaaacgcccggcggcggtcagagcgctggtgctctatccaatgaacgcactggttgaagatcaaatggcgcgtttacgtaaaacgctggattccgatgatgcgcgacaggtgatggaggatcgcttcaccggaaaccggatcttcttcgggcaatataccagcgctacgccggttaccggctacgccagccatccccgtctttccaacaccagttcagaaaaaagccgtcgcgtccgtaatcttgaaaaattacgtaaggcgttgaacagaattgatagcgatcaacaggctgcgtgcgcattcgacgaaaaagaaaaaccttcggaaaagacccggtatatattcccttctacagacggcggggagatggtttctcgctgggatatgcaggcaaccccacctgatgttctcgttaccaacgcctcaatgctgggagcaatgctttcgcgcgaagtcgaagacgatatttttagcgctacgcgcgactggctgatgaacaatgacgacgcgtacttctatctggtattcgacgaattgcacttaatgcgcggttcagctggcacggaaaccgccatgttgattaaatcgttgattatccggctcgggctggacgacccgaaacaccgctacaaattgcgtttactagcgtcttccgcatcgctgccgatggatggtgcggatggagagcaatcacggaaatacctgcgcgatctctttgcgcccttcggcacttgctgcgatgctttggatcccggcagcgataagccggatttctggcataactgcgtcattcagggaaaacctttcatccctttgaagccgtcaggaaaaatccccgtacagccttttgccgcattaatgcgcgccgcccttacagagcagggcaatgtcgtacgcaatttgaatatgacggacgctctgaatcaggcgttacttgatgtattccaagctcttggcgtaaaagagcagaatgtcatgcagggcataaaacaagcggcggaaatcgccgccgcgttattgacgaacgcctgtattgaaaaagacggcgaaatgccgcgggcgatgccgcctggacttatcatcgataaagtttttctgaaggaagagctgggtaaaccggatgagtcagaactggcgttacgcggattaatgctggcgcgcgcgctgccggagtccgggattgattgcgataaaccggtcaacgttacgccagcctttcgcgtgcatacattcgtcagaaatattgagggtttcttcgcttccgtatcgccgggagagaaaaaggctaaattcgccgatttttgcttggagcgaggcttatcgcacgcaccatcatcagcctcagacggagaacgaggtcgccgtttattcgaaatgctgtactgcgaagcgtgtggcgacttgttgctcggtggtcagagaggacaagataatgaaggctctactgtagagctgctgccctcggcgaccaatctggaaaaccttcccgaacgaccaggcgcagaatactacgacgatatgacgctggccgaatttgctgttttctggcctaccgaaaggactccggcaaccagtgaaaaagactgggatgtctgggagaaggctgtgctaaaccccgttaccggaattgtaactgtcggacaaggcgcatcggcgatgaatgccgattcggttcacggatatctctatttccagaaaccaaccccgagcaaaaaaggcgaaccggagaaaaaaccttccgcacagcctttttgttgcccgaactgcggtatcgattactccagtcgaccagccagcaatcgttccagaacccccattcgcgcatttcgtacaggtgtgactaaatcctcccagttagtggcaacagagttatttgaattgctgcatgctatcggcgcggaagccaagagtattgttttttccgatagtcgtcaggatgcggcatcgatggcgctggaaatcgaacgattgcacttacgcgatctgcgcagagaaattttggtcgcagccgccagagagatgatccgagaggctgaaagtgagtatatttctgaagattatattgaagaaaaaaagatcaaagccttaacgaacaaagactatgccgaatatgaacggttgcataatctcaaaataaaccaggccggtattgccgatctttgtaggtatagacgggtaaaaatcgataaattactggaatcagaaggcgattccatcggaaaaatatcctccgaactagctgggctgggaatatcgccttacaaatatcgctcaagcgcagatggggatggcagcgatatctggcacgcaaattttataaaagataagaacatcgttaaatatcatgaaaaactttcttcatctgatcgattggatctcaaaaagaaaataattgatactcagtctgaattaattgatgacgtcattttcgccaataccttcttcgcattggaagagacggggttagcgtatccatgtatttcagatagagaggaaacgagtgagcttgatgcttggctaagggtattcgctggtgtttatcgtgtcaaagaaaataaatattttgatcccgaaaactctgtagaatggaatacaggacaaaatgttactaaagagaaaataaagcgtgttgctaaagctttatttggagaaaacaattatctggataatttaacgcaagtcttaaatcagttagctacccgagggcattcagctggtttattcaatatcggcaaattattcctcaaggtagccaaaccaggcgacccctattggcaatgcggcaactgcgagcggatccacttacatctagggtttaagcgttgtactcgttgcacggaactgcttgatatcaaaccccgaggcgtggttgaaatgctatgggaagacaattttcttggcaaacgtatagtgcgcggtgaacgggatggtgttaaacgattccggttgaatgtcgaggagttgacgggacaaacggatgatttctccgatcgattacgcaaattcaagggaattttcgttgatgagatgagtgagctcgaaaaactagatgcggaaatcgatatgcttgccgtcactacgacgatggaggtcgggattgatattggttcgcttcagtcagtttatcaggccaacatgccgccccagcgatttaattatcaacagcgcgtcggtcgcgcaggacgacgcggccaagccttttctttcgtgatcacattttgtcgtgggcgtacacatgatgcttactatttcgctcatcctcatgcgatcacaggagatccaccgccgccaccttttctggcggtagatcacgacgcaattccccaaaggcttttgcgaaaaatctggcttaagagtgcgtttaacgatatacgagaagaatgcaaaaaaaacaaaacgacatatcctggagataagctcgttccgccagatgttcatggtgagtatatttcaacacatgattactatcatgataatgaagctaattgggccaaacttttgtattgcgcgctggaagcaaatcagaacatacgagaacgctttattgaagcagcgacatttgatcctgatcagcgccgacgtctttattctacaattaataccgaaagaataattgaagaaatcgaaaaactaagaccttacgcgcctgacgacaatacgggacttgctcgttttctggccgagcgaggtctgttgccgatgtatggaatgccgactcgggtacgtaatctttatctgggattgcgcaaaacaaaagggacaaatggtcaggcggaatacgaatggtcaacaatggatcgcgaccttgatcttgctgtttttgagtatgcacccggctcggtattaattaaggataaaaaaaagcatcaagtaatcggttttaccggtaactacctagaacctcaagtccgagataatcgtgtttcagatctctcaacggtatgctcctggaaggaatcgagtcactatgttgcaatttgccagtcatgtggttccgctaaattagagaaaaatcagcctattaacaatattaattgtgaggattgcgatactcctatcggcccagatgaattcgaaatctatatcacgcctaccgctttccgtacggattttgaaccaaaagatgaaatggacaactttactcgtatgtcgttaaaaactacggcaaccgtattgcataaagatatcccagaaaattgtggtccttttaacgttcggcgtggtggcgttactattttgcgtcttaacgatgggccgattaatggggagaaggaaggcgaacgatttaccgttgatttagctactgaccaaaaggccccgattcctttagctacttatttctcaccaattaaagggaaccaagcgattgattcaaactgggctggattacgtaataactttaggtggcggtgtactggagagaatcaaaactttgggcttgtatcaagtaaagagactgagtcgctccacttagaattaatgcaatttgatgatcgccttaatctgaatatgatcgccagatacggtgaatacatgaatttgcctacgcgcgcggcggctatcagcgcaacacagatattgacgcataaggctgcgctttatctggatgtttcgccagatgaattcgaaacgcttgaaccccgactccatcatgagaaacctatattgcaaattgcagacgcattgattaacggttcaggattatgcagacgacttgccgagccagccgttgttgggagtctgcctttgatagtcacattattgaatgagattctggaagacaagtgtgtctggccaatggttgattttcttaaaaaggatcatcctgctcagtgtcaaactgcctgctacaagtgcatacagcgctatggtaaccgccggtatcatggtttactggactggcgtttaggaatggcatacttacgagcaatggttatacctgaatttgcctgcggtctgaacgatgatgactggagtcatccggaaatgatcggatggcgagacagagcatttgagctagcggaaaacgtcgcggcgttacggcctgaaacaatcaaattatcgaaagagtatccattaccggttcttaccgaaattcaggatggaaaagaactctggcgcgcagtcgttacgcatcctctgtggaaatggagagaacctgagcgaaatgctttgattgactccatagggctagctgatgggaaactttcactaaggttcattgatacattcgagctggaaagacgaccattgcgcgcgcttgctagccttaaacggagttag

SEQ ID NO: 27872 - DNA, 1236 bp, Morganella morganii SC01
atgagcactagagccgtcacgaacgacaatcatttaacagaatctcacgaagcgggattccgtttctatgagttttttgcgggcggcggtatggccagggctgggctgggaaaacagtggcaatgcctgttcgctaatgatatggatccgataaaagcatcgacatacatcgacaactggggcgacgaacatttcgacatacgcgatgtacgagaaatcacccctgatgatctgccgcgccacgctgatttaagctgggcctcgttcccctgtcaggatttatcgctggccggcaatggcctggggatcggcgaaaaagattccagtgcggataaaaccacgcgttccggcgcggtatggccgttcctcgatttaattggcaggctcggcgaggaaaaccgtaagccaccgattcttgttcttgaaaatgttcttgggttgctgacgctggatcaagggagccatttcgccgcgatatgccatcagttaagtaaaacgggctaccgctatggcgcaataatcattgatgcaaagcactttcttccacaatccaggccccgcgtctttctcgtggcgattactcgccatatttccattcccgaatatttggtttcagaagaaccgttgtcgcaatggcattcaccgtcacttcttcgcgcctgcgatgcgctagcggaagatgctcgtaacgactggatttggtggtctccaggcaatacgcccgacgccagaatgaaagaactgggcgacttaatcgattttgaagacaaaaacgtgttatggcactctgccgatgaaacacaacggcttatcagtatgatggcaccggcgaacctggagcgtcttgcaaaagcgcaggcatccggcgagacaataacaggcagcctttatttacgcatgcgtaatgaaaaaggtatcaacagacaacggaccgaaattacgttctcggccgttcttggttgtctgagaacaccgaaaggcggcgcttctcgtcctcgcattatcgttgtcaagggcaatcaggtgaaaacgcgtttgttgtcggtcaaagaagcggcggcgttaatggggttaccggatgattttattctcccagcagcgtatcagccggcatttaaagtgattggcgatggacttgcagttccttctgttcgttttctggccgaacgtattctggatccactggcgatgaccgttcaaaacaatacccacaggacagaggatatacacgaatga

SEQ ID NO: 27873 - DNA, 2559 bp, Morganella morganii SC01
atgaactggacgtcgcctgttacgcccgatggctgggaaagtacactgattgattattttctccggttcggcaccgacggcgacgcgcaggatattcgctggtttgaagttacgccggcgacactcgctgaggcattctccgacagcggcgttagcgcagatgaaatagaagaagcatttcgaacctgtatgtcgaaaataagggatctgccgcagcgcctggaaagcggtatgatggaaaagtcgactcgtcgatcgccaggatattttacttatcttgtcatgacgctgcttatcagcagtcaattcgacgcgcaggacgaacgcaatgattttcgcctgaaactacagagctggctgcaggttactcatagttttcaaaatttatccggcatcaacaagatgtgggaggcattggacgaatggcttaggcaacgtattcaggaaggcgaaccctacagacgtcttatcttgccgccacgggatggctgggtccagattggtcacaccctgcgactggcattcccgaataaagccgatctacgcctgatgagcgaatgtcttgaaagctatccacaagctgccgctaatccacgccagttaattgaatactttcaaatcgttattcagaggcaaggcgtttctcatgcgctgaaggaggcttttgccgaattcagagacgcgtggttgttagggcgtcgcgcgctgttcgatatgcctttctggcgcctgcgccaacgagcagttcagatatcgtcctgtgtaacaccgcatcagaccatcattgatatgtacgtcgacttcgatggctcgcggtgctatttcagcgtcgcaggcaatagcggcgaaagcgtttttcatcctacattacccgaagttcttattgcccgtgacgccgagagcagcgaaaatctggggaaggcgacgcaggttggcctactctttttttacgagatcggacacgggcgctggagagctaaatcgtcacccaacgtagactcgcaacggttccatatcgctttatccagtaaacattctatacagatgagtaagcgtctcaatggatatattgctgagggcgagtggattttaacgacgcagccgctgaacagggtttcagcggtggatttattccgcttaatacgatcctcttcagctattcagaatgatgacgttacacgccctcagctatatggaggaattcgtgtccctggcggatggctgggattaccggcatttttaccttctattgattcagatacgcaatgctacaaaatatattcatccgggaatgatgaagcaggaaccaatgtttctgtaatagatggtcgtttgacttcttctgtgccgtttaatggtgaacttttcattgagccagcccttaaggcgggtgaaaaaacaccgccgtggcggcgtcgcgcgcgctttttcacccgcgccgtaccgcacccgactttaggtgaaagcgcaaaataccggtttgagccgctttacgattggttgacgtcttcactaaaggcaccgacgtttaatttcgaaggactgtttgagtgggaagatagcgaagcatgttgcgatcaccttctcgaagcgatttacgcgagcggagccagcggctgggaagaagccgagttaatcgagcttctcaggtatgtggccgacgatatcaacgtatggcatttgattcgttgtttacatcatgcaggtctaatcgagccacgcctgcgtcctggatggaaaggtcgggtatggacgctggttaaaccttcattacttcatattcgcaatggagaaaattctctggttgttgtggaaggcgcggtctgcgccagtctgatggatgattttcaaaaagcggtcaccggactgagcggagaaagtttccgccgtcgcggcataagcctctggtcgcctcctgtatttggggctgtactcgctaatcctgttacgttatcccggcgtttgggatggccgcttatcgaagcctcatcgtcatccggtacaacaccgctttcactggtcacgacggaacgcgccgctgaactacacgagccagcggcggtctggaactggcattcaggaagatttcagcagcatggttctctggataaagaatctgcgtcgctgtcacttcatattcatctaggtgggagagatcatgatatttatcgggtcgtttccggacgaaaaacgacgcaatatctttcccgaactgccgctatcattgctgctggcgcgaaaaaccgggcccccatatttgaactcatcgccaaaaatcatcttctatgtcttgtcactgattgcggcctgcccgacgcgctggctacggggatacggcgtcatacactcagaaacggaggtccaacggattctggttatgtttatcctgtcgatgacgcctctttcctctggctgagaacgatgcttccgggatgtttctattctctcgcgccggacggtgagagggatgcaagtaatctggtttcctccgcttgccattccggcgggaaaatacgtctgacatggcgagacggtcgactcacgctggatctgagataa

SEQ ID NO: 27874 - DNA, 2088 bp, Morganella morganii SC01
atgagcgaaattccctggtatcttggtcaatatgaccgcagaaattatcagtcctacctcaaagccgttgcgcaggaaaccccgaatggctggcgtacaatcgactcaaagaagttattccctcgtacgggagaagttgaatttaacgatgctgacgaattgaggcttcgtaaaggcgaatgggccgcttttcaggtggggcccggcacccgcagcaaggcgctggcaaaacgctcccgtcgtatttatccctattacgatttatctttcgggcagtcgctattggaagtacgtcgtcggttgagtttcgagggcataacggtagacggcgaaccaggggtatgggctatccgcttcgggtctgatgcgcttattctggctaatctggcggaatcgaaatcaggcagccttatcctgttcagaaaccagaacgtttacgaatatgatttcaacgaaaacagcgtaattatcgtatccggcatgtctgagagcgaaaaagcgttttatatgcccgatgtcgatgcttcgcctgctcagatccatgactggacgccggataagcagtacattgaaaacgtcattcagcgtttttcctgcgctgactcaacagcaatggtcgctggatggcttcgggaacatgccgacgaacaaaccggaaaactaaccttcggcatcaacaacatgctgactgccgctcagacactcaggtcaggagagttggcgaagaagttggaggaggaggattcactggcccgtcagttcgctgaagcggtattgaaggaccataatatcgctgacctgctcgaacgtcagatacaaagcatcgcggaagaagagcgagccgcgctgcgtacagaacaacacaaggtgctcgataaagagttttctgctgaacgcctgcaacgtcgtgaagctattgaagtggaaatggccacttttgagaagacaaggaaaagcgagctcgaagagcagattgcacaattacggcagcttgaagaagaaaaattacagattgattttgcagaaaagcaagcggatatagaacaaacgctcaaacaggaaaaagcgtatctcgaaagcgaattaagccgtttgaaagacgccaacgctgatttatgcgctcagaacgaaaaccagcgtcagatactggcttccctgtcctgcgagcgtgaagcgtttttggcgtctttaacggatgccgaggaacgtaccgctcaggcgcaaattgaactcgaaaaaatggatatcgctattgctgaaaaagcgcgccgcatggcttactctgcgatccccgaagttcgcctcccagtgcaagcgagagtcgtatcctgcgaagaattcggtcattccgttagagagaacaagttgctgacacccgacggaaagatactcatgacgcaatttctggcattgatgttggccggtgagtgtccgttgctatatggcccggaaacacaagacttccttgctattgccgaatcgctgatttcttcaggccgttccatccgactagttgccgatccaacgatgatttcctgcgaggatctttgggttcgcgcaggaaatcatctggcgacaccgctttaccagggattattactgagcggagcctctagtccccgaacgattctctccgtcattgagcgtgtcgaatgctctgctgcgcgtttctggttgccggcgctgaaagaccgtttgcgtgacggtgatttgccccgacgctttctgatttgcggtactattgaagatgaagattgcgaagaagcggaaaaagctaaagagcagcatcttcgtctacggatggaaaacgttatcattcaaaatgcaattgcgctgtctcccctgcatctttccctagaaagtcatagcgagctggctcccggcgaggcatcgcatggtgagataccggacaaactcgcgatcgcggctgatatgtcagctgggcgtctaaatctggcaaacacgctacaggcaatgagaacggcgcatgaagccgcgccgctctgcgatgataacaaagtgatgcatcagaagcggttagtcgatttatacgccgacttacagaataacgagctatgcgctcaatag

SEQ ID NO: 27875 - DNA, 5484 bp, Mycobacterium canariasense
atgcaacccattcctccggtgcaacgaagcctcgatgtcgcggggacgtttgaccgtctcaaggacgcgtacttccggtactacaacaccccattcgggctcgccgataggcggttgcaggacgagcggcaggggttatttgaccgtgacaacggcgtgtaccgcgagccgctgatcgagctgcggcccgagtacgtcaacgcgccgcgcacgatcgccgaatcggtcgcgcactgcgccgcaccagaggagttggccgccttcgccgaggcgggcctcatcccccaaggacgggcactgtacctccaccaggaacgcgcgttgcaggccggattgaccgccggacgcaacatggtgatcaccgcgggcaccggctcaggcaagaccgagtcgttcttgctgccggtcctcgcgtcgctactcgaggaatcgcgcacgtggagcggcgcgcccgcgccagtcgttccgtggtggcgcacatcgccgcggaccttccggccccagcgcgacggcgagatcggccgacgcgcggccgtccgcgcgttgatcatgtacccgatgaacgcgctggttgatgaccagctgatgcgcatgcgccgcgccctggatagtcagcaagcgcggacctggctcgaccggaatcgccggggccaccggttctacttcggccgctataccggtgcaacgccggtgaccggcaactcggagaacccgcgggcaatcgaacgcctgcaaatgggcctgcttgaaaccgaacggcgagcagcacgggccacgcaggtcgcggccgccaccggtaacgaggacgtgcagtacttcgtgcctcgtcttgatggtgccgagatgcgttcgcgctgggacatgatcgcggcgccgccggacgtgctcgtcaccaactattcgatgttgaacatcatgttgctgcgcgaacgcgagcggagcttcttcgatcagactcgggcatggctggacgccagccccactcaccgattcacactggttatcgacgagctccacatgtaccgcggcaccgccggcacggaggtcgccttcctgctgcggaacctaaagcaccggctcggcctcaacgaccggcccgaccagctgcgaatcctggcagcctcggcatcgatcgacgccctgcgtgaccaggcgtacctagagaccttcttcggcgtcgatgccgcctcgttcgacttcgtcgaaggcagcctcgcgatgccgcccgccgcgcctgcgggaaccgcgcaggatgccgcagacatccagaccgcttcgtccgacgacgacgtggtcgcgctggctcgtgatcgcaacctgatggactcgctgcgtcggtcgttcctcgatgtattgcaagggggccacgagtccacgtcggcgaagctcctaccggatctctctgcccgtgtgttccccggcgtcgccaccggcggcgccgcattggcgcgactgctcggcagcatgagcgccagcccggccgaggccgatccgaaactgcgggcgcattacttcttccgcaacgtgcccggcgtctgggcatgtaccgatcccgcgtgcgaccaagtgcccgccgacggtactccccgacccgtcgggaagctgtacggcgaacccatgactcgctgcggctgcggctcacgcgtcctcgaactgctgtattgccagagctgcggcgacgtgatgctcggcggcttcacgccggacggcgacacgcaacggcagtcagtgcgcacactcctgctggcagacgtgcccgaactcgccaagttgcccgaccaggtgcggctggaacgcaacgccgccaactacctcgtctattggccgaaccccgtcgattcgctcacagcaccggatcggccgagctggaacagcggcaacgtccagtacgccttccgccgcagcgcgttgaacccagcgagcggcgagatccgcaacaccggcgggccaggcaaccacaccggatggtccttccacgcctacctgccacccgcccggcgccgagatcgcgaaatcaccgacgtcagccccttcccaactgtgtgcccgtcgtgcggcgacgattgggcgatcttgtacggcccaagtgggcgacgaccggccaccgacccgctgacgcagcgctcgccgatccgcggcatgcgcaccggtttcgagaaggtcaaccaagtcctcacgaccgagctggcgaccgacctcggtgaccagaaccgcaaggtcgtgctcttcacggatagccggcaagatgcggcgaagttgtcctccggtctcggcctgcgccactaccaggacctgttacgcctgctcctcaacgagcacctggacgcccgcggcgatgcaaatgccgacctcgaccttgcgcggcggttctacgccaaaaacgaacgggtcgaaggcacgtgggatgcaatcgggcggctcgaagtgcgcgacctgaacgtgctgcggcagctcgtcgagatctggcagggacgccccgggacgaagcctgaggacgaacccgcgctgcttgcacgattcaatgctgggccgacgctcgacgtggtcgctggcgcgctcgctggggagctgctggacctcggcatgaatcccggcggtccgcgggccagcctgcagcagacggacccaccggaggaccagccgacgcggccgtggaccggcctgtacgactggggcgccagcccgatatcgcggcgagcgaatctcgggccggatcaaaatgacctccagcggtcgattgatcagagcctgctcacggagttgctcgagggtctgttctccggcgcaggccgcgacttcgaatccctcggcctcggctggctcgcactcgcgaacgacacggagccgctcgacatcccgccaggcagcgacctggcctacgcccgcgccagcctgcgcgtgctggcccacaagcgccggttcttcggcctgcgcgagacgagcgacaacgcgcccgccaagctccggggcttctggcggacgatcgaacaagctggtggcccgaccgaggtcgacctgcagcagatgttcctgactcgctgcgggtcggccgtccgccaatacctcatcgatccgactcgggtcgtgctgcgccggggctccggtgagtggtggacctgcgcaaactgccgccgccggcacctgacccgcgggtgcggcttctgcaccaactgcttcgggccgctgccagtcgagtccgaaccggtgaatgccgaacaggactactacgggtggaaggcgacaacacggtccggacgcttccgattgaactgcgaggagctaacgggtcagacggaccgtgttgatgcccaggcgcggcaatcccggttccaggacgtgttcctcgactcggggcccgaccccgagatcccccgcgctgacggcattgacctcctgagtgtcacgacgaccatggaggctggcgttgatatcggctccctgtcggcggtcgtgcttgggaacatgccgccgacccggttcaactaccagcaacgggtcggccgggccggccggcgcggaacgccggttgccgtggcactgacggtctgtcgcggtcgcagccacgacgagtactacttcgaccagccgcagcggatcaccaacgaccccacgcctgagccgtacctggcggcgggtcggcccgaaatcgtgagccgctcactgaactccgaaatcttgcgcatggcgatgccgacaatcggcgatgctatcgtggcagacggtggcagttgggagcctggcgtcaatgtccacggaccgttcggcagccgtaccgcgtggaacgacgtcggaccccggctggatgcgtggctcgccagcaaccagccagccattgacgaggcggcagcctcactgaccgatcggacgtcgctcgctgcccgggccgctgaattggcggcggcgtgcgtggcacagctgccggagcgaatcgccgaggcggtcgcgtcgcccggcgatgatgctctcagccagctgctggcagagcacggcgtgctgccaatgttcggcttcccgacaagcgtccggtacttgtacctcgaccggccacgctcgaactacccatggccaccgtccaaggtgatcgaccgcgatttggccatggcatcgagccagttctcgccgctcagcgaggtcgtgcgagacggccgggtttacacgtcggtcggcatcgtcggcttcgagccctccggtaaccggccccgtactgtcggcgaggcgcttggcgtgagccacgagatctacctgtgtcggtcgtgttcgtacctgacgtccgaagacctgaacggacaatcgacctgcccgcagtgcggcaacggcccggagggtttcgcgcggttcccgcttcgcgagccaaccgggtttcgggctggccgtcgcccgcacgacttcgatggcaacttctcgtggtccgcgcgggcaatggctgcgcgagcgttcgcggacctgtccaagctcgacccgggtcaggacggcggcgccgttgcctactcgggcaccggcatgcggtacgtgatcaacgacaacggcgggcggctgttcaacttacggcgagcagcggacacagcgccgttctggggcggctacgtctccgtggaggcgctggataaggacgaccgcaaccttgtcggcccgtgggatgccaccggcgacgcgttcagcgccgcgctcggttcggttcgcccgaccgacttcctgttcgtcggtgcggagaagaacatcatcgccgcccagcaattgcggctgaacttcctggccggatcgcagccgagcggcgctccggatcgttcggacggtcgccgcggagcatggtactccctcgccttcctgctgcgcaaggttgcgtcggccatgctggatgtcgagcctttggaactggtcgcgggcatcttcgcgggcgagtccgacggcgaacccgcgccctacgcgttccttgcggacagcctggagaacggcgccgggttcagcacctacctcggccaggacggcgtattcaagtccttgcttgatgaggtccagaagtacctccgccatctcggcgatccccagcacgccaccgaatgctcggcatcctgttaccggtgcctgcgcgactacggaaacatgtcgcaccacgccttgctcgattggcgactcgctggcgacctcctggaggtcctgcgcgagcggcgtctgaccatcgacgagtcggcgctggaacgagcactggcgaactggggacgcggctacgactcgactgctgtcccgggcgtccccggcgccctgcgcttcacacacccgcagctgggcgaccacctgctcgtcgccaagcacccgcttgaagcgaccgagaacatattgatgagcgaacgcctggcggacatcgccgcggacgcagaggtggcgtcagccggcacgagggcgacgctgttcgtggatgccttcacccttgatcgctcgccgggcatcgtgttcgagctgtgcaacaagatcgacgcccagccgtga

SEQ ID NO: 27876 - DNA, 990 bp, Mycobacterium canariasense
atgatggacacactcagctgcttagaaatctgcgcaggagccggcggacagtctctcggactagaacaagcaggtttcgcgcacgagctagcagtagagatcgagcccgaaccttgcgaaacgttgcggatcaatcggccgcagtggaaggtccacgagggtgatgtgcgcgagatcgacggtcgtccgtatcgtgggatcgacttgcttgcgggcggcgtgccttgcccgcctttctcgatcgctggcaaacaactcgggaaggacgacgagcgagacctgtttccggaagcactccgactggtgtccgaagccaaaccggctgcggtgatgcttgagaatgttcgcgggttgtcgactgcaaagttcgacgggtatcggcaatgggtcctcgacgcattggcttcaatgggttatcgcgctgattggcaagtgctaaatgccagcgattttggcgtgccgcagctacgaccgcgctttatcctcgttgctctcaagagcgcgtatttcgacagctatcaatggccaacaccacatgcaaaaactacgacggtcggtgaggtgctcaagcctttgatggcgagagacggctggccaggcgcggcagcttgggtgaaaagggcgaacgatataggcccaacgattgttggtggttcgcggaagcatggcgggccagacctcgggccgactcgagcgcgcgcggcttggttggaactcggagtcgacggcaggggcctcgcgaactccgggccagacgcaagtacgccgtttcatcatgtcccgcgcttaactctcgagatggctgcggcgatccaaggtttcccgaaggattgggtgttctatggacgaaagaccgccgcctataggcagattggcaacgcgttcccgcctcctgtcgccgcagccgtcggtgggagcattgcccaggtgctcgcggggcgacaggcaaaagcgcgccaaaacagctccttggtggcgcgcagcgcttga

SEQ ID NO: 27877 - DNA, 2112 bp, Mycobacterium canariasense
ttgcgcgacgaatatggccggatgcaagtgagcgtccactccgagaccgaggtgctgtcaggccgttatgcagaatggcagcagcgcctggagtcggcattcttcgatgaccacgcggacgagcccgtggtgctgtttgtcgatcgcgacgagctcacccggctgagtgcgcccgacgaggacggcgcgcgatctctcgccgcagcggtgcgggatcttgtcgatgtcggcagcacagcgcacatgtttgccaaggtcgaaatgctgcaaaactcgtggctcgccgccgggtgcgacggtcccccgccgacgttgccggtgctggccgtgagcgtgctggctgcgtcagaaatgcgccgggacagccagaacagcagcaactcgtactacatccggcttgccgaggttctgctgccggacggcaccgacagtgctgtccggatgctccggcagcgtctccgcgagggcagcgcattcctcccggtcgtcgcgatgtgggagtacctcgcggtctggctcgacgaagctgacggtgcgtacggcacctcaacggtgcgcggccacgaacgcgacaagcggcgcgggtatccgttgtcccagaccttggtgcggcgtagtgaacgggcagctctgtcccagttcttcgcccaggcgcggctgcggccgggtgacgtgccggcggccgagaccgtgttgagctggcttgagcggtggatgcgctaccgaagtcacgggctcagcgagcagttcgaggcggcccttggcgacgaggagcttcgtccgttcctagctcagttggttcatgacctggccacggcgtgggacggcaagatcatcacgcctgagggacttcgcccgttggatatccgcctagcagtcgatctcgacgatgctcgggcgtggtgggtcatcccgtccgtcaacgatgtatctgccgacctcctccggggcactgcgaatggcgtgccgttcgaggcgatcatcgcgaccgatccccacacctcgatgtatcacgccgagaacctcccggaggtcacgcggtccacgctcaccgccggattcactgcccgtggtgaccgagccgtggccgagttcgaaccgcggaaagtgttcgtgctgacgctcagcgctgacgcaggtggctgggtatccgtcgatgcaatccagccgtacgaggagcacgccttcatcatcgccgcggacgcggtcgcgcagatcagcgcagcggtcgaggcggcagccgacaagggttggcggcgacttccgggcgcgttcgcgcagcgactgatcggcccgggcttcgcggtgttcgaccgcttggtgttctccgaccaggaccggctcgatgcgctgctcaaggcactgcccagcacggtgtccgcgggcctgcggctcggtgccacgctgcgcccgcgtttgatcaaaggcctgccgttgatgcgccacctcaccaaccggctgtacctgtcgggcggtgagcctgacttgctgctccccttcgatgagacgccgcggatggtggacgtggcgctcgacaatcggcacggaaagctgaaggcatcgcttttctcggttccgttccacaacttcaccggcggattcaccgagggcgcgcacaccatcagcgccgacggtgaaaccctgaccttcgaggtcgtacgcacgtccgacgacgatcggatgccaccgggtaccggcagcatcgggtggtcacgcggtcatcttcaggaggttgagtcagcggagatctgcggggcgattacgactgacggcccgaccgatacgccggtcctcgctcgccgcggatcgatcgagagctggctcctcttccgcacgggccgcgtgctgccactggccgaccccccggaaccgaccgcactgcctgaactgcgtttcagcatgttcgagatcgcgccgcagggcgcggtgtggctggtacagaagcgcgcgactggctggtgtgcgatccggctgcaggcccaggagccggctttccagtcgctcgggccggatgagcaacgggtatggacggaggtctgcgctgcggttccgcacgctgacccgctctggcagttgtacgcacgggcatgggggcgggcacgtgggcgctga

SEQ ID NO: 27878 - DNA, 5262 bp, Mycobacterium fortuitum
atgaccacgacaccgatttcactcgccgaaggactccgggacgcatatctccggtacttcgacacggcattctggcttaatgacgagaccgtgatggatgagcgccgccgcctgctggaacagccgggcgcactcctggggcggctcatgattgagccgatcgttccctacacgaactcagccaagctgatcgacattggccaacaggcgggcttatccgctgaggttacggcagcggttggtgcggcgctttttccttcggttgctccagcggacctggcgttgcgtgagcatcaagcccagtcggtgctccaccatttccgggacggccgatctgaaggacggaatgtcgtcgtcacctcgggcacaggttccggtaagacagagtccttcctgctcccgttgctgttaagaattgcggctgaagcacggaggtgggaacgacaaccagcggcagactggtggtgggaagcgcaagacgagtggaaaccgttgcggggacccgaaggccgacagccgggtatccggggattgattctctatccgaccaatgcgctggttgaagaccagatgacccggctgcgccgcgcggtgcgggcactgcgcgaccaagatccgagccatccgatctggtttgggcggtacaccggcaacacgatgggtacggccacccgttcgcgcgcggcggtcgcggaggccgccgccgatctgcgcgggtatcgccgacagtacgaagagctcgtggaggcgcgtaaccgcggccgggaggtcgatctcagtcagtttccggatccgcggtcgggggagatgctcacccgttgggacatggttagccatgcgcccgatgtactggtcacaaactactcgatgctgaacacgatgatgatgcgccacatcgagactccgatgttcgagcagaccgccagctggcttcagagtagtgacgcgcatgtgttcacccttgttgtagacgagctccacctatatcgcggcacgcagggcagcgaggtcgcgatgattctgcgagcgctactacggaggctcggcctgacaccggacagtccccagctgcgcgtcatcgcgacatccgcatcgcttaccgactccgtagacgggcgcaagtacctggaggagttcttcggcctggaggggatgagctttacgatccaacccggtaagcagatctctctgaggaacccggcgcgcattgaccctgatgagcttcgggccggggcgatttcggcggtggagctgtcccacgccgtggcgcgggcatgcgaggatccggatgaagatcggcttcgagccaccgcggtcgacctcatcgcgcgccgcttgttccctgacaacgcggaggcagacgcgcttgtagcaatcctgctggagcaactcgcaacggctgacacctcgaaatccacagaaccggtgatcgcattgcgggcacatgccttcgtgcgcgtaccgcgtggcgtgtgggcatgcagcaatctgcaatgcaaaggcgttgggcggcgcgggccggatcgtcagattggccggatctacaataccccggtaacttcctgtaccgactgcggctctcgcgtcttggagctcttgtactgctatgaatgcggcgatgtgagccttggcggcttcgtcgtcgaccgcacgggaaacgaggtgctgctatcgccgacggctgtcaacgaggggcaagggggaaagccggtctttctgcggcccgcaaccgaattcgtgtggtatcggcctggtatcccgagtgaacttgccagctggactaaagacaaggtcgaacttgcctttgcgccgaccagctggaacccggcgctcggaatggcaatcgtcaatggcccaaaccccaccggggttaccctggtccataaaggcgcgggcgccgaggaccgcatcccgggcctgcccgatcgctgtcccgcctgtggttacgcccccaaaaacgctttgcccaagggcgctttccgcgccggccaggtttcatcggcgatccgggcgcatacgtcgggcgctgccgcggccacccagttgtacctgtcgcaactgatccgatcccttgcccaaggaaggcccggatctgagggagttgccgacgcgaagaccattgtcttcaccgacagccgagatgacgctgcacggacagcggccggcgtagcacggaatcatcaccgtgacctggtgcgccaggtgctacgccgtgagattgccactggccctgatgtctacgacaaacttgacgcgattgtcttcaatccttctggtggtgcggccgcgcagggttttgggcaagccgccatggcgcggtttaagcagaagaacggcatgccactcgatgacgccgatagaggtgcgctggagcaggctttggccacgctcggtagcgtcagatcggttggcttcgctgacatgtgccacaaggtcaccaatgttctggtttctctcggcgccaatcccggcggcccagaccccgagaatcagtggctggaggagtctgcgaacgcgcagacaccgtggtaccgggcatttgagccgccgcggccgcgtctatggccgacaccgccgaaggttcaggggcaagccaagctgaagtctgcgctccgcggttcggtcatcgacgcgacgttcgacagggcgcgtcgtgatctggagtctgtcggtatagcgctggtgcacgttgatggatggcaaacggtcgatggaccattgggcaatgaggcccagtatcaacttgtaggcagcgttctgcggattctcggactgatgggcaggactgaaggcagcacccgtccgggcgttcaagaaacggcggtgatgccgacagcgattcgccgtttcatagatgccgtcggtactcgaaacagtgtcaacgccaatgatttgcggcaacagctcgacgaaatcatgaacggtgaggcgatgcagcgcgcagtcgccggctggctgctgcgcactaccgcagtggacacatcgctggtattccagccaggtgaaggccgcatctggcgatgcggcagatgcaactttgcccacctccacgagagtctcggagtgtgcgccaatcgacagtgtcatgcgccggacttgacgctcacgctggtgatgggcgagtccgactactacgcatggctggcgcatcaagagccacgacggttggccatcgccgagctgacagggcagactaaacctcttgccgtgcaacgtgaccgccagcggtggttcaagggtgcgttcacacctgctgagaacgaattgacgtacgagcttgatgtcctgtccgtcacgaccaccatggaggtgggcgtcgacatcgggtcgctgcgatccacgctgatggcaaacatgccgcctcagcggttcaactatcaacagcgtgtgggccgtgcgggacgcgcgggccaggtgctgagttacgcggtaacgatctgccgcgaccgcactcatgacgagtactacttcaaccggccggagcggatcacgggtgatgttcctccccagccgttcctagacttgggccgaaggcgcatcgttgagcgtgttgttgccagcgaatgtctctacgaagccttcgcatcactgcggcaggggcccaagtggacgccaaacagcaaccatgggacgttcgggcagatcaacgagtgggccgactatcgcgatgagatcgcggcatggttatcgaccgccggtcaggtcgatgccatcgtggaccggctcaccgcgcatacccccttgccgcgtcatgaaattgagaccctcagggacagtattcggcagcagttggtcccgcaggtggactgggttgtcgagaaggagaaagaatcaacggacacggagttgagcgcggtgctggccaggtacggtgttgtgccgatgttcggcttcccgacacgcgtcagaacgctctggggacgctctatcaccagcaggtcgggcatgcaggactacgcgatcagcgatcggtcgctcgaactggctgttcggagtttcgcgcccgcagccgaggtggtcaaggacggactggttcacacagtggcggggttcgccgcgtataagccgatgggcaacaccgtcagagctgtcgaccccctgggcactcccagaatcgttgggcgctgcgggcattgcgaacgtatggaactcagttcggacttgatctgctcggtatgtggcaaccctgaacagcgcgtcgacctgtatgagccgcgaggtttccgcacgaactatcagccgcgggctttcgacgacgatcaagaggtgctgagcagtgtgtcaccgccaagcctggttccggctggcgcacccacaagcacggacgaggcgatgaacctcaggctggagctctactcccagagccagctcgtctcgatcaatgacaactttggtcgcggctacgtgtttcgtccgcaaggagacaacaccgtcctggcggacaccgcgccgtccggcgccagccccatgaagacgatcggtgaggtcagagtgaccgatgccctcctcatcactcccacacgcctggaagttgggaccggttctgtggcgctgtatgacatcccgtcaggccgcgccgcctacacctcgtttgcagaggtgttgaggagagccgcacaggcgtgcctagacctcgaccccgtcgagatcactgccggtgtcctgccactgcgactgccgatctgcctcgaggacggcagccaacagggcacccaggtgggaggggcggtgttcctggcagacaccgccgaaaacggagccggttacgcggtcgagctggggcgcaccgagctgttcgccaccatgctcaagagtgcattggacgagctgagctcggtgtgggaacagaaagagcatgcggagaactgcgacacgtcctgcccagactgcctgcgctcctacaacaatgcgcagcggcatgcgctcctcgactggcggctggcgctcgacgttttggaactcgtgatcggggaaccgttcaccgcatcccggtccctcccaacgtgtggcgaatggatggatgccgcagcagcagccctcaacggttcgtcgaagatcgaattcgacggagttccggcaattgcccgtcgagacaagtgtgtagtgctgtgccacccgctgtggaggcaggaggagcaattcttcagcaagctacaacgctcggcggttgaagcagcccgagggcagtacgcacacgttgtgacccacgatctaagggagtttcggcggaacccaatctctatttggagatacctccagtga

SEQ ID NO: 27879 - DNA, 1296 bp, Mycobacterium fortuitum
atgaccgaccttagcgtcgtcgagatctgtgctggtgctggtggtcaatccctcggtctgcatttggcgggattccggcatcggctggccgtagagcttgacagtgacgccgcggacacactgcggcgcaacttagcccgactggcaaagaaggccggcgagccccaacccgacatcgccgtcggggacgttgcagatgaggctgtctggcgacctggcgattacaagggaatttcactcctcgccggtggcgtcccctgcccacctttctcgatcgctggccagcagaagggcgcaaccgacgagcgcgacttgtttgcgtgggcggtcgaggccgccggccagatgatgccgaatgcggtgcttttagagaacgtgcgagggctgtccctgccccggttcgccggataccggcaagccgttctggatcggttctctgaactggggtatcgcgccgattggcgtctgctcgaagcgaaggactatggcgtaccgcagcttcgacctcgtttcatcctcgtcgccctcagagaggagttcgctccctacttcacctggcctgagccgacgccggctgtccagacagtgggggcggctttgtacgacctgatggctgcgaacggctggcctggggctgaagcatggtcagtgcgggcaaatcgagttgcgccgacgatcgtgggcggctcaaagaaacatggaggccccgacctcggccccacccgcgccaagcgcgaatggcgtcagctcggcgtcgatggtctcgggattgcggacgctgcgcctggcccagatacgcccattaaccacgtgccacgcctgacaaatgcgatggttgcccgtctgcagggatggtcggggccgagcttcgagtgggatttccgcgaccgaaaaggcaagaagaccacgacgtaccgacagatcggtaacgcgttcccgccgccgatggcccgtgcgatcggcactgccatcgtggctgccctccggatggagggcgagcccgtcggaacacatgggaccgctgagacttttcacgacgaggtgtaccgcgtcctgaaggctaaggaatccttcatgtccattaccgggattagccgtgccttgggcggaacgatgagccgcgaagagatcgaacggcgcgtcgagttcatcaagcgtgacttcgaggtcgaggagcggaccagggcgggtgcgccgacctaccgactgggctcgtggcgagcgtttcgcggacaagacgaccacgagcgacatctcgcgtttgccgaacgtcggcttcgttcacgagtcagctga

SEQ ID NO: 27880 - DNA, 3258 bp, Mycobacterium fortuitum
atgcctgacacggcgaagaactccgacggcatgcttgatcggccgccaggccacagtctatccggacgttcgagttcgcagtggcgccggtcacactgttgtcggaccggtcaattatcctctggcaaagttcactcatctgtcgggagggggttcggaatggtggccgaaggacgtcgagttgcgggcagcactggccattccgctgggggcgtgacgcagtcctggtcgcagtaccttttgtggaaccaggccatcgccgatgtgatctaccctgcgaccgagaatccagggcccgcatacatggacctggaggacgaggaactcgagaagatcgccgctgcggccggctactccggctcgaacattgcagttgaacttgcgaatgccgtgcgggcggtcacggtcggctcggaaggcaagttctccctgcagatcttggacactcgcacccggggatgggctgtgcgcaacctaaagaagtcgagtgtggagccgccgccgtgtctggcgttcctggctgttacggtgctggcggccgaggagatgggcagcgatgaggatctggcggccaatgcctactacgcccggctggcgcggctcttgcagctctcggacaaggacaattcactccgaaatcagtactcgcggcatgcggagtacttgtggcgttgcttgaatcggtggcttgaagacctcgatggcatccggggtctgccgacggcgtatgcgctcagctaccggttcgtcggtctgccgatgtcgcaggcactggtccgtcatcacgaccggcgcaagtttccgtcgatgttcgctcagtacggtctgagtgcgggaatgagattggctccagaggacctggttcagtatctggatgcctggctgacaagcgaggggacatcgggcacagccaatctacgcaaattgtggactcagccggagtcccacgacaggctcgcatccattgccgcagtcgagttggcgaactgggacggcacagtcggttccgagatcgccgtgactttgagttcggtaggcgctcgtgcggtggtggtggcgaacctgcggactgggttcatgggggaatccctggatctttttctggggttgcgcccgctgaggagcgacatgggtggctccatggaggtccgcgcagtcaacggggcgtggctctcgttgggattcgctccaggcacggccggactctggcgaacggcttacaccgaggtgatcgattttcgatcgatgctggacggtgtcgttcaggtccgccacgcgggtgacgatcaaagcccgatctaccgccatcctccccggatggtgatgcccctcatctacgacgaactgcagtcggggttcgtcgaagcggaacggctacagcttggtgtcgacgcgctgctgctggtgcggagtgcgggcaccagcaggctggccgtcggcgccgtggaggaagtcgaaaacatccttcggcagttcgcccgtcctggttttaggaaggtggaatccatctcgggcctgcccgagggatgggtgcttttcgccgacgtgcaaatgttcggagcgccgtccgcatccaccaggttcaacgaactcgtcccgatggcccgcaatcagctcacgattgcgggagggttgcgaatcccatcccggatccggaagtggtcgagcctgagtccgccggagattcgtgcgacagcgcagagcgacactcacctcaaagtcgtactgagtggagctttgggggaaatgaagattgccgaatgctcttcggattcaggtgctttggtgctttctctggaagaactcttactgccagaagacgactatcaggtcgccttatactgcggtaaccggaccacgccggttcaacaggcgacagttcgactacgctctagcaacaacgtcgatacacagtgggatgatgcgccgaggctcgtctattccctcgctagtccgcttggcgtcctgagtgcgacggagggcgatgtcggcgatcgattcgtcgacgggctgaatacagagggcacttcgaatgtgccccttacgaatagtgcgaccgcgaagatcacttggactgagcccaaggtcgctgtctcgcctgaaaaggtcgagatcggcagcccagaccccaagtcgtgtgtcgttaccggagcccaccgcatccagctgccccccgccctaggaggttgggctccgaagttcattcacggcgaatgcacttcgtgtgggttggtgaaaaggtaccccggctggctgcccagttctggagcacgccgacgagtcggcggactgcaggccgtgggtgatgcgcccacagttcgcgtcgaggaattaaaggaagtccacgaccacgatgtgaattgggacgctgcactggacgctctgatgcatctcggtggtggatctatcagctcactgcagtcgattgcgatgcaactcgagggctccgccctattcgttgacaactttattcgtgcgatggaaacgcttgggcacgtgtcaatcgaacgtgacgagcgtggactcccgacacggtgggagatcgctccatcctgtctcgggcagcgggcagacggtgcattccgcctcagtgggttctggccgaccgctatgcgccgagacctcgaagggtttgcagctgcgagcgggggagagttgatccgcaagcggtacgcgaggaatccagagtcgacgattttgaggggggtgactgatgacgccgccgaggagttcacggtcgatgctccggtcactgtagcggtgcagtccggctggtcgattcttcaggtgctgcccaggctgtcggaggtgggtgccgcgctgcttagatccaccatgcccggcttccaaacggcagcgcggttcgatctggcgtcagcctgctggacaccaacgagcgacgttcacaagagcggcgcgtaccgcatccgtcgtggtttcgagaccctctacgtctaccgttcggatgcagacgttgacaacagcacggccgcgatcgcgcccgtgcatctggtcaagcatctcgctgcaaacgatcgtgggaagtcactcgtcagctatcacgagaagcaggagttggtgatcctgccgcaagggtgcgatctaccgggtctgtttgggcgtgcggcagtcgcaatggcgggccgccttccggtctcgaaagatgtagcggtgaaaggtcgtcaacgaaagtgcctcatataccgcgatattgaccgaacaagcgccgatcttcttgtcactctcctttcgacgtaa

SEQ ID NO: 27881 - DNA, 5262 bp, Mycobacterium goodii
atgactataactccgatttcactcgccgaaggactccgggacgcatacctgcggtatttcgacacggcattctggctcaacgacgagtcggtgatggaggagcggcgccgtctgctggagctgccgggtgcccttctgggccgcctgatgattgagccgatcgttccctacgcaaactcagcgaaactgatggaggtcggccgcgaggcgggtctgactgccgaggttacggcggcggtcggtgcggcgttgttcccctcggttgcccccgaggacctggcgttgcgtgaacatcaagccaagtcggtactgcaccatttccgcgatggccgatccgacgggcgaaatatcgtcgtcacctcgggcacagggtccggtaagaccgagtccttcctgctcccgttgctgttgagaattgcggccgaagcgaagacctgggccccacagcccgccgaagactggtggtgggaagctcaggacggttggaaaccgctgcggggcccagaaacccggcagccaggcatccggggattgattctttacccgacgaacgcgctggtcgaagaccagatgactcgcttgcgccgcgcggtccgcgtattgcggggcaaagacccgcgccatccgatttggttcgggagatacacgggcaatacgatgggcaccgcctcacgctcgcgggcagcggtggcggaggccgccgcggacctgcgcgggtatggccgtcaatacgaagaactcctgaaggcccgtgaccgcgggcaggatgtcgacctcagccagtttcctgacccgaaatcgggcgagatgctcacccgatgggacatgattagtcacgcgcccgatgtgttggtcaccaactactcgatgctcaacacgatgatgatgcgccacatcgagactccgatgttcgaacagaccgccagctggcttcggagcgatgacaggaatgcgttcacactcgtggtggatgagctccacctgtaccgtggcacgcagggcagcgaagttgcgatgattctgagagcgctgcttcgacggctgggactgacgccggacagtccccagctgaggacgatcgccacgtcggcgtcgctcaccgactcctcggacgggcggaagtacctcgaggaatttttcggactggcgggggagagcttcaccatccaacccggcaagcagatcccactcaatcccccgacgcgaatcgacccggatgcacttcgcgctgggacaatctcgccagcagagctgtcgcatgcagtagcggcgcattgccacgatcccgaggaagatcggcttcgggctactgctgccgacgtcatagcgcgtcgcttgttccccgacagcggtgaggcagactcacttttcgagaccgtactagagcaacttgctgcggccgacaccgaaaaaacacaggagccggtgatcgcgctgcgcgcacacgcattcgtgcgggtcccgcgcggcgtgtgggcatgcagcaaccctcagtgcaagggtgtcgctcagcgggggccggatcgccgcgttggccgcatctataacacccccgtcacctcgtgcatcgactgcggctcacgagtgctggagctcttgtattgctacgaatgcggtgacattagcctcggtgggttcgtggtggcgcgtacgggcaacgaggtgttgctgtcaccgaccgcaatcaatgaggctcagggcggtaagccggtctttcttcggcccgcagacgaattcgtgtggtatcggcctgggattcccgctgaactcgctacctggactaaagacaagattgagctggcattcgcccccacaaactggaaccccgcgctgggaatggcaaccgtcaacgggccaaatcccactggggtgaccctgcgcttcaagggtgcgggggccgaggaccgcataccgggcctgccggaccgctgcccagcttgcggttacgcgcctcgaagcccactgagtaagggcgctttccgtgccggccaggtctcgtcgacgatcagggcacacacttcgggtgctgcggctgccacccagttgtatctgtcgcagctgatccgatcccttgccgagggacggtctggcactgagggtgttgccgacgcgaagaccatcgtcttcaccgacagccgcgacgacgcggcacggacggccgcgggcgtagcgcggaaccatcatcgtgacttggtgcgtcaggtgctgcgccgagagatttccactggccctgacgtctacgacaaactggatgcgattgtcttcaattcgtcgggcggcgcggccgagaagggctttgcacaagccgccatggcacggttcaagcagaagaacggcatgcctctcgatgacgctgacaaggcggcgctggacgaggcgctggtaaagctgggcagtgtcaagacggttggcttcgccgacatgtgccagaaagtgactgacgtcctggtttctttgggcgccaatcctggcggcccggatcccgacaaccagtggctggaggactccgcgaacgctcaaacaccttggtaccgggcgttcgagccgccgcgctcgggtctgtggccgacaccgccgctggttcaagggcaggccaagctgaagtctgcgctccgcggttcggttatcgacgcgacgttcgacagggcgcggcgtgatcttgagtccgttggtattgcgctggttcacgtcgatggatgggcaccagtcgacggcccgctgggagaagaagcccagtatcaactcgtcggcagcgtcctgcgggtcctcggactaatgggcaggacggaaggcagcagccgcgcaggcgtgcaggaaacagcggtgacgccgccggcaatccgccgcttcatcgaagcagttgccgctcgaaacagtatcgacgtcagtgaattgcagcatcagctgaatgcaatcatgaacggtgaggcgctgcagcgtgcagtcgccggctggctgttgcgcaccaccgcagtggacacatcgctggtgttccagccaggtgagggccgaatctggcgatgcaaacggtgcaacttcgcccacctccacgagagcctcggagtgtgcgccaatcggcagtgccacgcgccgcacttgaccgtcatgccggctactgacgagaccgactactacgcctggctggcacaccaagaaccacgccggcttgccatcgccgagctgactggccagacgaaaccgcttgctgtgcaacgtgaccgccagagatggttcaagggtgcgttcacgcctgccgagaacgaactgacgcacgaacttgatgttctgtccgtcacgaccaccatggaggtcggcgtcgacatcgggtcgctgcgctctacgctgatggccaatatgccgccccagcggttcaactatcaacagcgcgtcggccgtgcgggacgcgcgggccaagtgctgagttacgcggtcaccatctgccgggaccgaactcacgacgagtactacttcaaccgcccggagcggatcaccggtgatgttcctccgcagccgttcctggacttgggcaggaggcgcatcgtcgagcgtgtcgttgcgagcgaatgtctcttcgaagcgttcgcgtcgctgagacagggccccaagtggaccccgaacagtaaccatgggacgttcgggcagatcagcgagtgggctggctaccgcgatgagatcgcagcatggctttcggttgctgatcaggtcgacgccatcgcggatcgactcactgcgcatactccattgccccacgaccaaattgaggcgctcaaggacagcattcggcagcagcttgtcgcgcaaatcgactgggttgtcgagaaagagaaggactcaacggacacagagctgagcgcggcgctggccagatacggtgttgtgccgatgttcggcttcccaacacgcgtcagaacgctctggggacgctcgatcaccagcaggtcgggtatgcaggattatgcgattagcgatcggtcactcgaacaggctgtccgtagtttcgctccgtcagctgaggtggttaaggatggactggttcatacggtggcgggattcgctgcctacaagccgatgggcaacaccgtccgagctgtggacccgctgggtactccgagaatagttgggcgctgcgggaactgtgagcgcatggaactcacttcggacttgatctgctcggtgtgcggcagtcccgaacagcgcatcgagttgtatgagccacggggtttccgcacgaactatcagccacgagccttcgacgacgatcaagaggtgctgagcagcgtgtcaccgccgagcctggttcccgccggcgcacccacaagcgcggacgaggcgatgaatctcagtctggagctctactcccagagtcagctcatctcgatcaatgacaactttggacgcggctacgtcttccgtccacagggagacaacaccgtcctggcggataccgcgccacccggcgctagcccgatgaaaaccattggtgaggtgcgtgtgacagatgctctcctcatcacccccagacggctggagatcgggaccggctccgtagcgctacatgacatcccttcgggccgcgccgcttacacctcctttgcagaggcgctgaagcgagccgcgcaggcgtaccttgacctcgaccccctcgagattactgccggcgttctgcctctgcgcgtgccaacatatctggaggacggcagccagcagggcacccaagtaggcgcggcggtgttcctggcagacacggctgagaatggtgcgggttacgccgttgagctcggccgcacagaactgttcaccaacatgctaaagaaggctctggacgagcttcgggaggtctgggagcgcaaagagcacgcggagaactgcgacacgtcctgcccagactgcttacgttcctacaacaatgcgcagcggcatgcactgctcgactggcgcttggcgctcgatattctggaactcgtggtcggggagcaactcacagtatcccggtccctcccggcacgcggtgaatggatggacgctgcagcggacgctctcaacggctcgtcgaagatcgagatcgacggtgtccccgcggttgttcgcgaggacaagtgtgttgtcctgtgccacccgctgtggaggcaggaagagcacttcttcacgaaattacagcactcggccgtcgagctggcgcgaggcaaatatgcgtacgttgccactcacgatctacgggagtttcgtcggaacccgatctcgatctggagatacctcaaatga

SEQ ID NO: 27882 - DNA, 1296 bp, Mycobacterium goodii
atgaccgaccttagcgtcgttgagatctgtgctggtgctggcggccagtccctcggtctgcacttggcgggattccgacatcggctggccatagaactcgacaccgacgccgcggacaccctgcgccgcaatctcacacggctggcgaagaaggccggtgatcccccgcccgagatcgctgttggcgatgttgcggccgacgctgtctggcggcctgaggattacaagggcgtgtccctactcgccggtggtgtcccctgcccgccgttctcgatcgcgggccagcagaaaggcgccaccgacgagcgggatctgttcgcgtggtcagtggaggccgccggacgcatgatgcccgacgcggttctgctggagaacgtgagagggctgtcgatgccccggttcgccggctaccggcaagctgtcctcgatcgctttgctgagctgggctaccgggctgactggcggctcctcgaagcgaaagattacggagtcccgcagcttcgccctcgcttcattctcgtggccttgcgcgaagagttcgctccctatttctgctggccagaagccacgccgtcagctcagacagtcggcactgcactgtacgacctcatggctgcaaacggctggccaggggcggaggcgtggtcagagcgagcgaaccgggtcgcacctacgatcgtcggcggttcaaagaagcatggaggaccggacctcggtcctacacgggccaagcgcgaatggcgacagatcggtgtcgatggcctcggcatcgctgactcggcgcccgggcctgagcatccggtgagccacgtcccgaaactgactaatgcgatggtggcacgcctgcagggctggtctggcccggctttcaagtgggatttcggtgagcgcaaagggaagaagaccactacttataggcagatcggtaatgcatttcctcccccaatggctcgcgccatcggcgcatcgatcgcagccgccctccgcaaggagggcgaggcgaacggaactcatggtacggcggaaaccttccacgatgaggtgtaccgcgttctgaaagaaaagggttccttcatgtcggtcgccggcataggtcgtgctttgggcgggtcaataagccggaaggaaattgagcggcggatcgaattcataaaacgcgatttcgaagtagaagaacgcagtcgtgcaggcgcgccaacctacaaactggggccgtggcgggcattccgtgggcaggacgaccacgagcggcacctcgtatttgccgagcgaaaacttcggtcgcgcgtcagctga

SEQ ID NO: 27883 - DNA, 3096 bp, Mycobacterium goodii
atggcggtcgaagctcagcgaaatgtgggcggcgcggtgtatgccgtcggcagcgtaactaaggcctggtcgcagtaccttttgtggaaccacgccatagccgatgtaatctaccctgccgccgaaagtccagagcctgcttatatggacctggaggacgaggagcttgagaagatcgccgcggcggccgggtactccggctcgaacattgctgcggagcttgcacgtgtcgttcgcgcggtcacggtcgggatgggcggcaagttctcgctgcagatattggacgctcgtactcggggatgggcagtacgtaacctgaagaaaccgagtgaggagccgcctccgtgcctggcgttcctcgcagtcacggtgctggcggcagaggaaatgggcaccgacgaggaccttgcagccaatgcctactatgcgcggctggcccgcttgttgcagctaccagacagtgacaattcgctgcggaatcagtactcgcggcatgcggagtacttatggcgctgcctgaatcggtggctcgaagacctcgacggcattcggggcctgccgacggcatatgcgctcaactatcgcttcgtcggtctgccgatgtcgcaggcactcgtccgccatcacgaccggcgcaagtttccgtcgatgttcgtccagtacggtctgagcgcgggtatgcggttggctccagaggatctgatccagtatctggatgcctggctgaccaccgaggggacatcggcgacagccaacctacgcaaattgtgggctcagcaggagtcccacgagcggctcgcgtccatcgctgcagtcgagttggcgaactgggacggcacattcggctcagagatcgcagtgacttcgagttcggtcggcgcccgtgctctagtggtggcgaacctgcggagcggtttcctaggggaatccctggatctctttctagggctacgcccgtacaaaagcgacatggatggctccatggaggttcgcgcagtcaacgggacgtggctcccgctgggattcgcgcccggcacggccgggctctggcgaacggcttacaccgaggtgatcgactttcgttcgatgctggagggtgtcgtccagatccgccacgcgggcgacgatcaagggcagagctatcgccatccccctcgaatggtgatgccgctcatctatgacgagctgcagtcggcgttcgtcgaggcggaacggctacagctcggtgtcgacgcgctgttgctagtacggagcgctggcacaagcaagttggccgccggagccgtggaagaggttgaaggcatccttcggcagttcgcgcgtcccgggtacaggaaagtggattccatctcgggcctccctgagggatgggtgctcttcactgacgtgcagctgtttggcgcgccgtcggtatccaccaggttcaacgaactcgtcccgatggcccgcaatcaactcacgatcgcgggagggttgcgaatcccatctaggatccggaagtggtcgagcctgagcccgccggagattcgtgcgacagcgcagagcgacactcgcctcaaagtcatactgagcggggccttgggtgaagagatgattgccgaatgcacctcggattcaggtgctttggtgatttccctggatgagctctcactcccagaagacgattaccaggtcgccctgtactgcggtaccaagaccacaccggttcagcaggcgaccatacgactgcgctcaagcaacaacgtcgacgctcaatgggacgatgcgccgaggctagtctattccctcggcaacccgcttggcgtgatgacggcgagtgagaacgatcacggcaatcgtttcgtcgacggccttgctgcagaaggcacttcagatgtagctccttcggaaagtgcgaccgcgaagatcacctggagtgagcccaaggtcgctgtttcgacccaaaaggtcgagatcggcagcccagaccccaagtcgtgcgtcgtcactggagcccaccgtatccagctccccccagcactcggagggtgggcacccaaattcatacagggcgaatgcacttcgtgtggattggtgaaacggtatcccggctggcttcccaaaaatggacagcgccgtgccggtgcgcaacaggctgtggacgatgcgcccacagttcgagtcgaagatctgcaggacgtccacgaccacgatgtcaactggggcgcggcactggatgccctgatgcatctaggcggggggcccatcagctcgctgcagtcaattgcgatgcagctcgaaggttccgcactgttcgtcgacaacttcattcgtgcgatggaagcgctgggacatgtttcaatcgaacgcgatacaacatggcacccgacccgctgggaaatttctccgtcgtgtctcagtcagcgggccgacggtgcgtttcgtctgactgggttctggccgtccacattgcgcagagacctcaaggagttcgcggcggcaagcggtggagaactggtccgacatcggtcggcgggaaatcttgagaccacgattctgaggggtgtggctggcgagacggccgaggagttcgcactcgattccccggtcgccgtcgccgtgcaggccggctggtcgattctccaggcgctgccgaggctgtcggaggtgggtgccgcaatgcccaggatcaccatgcccggcttccagaccgcagcgcgattcgatcttgcgtcagcttgctgggtgccaacaagtgacgttcacaagagcggcgcttaccgcatccgtcgtggcttcgaaaccatctacatctaccgttcggacgcggacgttgataacggcacagccgcgatcgcacccgtgcacctcgtcaaacatcttgccgccaatggtcgcggcaagtcgctggtcagctaccacgagaagcccgaactggtcatagtgccgcaagggtgcgacctcccgggtctgttcgggcgtgcggctgccgcaatggcgggccatctcccagtcccgagagacgtaccattgaaaggccggaaacgaaagtgcctcgtatacagggctattgaccggccatccgccgatcttcttgtcactctactttcgacctaa

SEQ ID NO: 27884 - DNA, 5469 bp, Mycobacterium novocastrense
atgctgtctgatcagaagccagatctggcatctagtttcgagaacttgcgcgaggcgttctttcgctactacaacacgccctttggactcgctagcgaagagctacagcgtgaacgccaagcgcttctcgaccgtgacaacggcatctaccgcatgccacttctcgagctgcggcccgagtacaggacgactggccggaacttgcgcgactcggcggtcgaagctggcttgagcacggacatcgccgatttcgctgctacgggcctgattccagctggtcgacagctttatactcatcaagagctatcgctgaggcatgcagcgggctcaaaccgaaacatcgtcatcaccgctggcacaggatcaggaaagaccgaatcgtttctccttcccattctcgcgtcacttctcgaagaatcgaagcgatggacggggcatcggggaagcttcgtaaactggtggactggcgaagacgacttcatttcgcagcgcagcggagaggtcggccggacggcggcggtccgagcgatgatcctctacccaatgaacgcgcttgttgatgaccaactcatccggcttcgaaaagcattcgacagtaacgaatcacgcgcttggctagaccagaatcggctggggcatcgcttctactttggacgctacacaggagcgacacctgttacgggaagccctaacgattcccgtgccgtaggcgacctccgacgatacttgcgtgcgactgagcagcgctcgcgacgagctcaagagatcggcggcgacactcaatactttgtgccccggctcgatggttcggaaatgcgtagccgctgggacatgagcgacgccccgccagacgttgttatcacaaactacagcatgttgaatgtcatgcttctacgatctcgagatcagcagtttttcgagcgtacgcgagcatggctcgatgaggacgcctccaaccggttcacactggtgatagacgagcttcacacgtaccgcggaacagcgggcacagaagtagcattgctcataaggaacttaaggaaccgcctcggcctaattgatcagccggaaaagctgcgcgtacttgccgcctcggcgagcctcgatcccgttcgagaccgcgcgtatattgagcagttcttcggtcttcccgaagagagcttcgacttccttccaggggaactcataaagccgcagaggcagcactccgacatgagtgaggcagctaagattctcgctgaagcgcacaacgggcattcagctctcgaagcagctgaatctgtaggcgctcaggacgctttgcacgcagcgtttttcgaggaaggggctactgaggcgcccaaggcgttgacccaggccgaccttgccgagaagctctttccacgaaccgaaggtgcggtggcttcagatgcgctatctagtctccttcgagccctcgcacacagcgaggggcgccccggctggccacgactgcgcgcccacctcttctttagaaacgtccccgggatatgggcctgtacggactcgcgtcggcacagcgagtcgactgaagacgaaacacgctcagtagggccgctatttgacgagccagtcacgagatgcggttgcgggtcccgggtcctcgaacttctctactgccagaactgtggcgacgtcatgctcggcggattcgtccaagccgggatcacccagtccgaaagtttgagcgcgatgatgctcgccgacgtgccagaactttcgaagctcccagaccaagtctccctggagcgaacagcggacaattacatcgtctattggcctcggaccaatcgccccgagctcgacgagctcgcatggaacgcggacagcggaaacgttagatacgagtttcggcgcagcatcttgaactcagcaaacggcgaagtcaagaatgcgaagcagggtaagaaccatacgggatggaccttccatactcgatcaaggatggacagaagcggaaaaccgaagcgcgatccaaaatcactgtctccgttcccaactcaatgtccaaactgcggagacgactgggagattaagtacaagggcgggaagctactccctcatactgacccatggaggcaacgaagccccatccggggcatgcggaccggtttcgaaaagattaatcaggttctggtcactgagctaatgtctcaactcccagagcccgaacgcaaggctatcgttttcaccgacagtcggcaggatgctgcgaagttggcagccggcatggggcttcgtcattaccaggacttgctgcgaactctgctctatgacagcttggcggaggccgaagactggccatccattgttgatctggcacgcaggctagtcagacaaggcgagaaatctgcagaaaacaaacaggcccgcgaccggctccgtgcgcgcgacaacgctctgtacaacaggttgaccgacctatggcgtggagaggaagacgaggcttattctggcgagactctccagctcgagaagcagctgtcggcgcctcagacgcttaagctgctcgccgacgacgttggagcgaaagcacttcagcttggggtgaatccgggcggtactcatgcctcccttcagtcgcggtacgacagggcgagaggacgccgcgtcgggtggtcgactttagtcaactgggagatcgagcccgtgtccgcgcggggtgggttagatgagtcggagaagcagtggtggagagaagttcaagagaaccttcataaagaagtaatcgacggtcttttctcaggagcaggccgcgatttcgagtcacttggtctcggatggctcgcattgacgaccgacacgtcggacatcaccatcgaacccacatcggcagcagcgttggcgcgctcgagtctccgagtactgggagatgcccggcggttcttcgggttgcgggacccccgagataagccaccggtgaagctacgtctgttctgggaagccgtcgccgacgaacacaatcttgactacagcgagatccaagaagcggtgctgacgcactggggcgacgcagttcgcgactatctgatttcaccagaacaggtcacattgagacgagcaggccagcaaggctggacttgcacgaactgccgtcgccagcatttgcatcgcggcacaaaggtatgcactcgctgccgacgccaattgcccgctgatcctgggtccgtaggtgcggcacaggattactactcctggaaggcgtcaacgggacagggacgcttccgcctaggggtggctgaactgacaggccagacagaccgcgtagaagctcaatcgcgccaatcccgtttccagaatgtcttcctagacggcgatgagaatagccgcgccgatggtctggatcttttgtcggtgacaacgacgatggaagccggcgtcgacatcggttctctagaagtcgttgtcctaggaaacatgccgccgacccgtttcaattaccagcaaagggtcggacgcgctggccgacgcacgtcgccgcttgcgacggcacttaccgtgtgtcgagggcgttcccatgatgagtactactttgctcgcccagaattgataactaacgagcctactccgaaaccatatcttgcgcttggccgtcaagagatcctcaggcggaccctgacctccgaggcgatgcggctggcctttgaagctgtgtggccgacggcaatcgaatcgcgcgttcttagcgatctcacgaacaattcgcacggtccttttgggctcgccgctgaatgggacgcagtgagctccgcggttcagacttggattgaagccaatgcggatacgttgcgtgatacagctcgtgcgctgacacgttttgcgcccaaacatgtctcggatgttgattgggcgcaatggctccgagaaacgctggtctccgcagtaactgagtgcgctgcggcacctactggacaccccgacctaagccaaagactcgcagaggccggcatccttccgatgtttggcttcccgtctcagacgcggtacctgtacctgagccggccgaaacacccgtacccctggccgccccgcggggcgatcgaccgcgacctttcaatggcagtttccacgttcgcaccgctgagcgaggtggtgagagacggcgaggtatttcctgtcgtcggcgtggcagccttccgtcccactcgaccagtccgatcggaggacgacccgctcggaccactccgttacgttgccgtatgtcgttcatgctcatatttgcatgaggcacctgacaacagaagcggcgatgagaacgaatcatgtcctcaatgcagcgagcccccgggcgtgtatcaatggattccacttcgtcagccgctaggcttccgtgccgggagtcccaaggactttgacggcaacttcgcgtggaccgcgcgagcgatggccgctcgagcgcttactgatctctcgaagctcgacgaggctcgccacggcgatgcactagccctaagtggtgccggaacgaggttcgttatcaacgataacggcggtcgactacaccggttccagcacaacgctccaggtcatacagcagattggggcggatatgtgtccgtcgaagcgattgagcacggcctccttcccggcatggccgggtcgggcgacgtcatgtcggtcgcactaggttcggttcaacccaccgactttctttttgtagggaccgagcgaccggtacgaccaagtgcgggcattcgcctgagccttgattcgctaggccttcaacctggtggcgcccgcgaaactggcgaaggtcgccgagctgcttggtactcgctggcatttcttctccgtacggccgcggcggcttaccttgacgttcaatcactagagcttgcagccggcatctacagcggcgtgctccgcgggaccccaacgacgatggcatttctcgctgacactctcgagaacggggccggtttcagcactcatttgggtaagcccgagatcttcgaagagttcctcgacagggggatccttaagtacctggaatcgcttagggcacccgaccatgcccttgagtgcactgcttcctgctaccgctgcctgcgtgactacggcaatatggcctatcacgctcttctcgactggcgattagcaggcgatcttctcaatgtcatgatcgacggtaccctggctccagatgtcgatcgtgaacgacagtctattgaacgctgggcggaggcttacggcgcagaagtttgcgatgacctcgagtgcgcagcagcgatattcgagtcgcccatttatggcgaatcggctgtgatcgccaagcacccgcttgaggcatcggagaaggcgcttatcgctccacggctgtccgattcgatggccgcgctcgaaggcaggcgctccggcgtagccgtggttttcgccgacacattcgttctagaccgcgacccgagccacgtactacagctcttcggcgaggcgcagagcccccgaccatga

SEQ ID NO: 27885 - DNA, 981 bp, Mycobacterium novocastrense
atggcgagccaactgagctgtctggagatttgcgccggagccggcggccagtcattggggctggagcttggcgggttcacgcacgagctagctgtcgagatcgcgcctgaggcatgcgataccctacggctcaaccggcctcagtggagcgtgcgcgaaggagacattcgagagctcgacggacggctttaccggggagttgatctcttggcgggaggtgtcccgtgccccccgttctctgtcgccggcagacagctagggcctgcggatgagcgagatctctttcccgaggcgctccgcctagtcgcggaagcgcgacccgctagtgttctgttagaaaacgtacgcggactatcgactaagcgatttgctccttatcgggcggcgatacaagcccagctcgcgcggctcggttatgagtcagaatggaagctcataacgtccagtgatttcggcgtaccacagctccgaccccgattcattctctatgcagcgagaaagcgcacctttgctcgatttcaatggccggatccgtcgcccaaagccacaacagtaggggaagtgctatatccgcttatggcgcgggacggttggccgggagctgcagactgggcacgtcgtgcgaactccatcggcccgacgttggttggcgggtcgaagaagcacggtggggcagatctgggtcccacccgtgcccgagcagcatggcttaagctcggcgtagacggcggaggcatcgctgatgcggggccctcaagggattcctcccacgaccatgttccgcggctgacgctacagatggtcgccgtgctgcaaggattccctcccgaatggtcgttctgcggcagaaaaactgcggcttatcgccaaattggaaacgcgctaccaccgcctgtcgctgccgccctcggtcgagccattttctcggcgatggagggccgcacatccgcttccacactcgccgagccccgctcggcgtag

SEQ ID NO: 27886 - DNA, 2109 bp, Mycobacterium novocastrense
atgggggagagagagccatcgggtcagacggagctgccagacgatcttgttcgctggcaggagttgctcgagcgcgccttctttcgtgagcgcgacccctccggccccttcatcctggacctcgagttgtcggacgagatcaggcagtggaccgccgaacaaaaccctagtgcccaactcggcagggtggtagccaggtacgtcgaccttgataatccgcttgatgtcttcggcccgcttcggtcggtctggcggaaatgggcagtcggcgaccgcaggaaccctccgccaaaccttgcggtcctggcgctcaccgtcgcagccgccagtgagatgcatcgggacgaatccgccgtcagtcatgcctactactaccgcctagcccagctggttgcccccgacgagtcccacgagagcttggaggcgctgcgtcagcggctagcggaaagtttcgacctcgtagctcattggtggtccgagctgagcgattgggtcgacgccaatccacaggtcggtgtgaacactatccgcaagcatgatcgcttgacgcgaatcgggtaccccctttcgcaagctctacttcgccgctctgaccgcatgagactgacgcggtttttcgacagactcgatctcaggagccttgacgttccagaggaaggcgttctcctatccaagcttgagctctgggcagcaaccccccgagatttgtcaccgaccctcctctcggcgctgacagatccggctcgtcgccgagtgctcgcgtcgtatctccacaggctggcgcgggagtgggatggcgtcgtccttactcctgagggcgcaacgcaactagatatccggcttgccgtcgatctcgacgactttacgtcgcagtgggtgatcttcaagcatccgcagaagtcgcaagtcagtctagaagtgaatgacgaactggtggagctgacatcaggcgattacggcgccttctacaattggcaaggcccgatgccagctgtcgtcgcctggccctcgaagccgtccgtggtagtgaagggcacaggtgtcgcagggcgattcgcctttccaccgctgcagcccatgcgatcacatcccgacgtgggttggctgtctgaggacgacgtagaaccatatacgccccacattctgttagtcgcgccagtgtggcagaaccaaatcgagaaggtgctagatgctgcggctcgtcggggctggcgtcgcttgggacaacagcctggcgctcaactagtcgttgggcgccttatctacatcagggtagaaatagagaacctcgatgccttcaaaaacgctctcacgcagattgatccatcgctcgcgcgactattccgatcatccgcatgtttgcgtccgcgattagtgaacggactacacgtcttcaccgatttgggaaatagacactatctgcaaggcggcgagcccgacctcttccttcccgccggcgacatcccaagaacggttccagcagctctcgatggtatgcatcaagagcaccccttccaggcaacggggctcccgattcctttacgtgttataggccctctcaatgtgggcaagcatgtactcgaagtcgacggcgagacacttaccttcaacgtccacacgtctggaacagagccggttagcccgtcgagcacgctcggctggctgcaagtaggccggttacacgagcttcggagggttggtattgatgctgttggcgtaacagcgatttcaggagccatcgttaatggctcggctgccgaaccacacttcctgcgtcgcgctgggcggcagtactttgtcgtcgaccgccgcggcaccgccagcgcggtctctcctccgccaccaaatcccctcttcgaacaagcggggattccgaattcagccgtatgggaacttttggcgccagacgacgccgtttggctctttgaagaacgccacaacggtgaggtagcagcgcgtcggctccgatacgcggaacctttaatcagagatcttgactcgtattcacgtcacctttggacccgcgtctcggagcaactgcggggcacaaacccattgctagacatatatctgcgggcgtgggataggagtagtgcgcatgctcggtga

SEQ ID NO: 27887 - DNA, 5343 bp, Nakamurella multipartita DSM 44233
atgacgtttccaaccccgggccaggtcgagcgggaactaaagggtgcgtttctacgctacattgatacggcctacgcactccgcgatccccatcttgtctcggagcgtcgccgcctattgcttgaggggcaaggaaacctgttcggtcctcttatgctcgagccagttcttccgtaccaaggtgttcttgatctcgcgcaaagcgcggcggccgccggaatcaacgagcgcgacctaacagatgtggtccggtctgtcttcggcattgagcactcaaattcagtcatgttgcggcaacatcaagtgagatccctttgcgtacacttcaacacggggcccggccgaaaccctgtgattacgtccggtaccggatccggcaaaaccgaatccttcctgataccgctgttgactcgactagcggcagaaaaacggtccgcgtgcaaattggccagccctcatcattggtggagtatcgcatcacagaatgacccttggcggccgacccgtgcaactggtccgacagtggcagccatgcgtgcgatgattctctacccaacaaatgctcttgtcgaggatcaggtggcgaggctccgccgagcagtccggggactccgctctcaagacgagcccatcgatgtgtggtttgggagatacaccggtgcaacgccgggtagcggcaagcccccactcggacgggcgtctggacgagaggtatcagacgtcgcgaagggaatgcgggatctggtgcggcaaaatttgcttcttgccgaactggccgaccccgacctcatcagtcagttcccagatccgacagctggcgaattggtgacccgctgggacatgatcgccaccccgccagatctgcttgttacaaactactccatgctaaacgtgatgctcatgcgtgatgtcgaagagccgatcttcgaagcgactcgtgagtggctgactgcatcgaaggcccatgttttcacacttgtcgtagatgaattgcacctctatcgtgggagcacgggcgccgaggtagggatggtggttcgaaatctcgcctcccggcttggcttggattcagagtccgatcaacttagaataattgctactagcgcatcaattccaggcgatcattctggactcgactatctggagcgcttcttcggagtcggacgcacgacttttcgggtcgagcctggtgagcctaaggaactaagggcggtcgaagttccttctgcggtcggcatactttctatgagcagcacacagcgtatggctggcgcttcggcccagaactgggctgaagccgtcgcgacggtgtgcatcaacgagggtgagaacctgcctcgtgctcaaacgctcgaccagatcgctggtcgattgttcggtgacgacccggatcgcaacgcggcattagaggcgattctgggcactcttgccgacgtcgcgaagccctctgtacaatttcgtgcccacataatgatgcggggcatgagaggcctctgggcatgctccaattcaaattgcccaggggtcgtccctgagccaggtcgtcgagtcggcaaactctacgacacaccgcggtcaagttgcttggtcccaaagtgcggggctcgtgttctcgaactcttgtattgttatgagtgtggggacgtaagcctgggcgggtatattgtcgacaagatgggggatggcaccgtcgtactttcgacaaccccggttaaggcgggagacaatactggggatcttgtctatcgacgcactgacgacgaatatcgctggctttggataggatcaccggcacctgatgagccaataaggcatcagctgccggcctcagtgagcgaagaccgtgcgactattgagttcaatttcgtggaggccatatatgatccaggattgggatcgctaacgcccgcgagcggcccaggaaactgtgtgactatccgccacagcggctcggatttggacggggtggcgattccggcattgccggaagtgtgcccacgatgccatggccgtcagagcaatcgtgacttgtcggtatttttcgcgggctcggtgaggtcgccaatacgtgctcatacttcgggccgttcacagttgaaccagatggcggtttctcaactttttcgcagcttgggtcatgaagcatctgaatctcgtacgatagttttcaccgatagtcgcgatgatgctgcaaggatagccgcggggatctcactgaacaatttccgagatcaggttcgtcaagtcgttcggcagcttttgcacgatcgggtttcacccgtccccactctgcgggcgttgattcgcggggcgttaaacgcgggtgacgtagcaatggcactgagtatcgcgtctggccggcgaagcctgtatgacaagctcaggttggaacacgcgggcctggcgacggatgaggatcgcgcagagatcgagtcggccgagcgggaggctgagacgcttccttgggcgcttatggtcagggagacgtctcgtgtgcttgtgaaggcgggtatcaaccctgcaggagtagggccgtcggtcgcgcacagtgttggcgacttgccctggtaccgggcctaccctccaccgcaagaagcagattgggcgcgcttggagtcacggattgcggaaccagtccaacttgaacgagaacgtctgacctcggaggccgtgactcaagcggtctttgaccgcgcgtcccgtgatttggagtcaactaggctcggagtggttcgcgccggcatcaccgcgccgtctgactgggggcttgcgcaggaagatgcggatgacctgatctcaagtgtgctacgtctgcttgggatagcaaaccgctatgagggtggctacgtcgcgatgaccacctcggcgccgggcagcgtcagaagatacctgacgaaggttgcagtggggcaaggattggagccggagcgcctgattgccctcgttggcgagttcctcaggagtagcgggctgacagatgactcgtggaccctgcgaaccatgagcggccaagatgtgctgctcctcaaggttccggggagcgagctttgggtctgcagcaattgtggaaccgttcaccttcatcgctcggtcggagtgtgcacgaacgaagaatgcgtgaatgggcggcttgagccgacgccagtgggggagcagaacgacgactactacggctggttagccagtcatgaactgcgccggatgcgggtggccgagctcactggtcaaacgagtctgtccgagcagcgtgcacgtcagcgactgttccgcggcgcagttctgccagctccccaggaaagcaaactggcggatccgctagatctattgtctgtcacgacgacaatggaggttggcgttgatatcggctcgttacgcgcggtcgccatggctaacatgccgccacagcgcttcaattaccagcaacgcgttggaagagccggtcgatcggggcagccttactctttcgctttgacaatttcccgggatcgggctcatgacgactattatttccagtctccggagcgaatgacggcagcggatccgccgcctccgtttatcgatctctcgcgtccccgcatcgtccgtagggttatagcggcggagttgctccggcgtgcattcttgaattgctctgatcctcccactcgcactgcagatagcttgcacggcacttttgggtcgacaactgagtggatgcaacgtaggaatgacgtcgaaggatggttgaggactgcgcgtgacgtcaccgacgtgtgtgagaggtttgcagtatatacggccatagattcggccgggctaataggctgggcacgggcgcagcttgttgccgacatagaagaagctatagcaaatccctacttcggtcattcggagttgagcgaattgctggcgaatgccggcgtgctaccgatgttcgggtttccgacgcgagttcgtgccctatactccggccagatcacgagatctagcgacagtgaaaagtataaggtcgctgacagggaccttggaatgtcaatcagttctttcgcgcctggcgcggtggtagtgaaagatggggcggagcacttatgtgtggggttcgctgcttattcgttcattggagcgagcgcaagggcccgggacccgctagggcaggcgctcatggtacagcggtgcgacgattgcgggagcctgaatactgattcaaatgctgctgctgtgcattgctcggtatgccagggagaccttcggtcgttctccgtttttcaacccgaagggtaccgtacaatttatagcagtccagactatgacgattctcacattacgccgatgttctcgggctataccgaactgtccgcgaatacggctctgagtcgtgaggagcggctcggcggcatgtcccttcggttgctcgagcagaccgaggttgtgacggtcaatgacaacaatcggaggctgttttctctgaggcgcctccatgatggatcgatcatcgcgacgaatccaggactttatcgtcgaccgttgccggcctggatgcaaacgggcgggagcgagttggaccctgcggccatcggggaggtgcgtcgcacggatgttctactcatgggtctcgatagtctaaaggtggcggacggcgcaattgccacgcgacattgggattgtcccgcgggattcggtgcccttgtgtcctttgcggaactggtgcgcaatgcagccaaagactatctagacatcgaccaatcggaacttgacgtaggcttgcagccaacgcttcacaatgggactgtctcggcgcgtgtcttcctggcggacgctttggacaatggtgcggggtacgctctggagcttgggcagatgcctacgctgaggcgtttgcttgagtccattcgcgaacaaactggcggccgccttcgaggtgatccgcacggaagtgcctgcacatcgtcctgtccaggctgcctgagaaactatgaaaaccgattcttgcactgggcccttgactggcgattggggctagacgtcgtcgaccttgtgctgggtcgcgacttggatcttagttcttgggcggtacgcactgcggaggtcgtcgcgagctttcttggtgggtatggcgcctacctgaatgtcgttgtggaggaacggaattccatcccagtgcttgtgacccgcgagggtcgaggtagagcggtgttggtgggacatccgctttggcggcacgaccgtgcatattggaattcggtggtgcgggacacggtcagcctggtagaggcggacggtattgcaggtgtttcggtatccgatacgttcgtgctggacagaactccctcccgtgtgtttacagcacttattgacggtatttga

SEQ ID NO: 27888 - DNA, 1404 bp, Nakamurella multipartita DSM 44233
gtgtctgaggctgagtacagcttccgcttcgtcgacctctttgcaggtttagggggctttcacgtggcgctgcgagaactcggaggagcgtgcgtgtttgctgccgagttggacccaacccttaatgcgctctacgcggagaactatcaactcgaggcttggaaggatataaatgacctcgcatcttcacgaatcatatcacaggaagttccggaccatgacgttctgacagcgggatttccctgtcaaccgttctcgaaagcgggggaacaactgggattcaaggacacgacacagggccatctctttttcaaggtaatccagatcttgcagacaaagaagcccagacatttcctgcttgagaatgttccaaacattctcaagcattccggcggtgggacccttcaaacaatactggcagagttagaagcaatcggctactcggtcggggttcgtcgcttatcgccccacgagttcggaatacctcaaattcgagaccgggcgtacttcgtggggtcccgcgatggccttgaacaatttcgttggcctgagaccgaaaagagcagcactgacataaaatcagtgctgaagcacgatctcgtcgatgtgcggcccatccccgcacagactacacatgcgattaacatgtgggatgactttctcaaacgttctccagcgagggtgaagcttccatggttcccaatctgggcgatggagtttcgagcgacgtacccctttgaagaggccaccccatccgcgatatgggctgaaaagggaagtcgtggtttgagtcggcatctaggaagcttcggatttgaattgagaggcctcgaccgtgccgctcaattcgagcgccttccaagtcatgcccgtcgcgcagacgacttcaagtttcccgactggaagaaagacttcattcgacagaaccgtgaattctattgcgagaaccggaaatggatcgatccttggctcgcgaagtgggaaccttggcgcatggtctcaagctaccagaagttcgagtggaatgcccagggtgcggaacgtaagatcgacaagcacgtgattcaggttcgcgcatccgggctacgtgtaaagcgcacgacgacagcgccaagtctaattgccatgactaacacccaggttccaatacttggcaggcacctagtcggcgttaggcggtatatgacgccgcaggaatgtgccgaactccagtgcctaggagatatcgagttgccgaggaacgatctccaagcatataaggccttggggaatgccgtcaacgcccgggtagtgaaggcgatcgcagaaccgttgctgggcgagctgacgcgcgcgggcggtgcacgcatacccgtgccaaagtcgcgacgcaaagcaattggcggtagcgtaccgtctcactag

SEQ ID NO: 27889 - DNA, 3009 bp, Nakamurella multipartita DSM 44233
gtgaaggctaggattgaacagcgacaggggatagacaatagcggctacgacaaactcagggatgccatcgctgacgaactgtttggtttggagaacgctggtcaaccggtctacgcactcgctgacatccatgcgctggaacgcatacgcgctcggtcgagcctaagcggtgaaccaattgcggccgttagcaggttggtactcgaaacgctcgcgatcgatcggcccggcgttacacccttccgatggcaagctgatgccgcgattcgccatcgaagacacccggtacggacaccccccgccttaccgctgctgctcgttctctcgatcgctgccgagcaaatgcatgcgggaggcggggtcgcttcacacaactattacagtcgccttcatgagctgctgaatgttccaccgggaagacgagaaaggcttgagcaggactacagacggcatgcagaagagctatggggctccctgaacgcttggctggagtcgtgggagggcgaacggggggttccaactgcgtatgcgcttggaggacatgcatatatcggtttgcccttgtcccaagccgtggtccgagtacaggaccggaccgacctgcacgaaatcttcgtgctcgaggggatggcgccgggacttcggtatgcacccagtgacatgcaatcaacgatcgagccttacattacacgtgtgccgagtccgctaagttcaaatatccgaagactgtggcaggtcgcgacagcgcgtgaacgaatcctggacgcggcttgtctcgaactcgcaacctgggacggttcagggcaggccaaggcaactactgcaaagcaacctgtgagcactcgcttggtggcctatgtacgcacctttccgcgccgattagtcgagttcaacctgatgctttccttcaaatgggacggtcctacaacagtgcgcttcacaacggcgagcggtgaggtggtggtgccaactatcgccggaaccggaggactcacgcggctttcgagtgttgaggcgatccgagccgactcgctcatcgaagacgacctgaagggtcaactcggtgcggatgacagcaagcctttccagaggcgcgcaaagcgggtggtaccgctccgatgggatgacctccaaggcgcatacgtcgaaattgaaagaatcactctgggcgaggacagcctggttctcgcacggcgcgacgtgcggaaccgcgtcgagactcatctcactacccatgcccgtccaggatggcgccgatcggacggaatcggaggattgcccgacggatgggacttgtacacggatgttcaggcgatatctgcctctgacaatccccctcctgatctgataccgctcactcctcgtactaggacgagcctaacgttgcgcggaggcttcgttctgcctggccaccttcgcaagtggtcatcgctcgatccgccagaagttgtggccctggccgccggcgcggcgtcaatttgtgttcgcatcaacgaaggttcggcagtcgaccctagcagcgtgatcatcgaacaagagcttgagggcgaactagctgtcgtgccattgaagagtactgaaatcgtcgatggtgagtacaccgtcgcaatgtatgtcgatggtaagcggcgaccgagttcgacgaccatccttcggctaagatctgcggactcgcctcaatttaacgtggatgacgacgacatccgactagtgtactccccagactccggcccaacatggccactgtcagccggcccagcaatgtggcccgtatacgtgaacggtgcgcggtgcagtggtgagataaaaggtcaggcacaatcctcgaccctcatgcacgaatactcgcccagaccgcgaccatcaactaagggcacaagttcggcaatcagaatcggtcaaccacccgccggaaactcgtgcctggtcacaggaaggcaccgattcgaacttccgccagcagtccccggtcatcgggcaacccggacgatcgaaggagagtgcacctactgcggcttggtgaagaggttcgcaggcacgccgtgggccgcgcttcggcgcgtgcagcgaccgacgcgaagtggaggtgcagtcgtcattcccccggtagaccatcaccacggagggcctgactaccaagtcgcgtttgacgcactcaaccatgttggacatggaacatatcaaagctttgaaaagatcgccgcacaggtcgaaggatcggggctattcgcggactctttcattcggcgacaggaggtcgtggggcacatcgacgtcgcacgggatccatggctccaagtcaccgattgggcaatcaactcagcgacgctagtccccgttgcgtcgaaccgttgggtcctaatcggctcgcggtcgcgcaagatgctggcacaactgcgacgcgttcttcaaggtacaactatcaatgaatttgttgatgccgaacaggtactcgtcgaggttacatgtgataaggaaagaatgagcggtagggaaagcgcgcttgccgaaatcggagtcattctgcttcgcgggtcgcccgctctaaatattgcgctggccctccctaacctgagtgaactggccagtgcgcttaggcgcatgcaggtacccgcatatcggacagtggagtcttggaacacaacgacggcaacctggcaacctgcccattcgatggagcgcatgggtgcctaccgcatccgggacttccgctcaacatatgttgtccgagagggcgcggacattgcctcgggtgaagttgctatcgggaatgctcaattggttaagcacatcgcgaacatgtgggcggacgatcctctcgcgagatatcatacccccagcgattcagtcattgcgccattgggtgccgacctcccgggactttatggaagggctttatcgatctgttccggtcgtgctccgcgcgaaatagtaaagcacaacatggttcaatatcaatcggtgagccgcgaggttgcaaatgtcatcttcgccaggctttgccagtga

SEQ ID NO: 27890 - DNA, 5841 bp, Pantoea sp. BL1
atgttagaccctattggcggttttcgccgtattcaggacttcttcatttcatatatagaaactagctttcgaattgccgatccttcagtcgcggcctcaagacgcaatcttttgaatagtagcggagaatttgccgcggagccttacattgaacctgttttgcggtatgagtcttctgataaaacgcttgaagctctggccgagatggaaggtggaccgctcaatagcttgtctcctaaaggccgtaaggcgttcgttgaactagcgttatccggtctatttgattcgaaactaggtgacgaagtctggtcgcgtcgttcagtccatgcaccgtatagccaccagacgcaaatgctggagcgcggtattcttcccggtagacccggcatcgtgacatctggtacaggttcgggaaaaaccgaaagttttatgttgcctatattggctgcattatcgaatgaggctgtcaactgggccgcgccttgcgaaggctatctgcaaaatcggtggtggactggcgaaaaaacaaactggacttctcgtcgagaaggagaacaacgcccggcggccctcagggcgatggtgctttacccgatgaacgctctggttgaagatcaaatggcgcgtttgcgtaaaacgctggattccgaaggggcgcgtggggttatggagcagcatttctccggaaacaagatattctttgggcaatataccagcgcaacaccgattacaggctatgccagccatccacgtctttccggagtcaaatcggaaaaaagtcgccgtgctcgtaatcttgaaaagttacgtaaggcattgaaacggattgatagcgatcagcaggctgcacgtgcgttcgatgaaaaagaaaacactgcagaaaagactcgatatatatttccttcgacagacggcggggaaatgatgtctcgctgggatatgcaggctgctccgcctgacctcctcgtcactaacgcctcaatgctcggggcaatgctttcgcgcgaagtcgaagacggtatatttgatgctactcgcgaatggttaattaataacaacgacgcatacttctatctggtatttgacgagttgcatttattacgtggttctgctggaactgaaaccgcgatgttgattaagtcgctaattgtaagactcgggcttgacgacccgaaacatcgctacaaactgcgtttactcgcgtcttcagcatcgctgccgatggatggcgtggatggagagcaatctcgtaaatacctacgcgatctattttcgcccttcggtacttgccgcgattctctcgatcccggtagtgatgatcctgatttctggcgtaactgcgtcattaagggaataccttatgtaccattgaaaccagaaggaaaaatagctgtgcggcctttcgccgcattgatgcgtgttgccctcgaggggcaggaaaatgtcgtacgcaatctgaaaatgacggacgcgcttagtcaggctttgtctaatgtcttcatggctctagacgtgaaagcgcaaaatagcatgcaaggcattaaacaagcagctgagaaagcagcagcgttgctgaccaatgcttgtatagaagatggcagcgagttgccgcgagcgatgccgccgggaataatcattgataaggtttttctgaaggaagacccaagtaatcaagatgaattggaattagcattacgcggattaatgctggtgcgtgcgctgccagaatctgagatagattgcgataaacccgccaacgtcacaccagcttttcgcgtgcatacattcgtcagaaatattgagggtttcttcgcctccgtattgccgggagagcaaaaggcgaaattctccgatttttgtttggagcgtggcttgtctcacgctccagcaggcctaggggagaaacgaggtcgccgtttattcgagatgttgtactgcgaggcatgcggagaattactgatcggcggtcagaagggacagaagggcggtaagacaatcgaattattaccttcggcgaccaatctagaaaatcttccagaacgccccggcgctgaatattacgacgatatgacgttggatgaatttgcggttttctggcctgtcgatactactcattcaagcccggtaggctgcgaaaaaggttgggatgtctgggataaggcggtgctcaatccagttacaggcattgtgacgatcgggcaggaaatatttccgacaaatactgacgcggttcacggatatctttatttccaaaaaacaattccgggtaaaaaaggcgagccgacaaagagaccatccgcgcagcctttctgctgtcctaactgtggcattgactactccagccggcctgccagcaatcgtaccagaacgcccattcgcgcgtttcgtactggtgtgaccaagtcatcccagcttgtggcgacagaattatttgaattgctacatgcgatcggtgcggaagcaaagagtattgttttttcagatagtcggcaggatgcggcatctatggcgctagaaattgaacgattgcacttgcgcgatctacgcagggaaatattggtcgcagcagccagaactatgcttaaagaagcagaaaacaattatatatcagaagatattcttaaagatcagatgaccaaagccatgctggctaatgatgataatgagtacggccgactatatgctttaaaaaaacatcaagagggcattgctaatctttgtaagtataaacgcataaaaatagataggctattagagtctgaaggtgattcaatcggaagaattacatctgagctggttggcttgggaatatcaccatataagtatcgttccagttcagatgatgaggatagcaatgtttggcatgctaattttactaaagaagatacggttgttaaatatagcgatggactatcttctcatgaaaaaatgaagataaaaacaaaagtcgccggcgatcaatttgaactgatagatgatgtcatttttgctaataccttcttcgcgcttgaggaaacaggcctggcatatccatgtatatcaaataaagatgacttaccagagttagatgcatggttaagggtgttttcaggggcgtatcgagttacagataataaatattttgactctacacgtacccgtgattggtatgaaggcagtcatgttgaaaaagagaaagttaagcgcgttgccagagtattattcggtgatagagggtatcaagaaggtttgacacgtattttaaatcaattctctcagcttgagcataaggctgggcgaattaagatcggtaaattgttcctcaaaattagtaagccaggcgatagttattggcaatgcaggaaatgtgggcgaattcacttacatttagggttcaagaattgtactcgctgcttaaccccacttgaagttaaacccagcggagttgtcgaaaagctatggaaggaaaattttcttggtaaacgcattgttcgtggagagcaagacggagttaaacgtttcaggctgaacgtcgaggaattgacggggcagacagatgatttctccgatcgcctacgtaaatttaaaggcatttttgttgatgaaatgagtgaactcgaaaaattagatgcggaaatcgatatgcttgccgttaccacgacaatggaagttggaattgatatcggttcacttcagtcggtttatcaagccaacatgcctcctcagcggtttaactaccagcagcgcgtcggccgcgctgggcgacgtggtcaggctttttctttcgttatcacattttgccgcggacgaactcatgatgcttactatttcgctcatcctcatgcgatcaccggagatccaccaccgccgccttttttggcagtagatcacgatgccattccattaagacttatgcggaaagtatggcttagagctgcatttaatcttttacgtgaagaggatcataaaaagggaatagctttccctggagataaactcgttccgcctgatattcatggcgaatatatttctacgcatgattactatcatagcgatgaaactaattgggctgagcggttgctgggagcattgaaagcaactcagaatatacatgatcgctttgttatagcagcaacgttcgatccaaagcaaagacaacgcctttattccgcattagatgcggaaagaataattaatgaaattgctgaactgaacgactatgtccctagcgaagatatgggacttgcacgtttcctggccgagcacggaaaactgccgatgtatggaatgccgactcgggtgcgcaacctttatttgggattgcgtaaaacaaaagggataaacgctcaagaagaatacgagtggtcgacgatggatcgcgatcttgatctcgcagttttcgagtatgctccaggctcggtactgattaaggataagaaaaagcatgaggtaataggcttcacaggtaattaccaagaacctcaggtacagaacaaccgaatatctgatctctcgacggtaggctcgtggcaggagtcatgcagccatgtagcaatttgcccggcatgtggttccgccaaactagaactagataaacctgacaacgacattaattgcgaggattgctgcacgccgattagccctaacgaattcagactttatatcacaccagccgcttttcgtacggatttcaaacctaaagacgatatagataattttatccgcatgtcgttgaaaaccacagcaacagtgttgcatgaaggcgttccaacaaaatgcggttccttcacggtacaacgaggtgaagtaaccattctacgcctcaatgatggtcccattagcggagaaaaggaaggcgaacgatttaatgttgacttggtgaacgatcaaaaagcgccaatgccattttctacttattgcccgtcagttaaaggcgagcaggctatcgattcagactggctaaaatcgcacgctaacccacgctggcagcttcgtggcgaggaaaaaagttttgggcttgtatcaagcaaagagacagagtctcttcatcttgaaataacgaaattcgatactcgccttaatatggatatggttgccagatacggcgagtacatgaatttaccttcgcgcgctgcggctattagcgcgacccagatcttgacgcataaggcagcgctctatctggatgtttcgccagatgaatttgaaatgcttgaaccccgactgcatcttggtaaacccagactgcaaatcgccgatgcgttaatcaacggttcaggactatgcagacggcttgccgaaccagctactgctaacggctttcctctgatagtcaaactattacatgaaattctcgaagagaatgacaaatggccgatggttgattttttaaacaaagatcacccgattcagtgccaaactgcgtgttacaagtgcatacagcgctatggtaatcgccagtatcacggtttactcgactggcgtttaggtttggcctatttacgggcgatggttatgcccgaattcgcatgtggtctgaatgccgcagactggaaccagccggagatgaaaggatggcgagaaagagcatttcagttagcggaagacgtcgaggctcttcgaccagcaacaatcaaattgttaaaagagtattcgttacctgttcttatcgaaattcaggatggaaaagaactctggcgtgcagttgttacacatcccctatggcaatcgaaggaccctgagcgaaatgctctgattgattccatgggcctagctgatgggagatcttcacttaagttcattgatacattcgagctggaaagacgaccattgcgtgcgcttgctaaccttaagcctagttaa

SEQ ID NO: 27891 - DNA, 1236 bp, Pantoea sp. BL1
atgagcactaaggctgccatgagtgacaatcatttaacagaaccttacgaggcagggtttagtttctatgagtttttcgcgggcggcggtatggctagggctgggctgggaaaacaatggcgatgcctttttgccaacgacatggacccgataaaagcatcgacctacatcgataactggggggacgaacatctcgacatgcgtgatgtccgagaggttacctcctgtgaactgccgctccacgctgatttaagctgggcgtcatttccttgccaggatttgtctctggccggtaatggcttgggaattggcgaaagagattccagtgcggatgaaaccacgcgttccggtgcgatatggccattcctcgatttaataagcaggctcggcgaggaaaaccgtaagccgccgattcttgttcttgaaaatgttcttggattgctgacgctggataaggggagccatttcgccgcgatatgccatcagctaagcaaaacgggctatcggtatggcgcaataatcatcgatgcaaagcactttctaccacagtcccgcccccgcgtatttgttgttgcgattagtcgccatatttccattcctgaatgtttggtttcagaagaacctttgtcgaaatggcattcaccttcgctcctacgcgcctgcgatgcgctagcgaaggaagctcgcaatgactggatctggtggtcgcctggcgatttaccagacgccagaatgagggaactggacgacttaatcgattttgagcatgacaacgcgctatggcattctgccgaggaaacacaacggcttatcagtatgatggcaccggctaatctggcgcgtctggcgaacgcgcaggcatccggcgagacaattgcaggcagcctttatttacgcatgcgcaaagaaaaaggcgtcaaccggcaacggaccgaaataacgttctcgacagttcttggttgcctgagaacgccaaaaggcggagcttctcgtcctcgtattatcgttgtaaaaggcagccaagtgaaaactcgtttgttgtcggtcaaagaagcggcggcgttaatggggttgccggatgatttcatcctcccagctgcgtatcagtcagcattcaaagtgataggtgacggccttgccgttcctcccgttcgttttctggcagaacgtattctggagccactggtgatggcagtccgaatcaatagtcagcggacggaggatatacctgaatga

SEQ ID NO: 27892 - DNA, 2559 bp, Pantoea sp. BL1
atgaactggacgtctctcgttacgcccgatggttgggagagtaaactgattgattattttctccggttcggtgctggcggcgacgcgcaggatattcgctggtttgaagttacgccgtcgacgcttgcggcagcattcgccgacagcagtgctaatgcgaatgaaattgaagaagcgtttcgaacctgtatgtcaaaaatacgggatctgccacagcgccttgaatacggcatgatagaaaagtcgactcgtgatacgcccggattttttacttatctggtcatgacgttgcttattagcagccaattcgacgcacaggaagagcgcaatgactttcgtctgaagctacagaactggctgcagacctcgcatagttttcagaatttatctggcgtcaaccagatgtgggaggcattagccgaatggcttaaccaacgaattcaggaaggtgagtcttacaggcatcttgtcctaccgccgcgggatggtcgggttcaaatcggtcacaccttgcggttggcattccctaataaagccgatctacgtctgatgagcgagtgcctggaacgttatccgcaagcggccgctgatccgcgccagttaatcaagtattttcagattgttattcaaagacctggcgtttcttatgcgctgaaggaggcttacaccaaatttagagacgcgtggttactagggcaccgcgcactattcgatatgcctttctggcgcctgcgtcaacgggcgttcgaaatatcatccggcgcaccgaatcatcaaatcattattgatatgtatgtcgactttgacggttcacgatgttatttcagtagtgtgggcgagacaggcgaaaccgtttttcatcctgagttatccaaagctcttaaagaccgtggtgccgggagcagtgaaaatctggggagggcgtcgcaggccggcttactattttttgatgagatcgggcacgggcgctggagagcgaaaccgtctcctgacgtaaactcgcaacggtttcatattgccttatccagtaaacattccgtacatataagcaagcgtctcaacggttatattgtagaggacgattggattttaacggttcagcctctgaacctagtttcggcgatggatatatttcgcttactaagatcctcttggggcactcagggtgatgacgtcacgcgtcctcagctatacggtggaatacgcctccccggcggatggctgggattacccgcatttttgccttttattgagtcagatacgctacgctacaaaatatattcatccgggaatgatgaagcaggaatcaacgtttctgtaattgatggccgtttgatttcttctgtacctcttaactgtgaactttccatcgagccagcgcttgaaacgggagaaaaaactccgccgtggcggcgtcgcgcgcgttttttcacctacgctgtaccgcacccgactttaggcgaaagtgcaagataccggtttgagccgctttgcgactggttgacgtcttcactaaaggcgccgacatttaatttcgaagagcagtttcaatgggaagataacgaagtatgttgcgatcatcttctggaggcgatatacgccagcggagcgagcggctgggaagaggccgagttaatcgcgcttctaaggcatgtagacgggaagatcaacgtatggcatttgattcgttgtttacaaaatgcgggtctgatcgagccacgcctgcgtcccggatggaaaggccgggcatggacgctggttaaatcttcattgcttcatattcgtaacggagaaaattctctaattgttgtggaaggcgcagtctgcgccagactggtggatgattttcaaaaagtggtcgctgggttgggcggaaaaagttttcgtcgttgcggcgttagcctttggtcgccccctgtgtttggcgctgtacttgctgatcctgttgcgttatctcagcgtctaggatggccgcttatcgaagcctcatcgtcatccgatacaataccgctttcactagccacgacagaacgcgctgctgaactacatgatctagctgcggtctgggactggcattcagggcgatttcagcaacatggtttccaggataaagaatctgtgtcgttgtcactgcatattcatcccggggggcgagatcatgatatctatcgggttgtttccggaagaaaaacaaaacattatctttcccgaaccgcagctattatcgccgctggcgcacataacagggaacccatgtttgaacgcgtcgctaaaaatcatctgcagtgtcttatcgatgattgtggcctgcccgacgtattggctacgggaatacggcgtcacgcgctcagaaacggaggtccgatggactccggttacacctatcctgtcgatgacatatctctcctctggctagagtcgctacttccgggatgtttttattctccctcgtcaaatggcgaggacgattcaagccgagtagtttcagtcagtcgccattctggcggaagaatacgtccgatatggagaaacggtcggttaacactgacgctgggataa

SEQ ID NO: 27893 - DNA, 2091 bp, Pantoea sp. BL1
atgagcaacatcccttggtatctgggtcaatatgatcgcagaaattatcagtcttaccttacagctattgcgcaggaaacacctgatggctggcgtacgatcgagaaccctaagaaactatttcctcgtacgggtgaggttgagtttaacgactctgatgctttgccgctccgtaagggcgaatgggccgcttttcatgttgggccaggtactcgcaacagagcgcaggcgaaacgtgctcgccgtatttatccttattatgatttatcttccggccaatcgctgctggaagcgcgtcgccaattgagctttgatggcatagctacagatggtgaaccgggggtgtgggctattcgttttggcctggatggcttgattctggcaaatctggctgagtcgaaaacaggctgtctgatcatttccaagagtcagaacgtctatgaatatgacttccgtgaaggcggcgtgatttccgtatcaggcatatctgataacggaaaattgttttatatgcctgatgtcgatgcgttgcctacccagatccatgactggacgccggataagcagtacatcgaatacgtcattcaacttctttcctgcgctgatttgacggtcgatatctcttcatggcttcgagtgcatacagacgagcaaaacggaaaattatcttccggcgtcgatgctcttctggctgctgctcaaatgcttcgggcaggagagttggctaagaaactggaagaggaggattctctgactcgtcaatttaccgaagctgtattgaaggaccagcacatcacccgccttctcgagcatcagatacaaagcatcgcggaagaagagcgagtcacgttgcgcgcccaacagcaaaaggcgctcgataatgaattttcgggtgaacggctgcgacgtcgtgaagttattgaaatggaaatggccgtatttgataaggcaaggaaaagccaaatcgaggaggagattgcacaattatggcagttccaaaaagaaaaattacagactgattttgcagaaaataaagcggatatagaaaaaactctcaatcaggaaaaagagtatctcaaaagcgaaattagtcgtctgaaagacgccagcaatgagttatgcgcccagaacgaaaatcagcatcatatattggcttccttaacctacgaacatgaagcatgtttagcatctttaagagagaccgaagaacgtactgctcaggcaaaaattgaactcgaaaagatggatgtcgcgattgctgagaagtttcgtcatatggcttattcagtattccccaaagtatgtcttccgacgcaagcgagagtagtatcatgcgaagaattcggccagctcgttagagagaacaaattgctgacacccagcggaaaaatattgatgacgcaatttcttgcgttgatgttagccggtgaatgtccgttgttatttggtccggaaacacaagactttcttgctgttgctgaatcgctgatttcttcaggccgctcaattcgacagatcgccgatccaacgataatttcctgcgaggatctatgggttcgtgcgggaaataatatggcgacgccgctttaccaaggattattgttgagtgaagcttcttgtccccgaacgatcctcgctgtgattgaacgtgtcgaatgttccgctgtgcgtttctggttgccagcgctgaaagatcgattataccgaggtgatttgcaccgacgctttctgatttgcggcaccattgaaaacgaagattgtgaagaaatggaggaaattaaggaacaacatcttcgcctacgaatggaaaatgtcgtcattcggaatgcgattgcgctatctcctttatatctttcttcagaaaatcatagcgaactggaccccggtccaaaatcgcaaggttctttccctgacaagctcgctatcgcggatgaaatgtcagccggacgtttggatctagcaaatacactacgggcgatgagaacggcacatgaggtggtgccgcttgatactgaaaacaaagcgatgcatcaaaaatatttagtcgatttatatgcaaatttaaataatgacgagatgtatgcccaataa

SEQ ID NO: 27894 - DNA, 5862 bp, Paracoccus sp. MKU1
atgttcgatccgatcggcggattcagcagaatgatcgagcagttcctagcctatctcgatacagcttaccgtatcgatgattccagagtgtctgcgatgcggagggaactgctgtcccaaccggggcagcttgcccttgatccaatattcgaggcggtcccgcgctacgagacggcgggccacggcttggaggccctgatcgatgatccggggaaaaagcttcccggtttcaccaggccgcaaagagaggcgttcatcgaacttgcactctcggggctgttcgagcgcgacaaggaaagcgcagacataaagggcgaatacgagccctaccttcatcagatgcagatgctgtcaaagggagtgtcggatgggaaacccggcatcgtcacctccggtacgggttccggcaagacggaatccttcatgctgccgatcctcgcccaactcgcgaaggaagcgaccacttggcccgcacctctaaagccggtcgatgacgattggctcgaaaagggcaaggagttccagcttcaccggcggaatgaacatccggagaggccgaaagcgatccgcgcgctgatcctctatccgttaaatgctttggtcgaagaccagatggtccggttgcgcaaggccctcgactcgcccgatgcgcaggaagtgatggcgaagcatttcaagggcaatcgcctgttcttcggacgctacaccggaaagtcaccggtcaccgggtttctttcgcatccgcgcaagagccgtgacaggtcttggaaaggccgcaacagacgcgcccggagggagctaaaacaggaactgcagcgctatcagtccatccaaaggcgactggacgcggagggggaaaacgatctgcgttacatcttcccaaccacggatggaagcgaactgatctcgcggtgggacatgcaggccacgccgcccgatatcttggtcaccaaccaatcgatcttgaacgcgatgctcgtccgcgaagtcgaagactccatactgacgcagacgcggaactggctggtggaaaacaacgacgccagattctacctcgtgctcgatgaactccatctggtgcggggatccgcaggtgcagaaatggcgggccttctcaaggtacttctcgaacgcctgtgtctggcggacggagcacacgcacacaagctccggatactctcgtcctctgcttcgctgccaatggacgaggaaaacgccgctgctagtattgagtatctgaggaacatgttcggcgcggccggaacagccggcgcagagaatcccgataaggtctggaaggatagtgtcgtcacgggcaaggctatcgcagttccgcggccggttcgcacaccatcccgcagcagcttggtcgaactctcccgagcgctgaaggatctcgattacaggaagcagccggcacagctcctcgagaaattcgtggcctctgcgcagagcctgccgggttcatccggcgcagcctcagcggcattgatgttggaagctactgcgacggcggcagcaatgctagacttcgcaatgcaggatgcggactgtcctggcgcgaaacgtccgagttcggtgggcgacatcggcaagaatctcttcggcgctgaggattgggatgccgtgcgcgggctactcgccctacgtgcgattccagatctgcccaagtcggtccttccggatgaactccggccgtcacgctcggagatcgccagccttccaggcttccgcatgcatagtttcgtgcggaacatcgaagggctgttcgcctcggttggtcgtgacaggaatggagcggttgtctgggggcggccgagcattgagcgcggccaggattacgatgaggttaaggagcttggccggaagcgtctcttcgaaatgctctactgtgaagcctgcggcgacctctacctcggcgggaagagaggcgagacagagccgggcacatccagccgggtgtcgctactgccagcgccccaggaactcgagaagcttccagagagcgcatcatctctccggttcgaggaagccagcttccgcgagtttgcactgttctggccaagccagggaacgccagaaagagaaatccgcgtcgagcgaagtccgtacgagtgggcacgcggatatctaaatccgcagacaggggtcgtcagcggtagagaagaagacggtgacgtttccggttatctcctgaggtggaaagggaacgacgcattccatcagcgagcgatggacgatgacggcaccgccgtcccatactgctgcgcgaagtgcggcaccgactactccgggcgatatagacaaccgaactcgaagaaacgcgaaggccgcatttcgcccatccgaagcttcaggaccggcttcggtaagacctcccagcttctcgcgaccgaactggtcgcagcgctgaagtcccagggtggcgacggcaagctcgtcgcgttttccgatagccgtgaagatgccgccaatttggccctcgaggtcgaggttcagcaccagcgggatcttcgccgcgagatcttgataagtgccgcgacccgcattgccgcagatcgcgccttcactgcggatgacgatgccgagctacagcgtctgaaaaccgagatcgttgacttaatggccgacgaccaagacacggatcacctcatgctccggatgaaagcgctacagaagcggaaagccggagccgggcaaccgccgagcgtaccgttgaaggatcttttcgagtttgaacgagacaaggccggttatgcggccagaccgatcctagctgaattgatgaagctcggctcaactccagtcgagggtgccgacacaatacatacccgagttcgcaacaagccttggtacgagttcttcgaaaggcaggatggcgaccagatcgcctggaagaacgaggttcctgaggaggagttgaaactcatccgaagggcgcgagaaaaagtccaggacgagcagccgccggatgcgacggatctcctattcagcaaaacctatttcgcattggaggagaccggactgggctggccaagcttctacggcccagaagagtacactcccgagaagtcgcgcgacgacgccatgctccgcatcttcgcggacgcgtaccgcatcacgcccaaccgattccaggaggagacgaagaccgcttggaagaccgccttcgatatgctcggtctcggcgacaaccgtctgaagcggcttatgacgaaaatcgttcagcaaccagaaaagggatgcgaggattttctgcacaagctcaagaccacgctcaagcaagttcgcggcgacggctcgatcgacataagcatgctctactttcgggccgcggagccgtcagcgaaggcatggcggtgcgaacggtgtggccgtgtgcacctccacgaagggttcggcaaatgcacccggtgcggagaaacgctgacccacccggaggacctgaccgcttccgtgatcgcccaaggcaatttccttggccggagggtgatgcgcgccgtcggaagcgacgagccgctcttcagattgaagtgcgaggagcttaccgggcagacgaaagatccggcagagcgcctgcagcaattcaagggtgtgttcgtcaaggccgacggcgaaacagacacgaactttgagtggcgcaagctcttcgactcggttgatctgatttccgtaacgacgacaatggaggtcggcgtcgacatcggctccttgcaggcggtctatcaaggcaacatgccgccccagcgcttcaactaccagcagcgcgtcggtcgcgcgggtcgtcgaggccaggccttctccaccgtgctgaccgtttgccggagcaagagccacgacatccactacttccacaatccgcttgagataacgggagccgcaccaccgccgccattcatcaccacgggcctcatcgacattccatcccgcctcctgaggaagttctggctcgtggaagccttccgcatattgcgcaaggaggccgatcaggactgggccggtgacaacgtcgtccctggcgacatccacggtgaattcctctactgcaatgagtatttcaatccggagaagcactggcgcaaaaagctcgcggccgcgctggctcagacggatcatcgccggcttcgtctcgcgaagatccttgcggacgtttcggggtgcgaggtcattgagattaccacgattgtcaccgcggacaaagttctcgcagccatcgacggactgcaggacgaattcggtctccagcccattggcattgccgccgccttggcggagcgcggtctggttccgctttacggcatgcccacgcgcacgcgaaacctctacgtggagctgcagaaggcaaagggaagcttcgaggcggaatgggataccatcgaccgcgatcaggacatggcgatcttcgatttcgcgcccggcagcgtccggacccgggagaagcttcggcatcgttgcatcggcttcacaggcattcttccggatcccgacgaattcatgacggacttcggtgttccgatgcggccattcagtccatggtacaaggacgactttcgtctgaggttctgtggcggatgcggagcatggagccggggaggagacgaaactttgacgtgtcccgcctgcggagcagacaactcggatccaggaattcggtgcataacgccctccggatataggacggagttcaggcccaccgacgaaaaccttgcgtcgaaggtggggcagcggatttcgttggcgagccttggcaaggtcgacaagcagaaaaccgacgagaacctgcgagtgaatttcgcggagcagtccgagatcttcctggtcaatcccggattcaaggatgacgaggacttcactggcttcgatatccgggaagccatcgaccaagatgctcagaggattgggtggtggacaaagaccaagccgctggtgaaacttgccggacaggcgatcagttcgcaggttctcgccgaagaccagaatggccgctacaaggcggaggacgacgtagtgagcgcgtggctagcctcgaccaagatcacgaactcactgcagatcagccctatccagctgaacccgaaccttcgcctgctcgacatggatgtaggcctttccatggggcggcgagatccctcgcgaaccagcgttcgcgcagcagccatatccgctaccgaaatactggtgcaacgggcagcgctggatctcgacattgcccctgaggagttcgatgtgctcgcccccaacatcatggtgtcatcgtcgggtgaacgactgccgtatctgcagatctcggatgctctccccaatggttccggtttctgccgtcacctcctcggcgacagcaccattcctgtctccagcctcataagaagcattttggatgatgctaaggcgtggccgcgcaatgaggtctccgatgacacacacagaaaccgatgtggctcttcgtgctatcgatgcctacaaagatacaataataggagcctccacggtctgctggattggaggctcggcttgagctacctgagagctctatctgatccaggatacgaatgcgggttcgatggcggatatgcgcacttcgagctgtctgactggaccgcagtatcgcacgacctcgctctacagaccaagaccttcattcccggaaataaggtcttgagcatcgagagcagattggacatccagatattctcgctagacgaccgccacagccgctggggggtcgtggtccatccgttgtggaatactgaacggctattcaagatgatggggctagatcgaagttacgtcgccatcgacagcttcgagctggcacgtcgcccgcttcatgtactgcaacgcgcccgcttttctgtgaagtga

SEQ ID NO: 27895 - DNA, 1812 bp, Paracoccus sp. MKU1
atgagttgcacggcaatcgatctctactctggatgtggcggaatgtcggctggagccgcagccgctatccccggtcttgagattaaatgggcgctcgatatcgatgcgaacgccgcgcgcaccttcagaaaagctcatccggaagctgtggtggattgttgcgacgtttccctcgttactgcaaccgatgtcgttgagcgagctggtatcgaaaagatcgactggttcttcgcgggaccgacctgtcaggctgtgagcacgatgggcgttttccaccttgaagatccgcgcaacgccctgttcgtccatttcatcaggttgctggatggcttcattgcagccggacgaaagccacgccgtgtcataatggagaatgttccgggcgttgtctacggtcgcaacctcctcatcgtgaaggagctatttaagctgttcgaggaacgtgactataacgtcttcgccgatgtggtgaatatggctgactacgggctgccgcagctccgaaatcgttttatcctaatcgctacagttgaagcgaggccggccacttttccccttcacactcacgctccggtcgccacggagaacctgcaggaatatgtgacggtgcgggaagcgatcgccgacctcacagaggaagtagacaaaaatgccgtagccagactttcaatttccggtgcccctacgccctttcaagccttcgtgcgggacagttctggcttcgcaccgaaccatcacgcgaacaacctttccgagatcaacaggcgacgagtcgcgaatgtcccgcaggggggctgctggaaggacattccgccggagcttctcccggatcgtttccggcgcgtgcgcctgacggattacgcaactctgtatggccgccttcatgaggcttcgccctcttatacgatctcagcgggattcaacaatgtcacttcggggtgtttcacccacccgatccacaaccgcgccctgacagtccgcgagggcgcgcggttgcagggattccgagactcctatgagttcctcggcccacgcgaggcccagtaccgccaggttggcaacgccgttcctccatatttcatgatgcgtcttgtccagcaccttcaggatagcgaagcaggcctccctgccaggatcacctcacctgttctagatagcggccgaaaactaccgagcatggtgaaaagatacatgaagaggaagaacgattcagtcagatctcgcgacggatacggcggcggcacctattggccggccggttggggcgagccaatcccagctgatgcagtggcagcaaacggctatcgtctggaggacacgccgcttcgatatcgcaggcgcgacgaatggcgcgtgacccgagaccacttcgtcaataaggacattatcaaagtctacgaggatcagcgacggctggaattgccaagcggtgcaattgcactggcgcttgtccgtgaggatgacgttgatgccatcgaccgggcgatcgtacaactcttggcgatcatcggctcgagcggctatccactggaaatgcaggtttcggttcgttacctccgcgcgcgcctgaaacttctccatgatcggttgcgcgaaaagcaggtggagtacctcccccaaatggagatcatagaactcgatggcgtcataaggttcgggcaggccatcggcttaccggatgtcgcccggttgacctttgaagattccgactttgctgagggccagcgcacccaggggccgcacctcgtcctccatcgtcaatcgatatctggcgagcagttcacctctggagatagcctattaagcgactga

SEQ ID NO: 27896 - DNA, 1593 bp, Paracoccus sp. MKU1
gtggatgccattgaggtacgctcggggttatggctgacacagtttgaccgcaggccttcgggctacggcctgtcgcccagcacgatcatgcgttctgtaccagtggtgacgctcaagaatcgtccggaaaccataaggctctcttctggcctcgtaatctacgtcacccaaccgagatgggcgcctgaaaaggaggtcgatctccggccggagcacgagatgcttcaggcggcggagtattggttagcgcgtgcgacatcttcgattgttcaatccagctcgaatgagcgctttatcgaccttctcaggcaatacatagccaatacaatcaacaccgaggagatggcggacctttccgcagtgatcggactactcagcaaacgtaagacgattgttgaactcttgcctcagatgatggctcgcgaaccagattttcaagagaggctcagagagtttgaacaatcagaaagagatcgcctgcgagcatccctgcagtcacgacttgaggaggaaatgcaatcggaaagagcccggctctcagatatacgtgcagatcttgccgacgcggagaccagacttgcgctcgtagcgcatcgcgaaggtctactcagaagcgaggcagaaaagcacgacgaaagtatccgtacgaggatagctgaggccgcaaaagatgtagtcggagaggcgagtagggagactcagcaactgagcgaggaagtgacccggctgcgcgacttgatatcccaaacccctatttcaaccgtgtacgccaccaaaacagatctgcttcccgaaagaaagcagcaggaggacgcttcgggtcaacttgtcatcgccaccgaggaagtccgaaggagcattattgggagcctctcatccgcggttgcgatgccggtagcggacgtcgccaccatcatattgagatcaaccgaagatcttcctgttctgatcggcaataaggcttcgggtgttgctgcggatatatccgtagcgatcggtggcgaaaacagcgtgatcgcattttgcgatccctcccgcatatcgtggcaggatctcctacgggacgaaacctccggtctggctgcagccatagccaaagcccgaacccatcccgggctgatcgttcctgtcgctctctgcggcataaccaacgggccgtgcgaatactgggtaccccagttcatcgagtccaggcggctcggaaagctgccgcgtaacctcgccattatcgccagtgcaggggtagacggtacgcgtgtttcggtgccggactcagttttagaatacttcgtccccatcttagttcccgcgtctgcgcgccccgcccgcaacctgttcgctggtgcgtggggagccgagctcgaagtcgataagaaaaagcttgcggaggcaatagaccttctctcgaagtcggacagccttgagagggcggcgcttatccgcgcggccaagaccctatcccgcacgccggcgggcattgatatgggcgaggtagcagcagcactcgtccgtcaagaagaacggcgcttgtcccttcctggcgaagggcagcagcatgcattcaatacctatttcaagaacattgaggggtaa

SEQ ID NO: 27897 - DNA, 5961 bp, Pectobacterium carotovorum subsp. carotovorum
atgaacaacccattagaaacgtttgaatcaataagggatttttacatcgcttatcttgagacggccttccgtattggttctcctgccattcaggcgtatcgccgagaattacttgaaaagcaagggacgttgtgtgcggatttatttctggaaccaatgccccgatatagagactatggtttaactattagcgatttacgagatgcttcgaaaggggaaacatggctgccgggatttaccgtccagcaaagggctgcatttatcgatctatgcctgggcgggcttttgccacgcgatcccaaggatgtgaccaaaggacgttttaaactctattcccatcaattagaaatgttacaacgaggcgtacaacccggcaagcccggcattgttacttcaggaacgggctctggtaaaacagaatccttcttactgcctattctggcgcaaattgccaaagaggcaagtcaatggtctcaaagttccgcgcttaaaagttggctgccatggtggcgtgaaccaaatgcccaacctacctttatgcgagatcgagaagctcctatttctgggagacctaaagctgtgcgagcattaattctttatccgatgaatgcgctggtagaagatcaattagtgcgtatgcgcagagcgctcgattctgatgaagctcatgaggtaatggattcccattttggtggcaatcgtattttctttggtcgttataccagtgccactaaagtgactgggtggttggatcatcctcgacaaggtaatgagccaaaagagaaaaaacgtgtggcaggtaaagttgctgaattacgtgaatatctgcaatttgctgaacagactcataaagaggctgtgcatcaagggaatctcgataaggatgataatttacagttcaattttcccagaccgggcggaggcgaagtgctgagccgatgggaaatgcaaaaaatgccgccagatattctcattactaacaccagcatgctttcaactatgctggtgcgtgaaattgacgatcctatctttgatcagacccaacaatggattgaacgcgatccgaacgcctacttttaccttgtgctcgatgaactgcatctccagcgcggcacggcaggcactgaagtcagctatttacttaaacatttgatcaatcgtctggggctagatcaaccacaacatcgacacaaattacgaattctggcttcgagtgcttcactccccgtgagtggtcaggaaggtaatcaaagtattgactatctttggggcatgtttggccaacgtggattaccaacgaatgctagcgcgaaggactggaagacttgcattgttgatggaaaactcgaggaactggttgagataccgtatttttgtggcgatctccctgcgctttgtcaggcggttgagaaactaaagtcaacggaggcatctgtaatatggagtggtatagctcgtagtctgggatgctatcgcgatgatgttactatagaagaattggcacagcatacggtcttattggctgctcgaatgctggaaaagggatgtacagatgataaaaaatcttcacgcgcaaccgctatcaactcactagcaaccgatctatttggagaacatcccgatgcgcgtaggggagtcagtgcgctaatctggatacggacgacagttgatagttggcaacagtggtttgcacatccttttcctgctcatatcgtactaccacgtttccgggctcacgcatttttacgcgcgttggaaggtttatatgctgctccgctgccatcaccgccacaagcagataaagatgaaataaatcaatggttattcgccgatcttacagttgaatctggtctacgctacggtgatcgtttgtatggagataagcaacgttcgagacgcgtggaactgctctattgtgaatgttgtgcaacattatttttgggcggaaaaccatctgctttttcagcgacaagtaatcggacagaacttctaccaaacgatcctgacatagagaagctcccggagcacgcaaagtcggtgatgattgagcgacgttcagcggaagaatatgtattgtttatgccaaccgttgatcggttctggcctctcggtaatgaaaaactcacagatgacgattcctttggtaaatggagggaggcaagttacgatccgtttaccgcaacgattacccagccaatatctctagtaaaacccttactaaaaaccgagattgcaggctggttctatagtgttcctttgggtgattttatccctccgaaaagagagcagtcatccagtaaatcgcctggttcttcattgcctttccaatgcccagcatgtggaacctcatataaatatggtaaaggaaagcagtctcctattcgtggttttcgagtgggtttcgcgaaaaccacgcagctccttgccagtacattaatggctgaattgcagaaattcggagatcaagaacgactgataacgttctctgatagtcgacaagatgcggctaaagcggcgcttgatcttgaatctgggcatcatgatgatattaggagggagatcctaattggttcgctgaaagaacttgcggcggataaatgttcacatgaaaaattgcgtatacgttttgatgaggttacaaaaaggaagaaagaacttgatattcttgatgatcttaacaagctctcagatgtacaggaaaaagaactagacgatctttggaaagaacgaaaacacatcaaagaaacgttattactcccacaggctgatagtgtttcactagaagctatattggaaaactcgcccaaagcgggagagccacttaataggctgctggctaaactggttaaagctggtattcatccgacggaccggactggtattactccgatacccgatccatcaaaacatagcgaagacattaaaacttttacatggcagcagctctttgataaagaccatcaaaataaatggtgctggaaggcttttccttactatgaaactgatctggatattgcccgtcaggaaatttcacgcgacctgaaagaattagccggtgaaagcgtcttcagtaaaacctactttgcattggaagaagctggatggggatatccctgcatccctatttctgagaattactcccgggaaaaattagcaatatttgatgcattacttcgagtcttggcggacgcttatcgagttgagccatcgcagtatcgtaatcccgacaaccctaacacaccttggggggaggcattagcgatccctaaactcaatagggtatatcgctttgctaattcaatatgtcaacagtctggcggtagtgttttaggcttacttgatgagtttcttctgctacttgaaaaagcgggccaccaaggtggcatcattgatattgggaaagtgcatttccatttagttgaacctgcagctagcttctggcgctgcaacaagtgcggtcgcgttcacttacatctgggggccaaaatatgcacccgctgccatgctgttttacccagaatacaatacggtgaagctggtgtgctccaaaaacaaaactaccttggtaaacgtattttgcattcatccggtagccatcgaatgcgttctgaggagctcactgggatgacagaaaacccagcagcaagattacgtcgttttaaaggtattctgattgcggatgatgatgatattttaccaatgggactgaaaaactttgaaccagacactgacctggacagaaaggcacgcgttattgacgtgctttctgtgaccactaccatggaagttggtgttgatattggcgatttacgtgctgtatttcaggccaacatgccaccgcagcgttttaactaccagcagcgcgtaggtcgtgctgggcgacgtggtcaggctttcgctttcgttctgaccgcatgtcgtagcaaaagccatgatctattttacttccgccatccagaaaaaatcactggtgaccttccaccgccacctttcttaaccaccaagctggaaatgatctgccaacgactggttcgcaaagtctggctggtggctgcgttcaaatggctaagacagaacacaattaattcacaccagtcatggcctgtggatgaacacaggcataaaaccgataatcatggtgaattttttcaagttgactggctaaaagaccgtcgggtcgactggctaccacgtatccgtcaggcactaatagcaacgatgagagatcgtgatgaatttgcccgtgtttgcatgccggatgatcaatccttctatcatagcattgtgcaattactgacccccgacaatctgagtcaggatattgattcggcgctaaacgaccatgctatggcgggtaaagggctggctgaagcgctggcggagcgagggcaattcccgatgtatggtatgccaacccgcacgcgtctgctacagaccagagctattgctacaggcgaagatgatatccagtttgctagcatggatcgcgatctggatattgcaatacaagagtttgcaccgggaaaatatctggtacaggacaaacgacgctacttaacagcaggctatgctggaatgcttaggcagcgctatcccaactctaaagaatttgattctaacgtaagtgaactgggtgaaggtcgaacgatgactgcctgtccagtgtgccatgtctggacttcaatcaatcacacgatccccgaatgtaccgcctgcggtgcggtggtagatgatgttgagcagtatcaatgttatgtaccttatgggtttattacctcactggaagataaatcagtcaaagaggatgtcgatcaaaccctgaccaatgccagccgagtttctattgctgaggcttactcattttcatctgaggcagagtttgatgctaatgttgctattcaacttgaatctcaaatttgtcttcatcgccttaatcggggcacttatgtcgatgaacggtggagcggtttcaatgcgctacagggaaacttacgagttccttttagaaaagagggtgtgtatcaatcattaacggcaaatcgcgtttgggccgatagccaattacttgaaacagatcctgtgctgaaaagacggttcatacctttacaggaaagtagaacttctttttatcttgccgcacctaaagtgacggacctgttggctctgatggtggttaatacccctgctggccttcaattacagacgccggcattccgggccgcagcactctctgctgcatttattattgtcaactatgcatcaaaagaactgcttgatatcgatccagaagaaatcgaaattctggaaccgcgtgtccaacgattagcggacggaaggttggcaccgataatgcaaatggccgatcgtctggttaatggttccgggttatgcgagcgtttacaacagaaaggaacatctggtacgccgataattcttgaggtaatgaaagctattgtcagcaacaaaaatggcttcccgctaaaagagtttttggacaatgatcatccgaaaaaatgtattcaggcgtgttatcactgcctgcacagatatggtaatcaggcttatcacgggttacttgactggcgacttgggctggatgttatccaactgctactggataaaaattatgatgccggattaaatggtgatttctcagctcccggtatcgctgactggcgagaaaatgccgttagtttagccaaagaggcggcatcactctttaatagtgaagttagaatggtaggccatattccgctaattaacattggcccacaacgatgggttgcggtaacccacccattctggagcgtggatggagttttcattgctaatcctgagcttgaaaggctattccttgaatggcaactggagaaaaaaacgatcagtacttttgatctctctcgtcgtatgggggctgttatgacgaagctaagaaaccttgacggtaatcaggaagattga

SEQ ID NO: 27898 - DNA, 1086 bp, Pectobacterium carotovorum subsp. carotovorum
atgaacagtgtttttgaaagagagcatgacaacatccaagttctttcactgttttctggcggtggtggtatggattttggtattgaatcagccggagggaaggttgtttttgcaaatgatattgttgaaaacgcttgtaagactttagagaagtattttcctgaatcagaagtcaggcttggcgatatatcaaatatccaaaatttcccacatgtcgatgttgttgttggcggctacccttgccagtcgttttcgatggcgggtaacaggaaacctgatagcgatgctcgaacgaatctttataagcaatttttgcgtgtattaaatattgttcgtccaaaatattttgtggcagagaatgtgtcagggttgcagcagcttggcgcaggtagttttttagaacaacagcttacagcatatcaacaagctggatatcaggttagttatcatctggttaacgcgaaggaatatggtgttccacaatcacgtaagcgtttatttattatcggtgttagaaacgatttagggcaatgttttgaattccctccagcaacacacggtaagcagaaccagaagaattctcacctaaagccttatgcatcacatggtgatgctatctgtgatttgcctttatggcctgaaggagagttctatgaacgccctcatgatcccgaaggtcatttttcatggtatttcatgtcgaggaatcgtaaggcaaagtgggatagcccagcttatacagtggtagctaactggcggcatgtgacgttacacccagcgagtcctgtcatgaagctaacatggtcaaatcttgatgatggctggaaacagcgctgggatttttccgatgaatatgaacacttggccgtagatgagactcgcccgaaattggaacaggccagacgtttgtcgtggagagaatgcgcccggatacagaccttttgtcacgattatgagccggtaggggatattgatgccaaatttactcaaataggtaatgcggttccccctatgttagctgaggttctctttagccatcttttttcaggcgctggcttgaagaatctttcgataaaaagcaggtga

SEQ ID NO: 27899 - DNA, 2784 bp, Pectobacterium carotovorum subsp. carotovorum
atgggcgagtcatttccagttactctagatgagtggaatacagccctggttaaagccattttttttgatccttcttatgtaggagcaacactgagtcgtattgatgcgaccggacgaatttttgataaattgaaaggctctcgaagcaaagaggaagctaagagtagttttttgaatgcatttggcgctagtgcagatgagatacaaaatcattttagagatgaattaaggattgatatattagcggggataaacggggttccgcctcattttgctatcttatatttaacgttacttgcagctagtgctgacgatcatactcatgatgaaggtgattttcgtgtcaggttttcccttttgttaggttttgataaaaatagaaaatttatctttagtgaacttcctaaaatgtggaagcgattagaaaaatggagctgtaataaaaaagaatgtgcacatcttatattgccagatcctcagcgtgaaacattaattggctattccaaacggctttcctttccttcctataaagatgatttattactaaggcgtttactattcagtaaaggcttggatagttattcaaaatttgaaataattagccaagctgtttatgaaaaaataaactcctttagcctaacgttcaggagtgagtttagtcagtttagcgacttgctattaaatgcttcattaaagcaggcctatgatagcccattttggggggctgtccgggacattacacggaacgatgaaagtcaaaaaatagcagagaatggtaagttttgtatacaattaggctctgctgatgtgtggaatccagaaatctatctattgatggatcagaaaggttcggatgtatttactgcgcaagagctctatacaatatcacagcagacaagtatttatactaagagttattatcaatccaatattaataatacattaatacacctttttttattatcacaaaaaaaaagaaaaggactttatcaatcgagaataggaatggcactgcgggcgggatgcttacctttgtttcaggatgattcaggctatatcagctctgatggtcattattttgatgatggtccggtttgtttggtgatagatagtaattatgtgaaaaatattagtgtggcgtgtaagggtattaacttaagatttatatttttgggggttaattcagaatgtgataaatggaatgttcttgtttttgacgcagtaagtcgacaagcactgactaccttagctgatgcacttcctgaaagtgcccaacgttttttgattcaaagttggatgccagcaaggcctcatcttattggtggagctagattcgggcaggcggtattacttaaccccgcgagcactccgtttattcgcatggaaggagctaacagtggaagcttcgtaattagcgattctatgggtaatgaacttgccacaggcgagctctcggccagtgacgaagggttatatatttcaccagagaaactggtttccattcacgggcaaaccctatgtcgctatttattaacagtggaccaacaaacaactcctctggtttatgatgtttgtgtattagaccacgctcctgatgctgtttatcgacgattaaaagaaccgagtaattggttgattgacggtcctctgggagttttagtaccatttgatgacattactcataacgaatctaactctggatttgtaaataaacagaagctaactcctctgggaggcgtgtggtcattatggcaacataatgaatcacctcctgcagaacgggaagctatggggttgcattctattcccgtggcacttgattggttagctgaagcgctggcactacgttttcaaaggcgtagcacgctgtcttttgatgagctgagtaaacatctcacacccgtttccagagctatatgtattcctgtctggcgactacgccgaatgctatttgtgtctggtttcctttctgtggttgaaagtcgatatacaccttatcctttagtaatacaggcaccccgtacaatctcagtatttgacgagaaagcgggtacagtagctcgtatttgtggaatgatgacaaaaagtgaacgtaatcaactgcaaaatgcactagtagataatgaacagcttaaaaggtggtcattgagaggccatgaccttgctataggctgtgttgagcttaatttatcaggtgttgagcgtattgaattgctgattgaacagttaggtttgcaactaatcaccaaagcagatttttctgtcagtccattaagtggtgtgatctcgccaataaccaaaatagaaaacatcccaatgctgccagccaacatcaatgtgtcggcttggcaggaagagaaaaataagtggtctgaagagtcgacgttaatttaccccgctagtaatacgttaattcgttgtagggaaaaacagcgcaatcgctattttatcactacccaaaatggttgctggcagactgacagttttgcttggggattgatggctcagactatattttcaaagaaaaaattaggcagccagagccataacggcgatctctgttggtcaaaaagtctaatagcgttaccgctttctctcacacagtggtggttacattttgctggcggctgtctttccattggcgatgatggtcaggtttcatttgtcggcggcggtagttctatctggggcgatataggtcgttcagaaattactacgcaagaatatggcgaccgggccattgttcgccgctcgcgggcgctaaagctacgccgagggcgatag

SEQ ID NO: 27900 - DNA, 2823 bp, Pectobacterium carotovorum subsp. carotovorum
atggttaaaaaaaaacgagttataaaagaacggctgaaccagatgtattgttttggtactgagcctcatgaattaatcagctgcctaaaagagtgtaagaaaaagcttattatagcaggtgctaaagcagataatttacctagaacacttcctcagaaattatattttctaagtacgctacagccaaaagctcggctagttattcagacatggttccgtactaatgtactatttccggaagtggatgagcctgaaaaaattcttgatcagcttctgttaaaagagcgtaacgagaacaataaaatagaagcatcaaaaccgttatggcgcgccattttagggttctatgtatctcaatcatgtcctgaaattattgagcgatttctcaatgacgaatcggtgctgacatctcatgatgatgttgaagaatacactgagagtctgccggaacatcaagtcgtcaatgtaacggaggatgatatagaacaatgcttactaattagccaggggctcaatgatctaccacccgaccgaatattaccgatgtttgttgctggccttgttgatacgcttaatggtgagcaagaagcagccagcgcatggaaagaaaagctatccacacatgctatccctatggcgcaaaaattcgaaagtattctcactgaatttgagttaactcatacacggagggaagctaatggccttgaggtttcatcggcagagtttattacaacagaggatatgaatgactttgtcgtcgatagcatagcttttatcggtgtcgttaccaaactgcttcctaatgatgctttctttgtttcacctattgccttgcttattaatgataaagtttggtcaatttctgaagaacaagcgaagatcctataccctcatcgtggtgaggttgttggatttataaacaattacaccaaaagttttagtcagggagagctaggggtatggctgtcggaacatcgaccctccgacaagcctgctcaatacgtactggctgactaccagtcgcgtgtatatccagtcgtcaggattcctcatttatccagtacccccgactctgtcagagcgtggttattaactcagtatcaaccacatgatgaatcacctgctatttttttgctggatgatggggtagcgttaagacttcccagtgatctatctgaccctagaaaatatgacttcgatgtgccacttgatagctacagaaagttggcctgtattgaattacattcacagaaaaccaccattgtgactcaacttcctgtagccagcgaaaaatacgattgtgcacccgcgggcacatggataaaacgtttgatgaagctaaatcattcatcaactaactttcctgttttcaacaaaacacatttaaaaaatttaactcactttattactgagcatgagccagagagtaatgcctatctccgtgctttggctcatcttgagcagattgctgattcaagagaattgttggacgatatggttcagcgactactgaaattgcccgtaatagatgctcaaattaatatagagaagaaagcgattctggctgattatgaaagtgaacaggaacaattaagacaggcaattgcttctctggcagacaaaaaagcacaacttgaatcggaaatcgataagcaaaaaaaacatctaaaaactgaaatagagaaatcaaaaaaagtgattcgccagcaggaagcagaactggattggcgtatcagacaaaccttcgagaatgcgtcacaagccggtatcgaaacactagcacaaacggccttgtttcgtgcactggtcgctgatgtaacggtatcagtttctcaacccgagtttatagttaaacctgaatccgccattgcaaccgcactatctataccgcagccagaatcgtatctatcaccaatagcaactgagataaccagtaaaaatcagctattgacagtgatggaagagcaggcaactgcaacagggctaagtgaaaccttattatcaggcattgtcgcagctgctaatgtaatacctattgttgggctattgggaaaaaacactaaaaaagcgctttctgctatagctaatgttttttcaggcggagttcgaggggaagtttctatccacggtgatctgtttagcatcagcgatttaatgaaatctcctgtattagtcagaagtgtggaaaacacatgctccatgactctgggagattttttgctgtatcagcaagataatcgactggctacggtggttgagttacgtggatttaaccgcatgccaccagagacattgttacctgagttgagtgactgccagatcagtgatgaacaagcatctggattttgctgggtggatcaacatcagacgctgcgccatctttcaattagccaaccgatactgtttgtgttgacgtttgctgttggtaaaagcactttcccattacaagggcctagtgctcgcagattgccgatgtttttgaccgaaagcatctggggtgatgaacaacccgctaatagcaatactgacatcacccccgcctatgtaacatcagtattatggcaatcgctttatacaagtatccgtcaatctaacgctcatcattataatgaacagcaagtcttacaaacaacactgaaatctttccattattctgatgaaaaatcacaggcgattaccaaactagtgtttgaatctgggcgtagcacatcggagaaaatagtttcagatattgagccattagcaccaacactaacgaattatgcccgggaagttacgcagggcgaggctgctgcggtacttgattgcctgtttcagtcatag

SEQ ID NO: 27901 - DNA, 5943 bp, Pectobacterium carotovorum subsp. carotovorum PCC21
atgaataacccactggaaacatttgaatcaataagagatttttatatttcgtaccttgaaacggccttccgtattggttcatcagacatacagtctgaacggcgagcgttactggaacagcaagggacattatgtgccgatctatttcttgaaccgatgccacgatatcagcactatggcttaactatcagcgagttacgaaatgatgctcagggtcagacatggttgccagggtttaatgcgcaacaaagggcggcattcatcgacctctgtttaggtggacttctgccccacaataaaacggatccgactaagggacgttttaatctttatacccatcaactggacatgttgaaaagaggggtacagccagggaaaccgggcattgtcacctccggaaccggttccggtaaaaccgaatcatttttactgccggttctggcgcagatcgcaaaagaagccaccggctggccgcaaagcccggcgttgaagcgctggcaaccgtggtggcataacgtagcggataaacagcctagcttcatgcgcgggcatgaggccgcttcacgtccgaaagcggtacgcgcgctgatcctctacccgatgaatgccttggtagaagatcaactggtacgtatgcgacgggcactggattccagcgaagctcatgaggtcatggatgcgcattttggtggcaaccgaatcttttttggccgttataccagcgcaactaaagtaactggctggctcaaacatccccgactcagtgaagaaaaaaatgagaaaaaacgcgtggctaaaaaaatcactgagctacgtgagtatatgcaattaacggaagagacccatcaggaggcggtacgacaagcgcggcagaacaaggataacgaattatcgtttaatttccccagaaccgctggcggagaggttctcagccgctgggaaatgcaaaagacaccgcccgatattctgatcaccaacaccagcatgctctcaacgatgctggttcgtgaggtggacgatcctatttttgaacaaacccgacagtggattgagcgcgaccctgatgcctatttttatcttatccttgacgaacttcatctacagcgaggaaccgccggtaccgaagtcagctacttgcttaagcatttgatcaaccggctggggctggatcaggaaaaacaccgacacaaattgcgtattctggcctccagtgcctctttacccgttgaaggtcctgaaggcgaacaaagcgtcgaatatttatgggggatgtttggtcagcggggattaccttcaggagcctcctccagcgactggaaggaatgtattatcaagggagacccccttcccccgggcaatatgtctcttttccagggggacctggaggcgttttatcacgcagtgcttcagttacagcaagcaccacttacatcattacaacactggcagaatgtcgcctgcaccatgagaatggcagccagtgaagtctctacagagcaactggcgcaacgtgttgtcttacaggcagccaacctgcttgaaagtggctgctatacggacgatcattctccgagagccacgtcaatcaaaatgcttagttcacgcatatttagcgctcagcccaatagtgaaaaagcgctccgggcattaatctggttacgctcgactgagggagactggccgcaatggttttcacatgcctttcctgatgatatcggtgcgccgcgtttccgcgcgcatgcttttttgcgtgcacttgaagggttatatgctgcgccattgcccgcccctagcgctgcatcttcgcaagaaatcaatcaccgctattttggcgatcttaccgtagagtccggcttacgttacggcaaagataaaaaatcgcggcgtgtcgaattactctattgtgaatgttgcggtaatctctttttggggggtaaaccttcggtcttttccggttcagaaagtcgaattgaactgttacccaacgacccggatacggagcaactgcccgaacacgcaaaatcagtcatagtagaacgtcgatctgctgaagaatacgcgctatttatgcccgtcgtagaacgtttctggccgaaaggcgacgaaacgttaaatggcgacgatgctttcggtacatggggcaaagccagctacgatccatttaccgccaccattcaacacccagtatcgctcttaaaactgctaccggaaaaccatatcgcgggctggttctattatgtcaaacccggtgaatttacctccccggaaagaggccagtcatccagccagtcgccgggaacggcgctaccttttcagtgtccggcatgtggtacatcctacaaatacggcaaaggtaagctctccccaatccgtagttttcgcgtcggtttttcgaaaacgacacagctactggccagctcgctaatggcggaactacagcgatcgggtaaccgtgagcaactggtaacgttttcagacagtcgtcaggatgccgccagggcggcactcgatctggaatcgggtcatcatgacgacgtcagacgagaaattgttgtccattctctacagtccattgcggctgataaaccgtcccataaccaactaaaaatacgccaggcagagatagagaaccggaacaaaacgctgattaacctcaacgtaaggtcggatgaagaagaggatgagctggatcgactcgctgatgaacgaaaaaaaatcagagcgttattatcaaaacctgaagctgacagcattcctctgcgtgaaattctcgaacctgaatcaccagatgcaggccaaccgcttggcctgctgttaagggcgcaggtagatgcaggcattcacccttccgatcgtactggtattgcgccggttcctgatcctgaaaaacatgaagaaggcacgctgacctttgcatggcaacaactctttgaaaagaacgcgcagggggcgtggtgctggaaggcgcttccatcctatgaagacaacctgctggtggcacgacaggagatttcacgcgatctgaaacgactggtgggagaaagcgtattcagtaaaacctacttcgcgctggaagagtctggctggggttatccctgccttcccattaccggaaacgactcacgggaacagctcgcgatttatgacgcaatgtttcgagtgttggcggacgcataccgggttaccccttcacaatacacaacaaaggaaacacgctggagttcagcgcgcgatgtcaatcgtagaaaccgtctgtaccgttttacgcaggcaatatgccagcgttcgggaggcgagcctttatctttaattgatagttttctgcggcgactggagctggtgggtcatctgggcggcattattgatattggcaaaatgcactttcggctggcggaacctaccgatcgcgtctggcgctgctcccattgcgggcgtatacacatgcacaccggtgcgggaatttgtactcgctgccactttcctttaccagaaacgccgtgcagcgaggcaaaaacgctccagatgcaacactatctcggcaaacgcctctcacattcatctggtgttcaccggatgcgctcagaggaactgactggaatgaccgaaaacccggcggcaaggctacgccggtttaaaggtattctgattgccgacgacgatgatattttaccggagggaatgaaagattttgcgcccgatcgagaccttgaccgggcagctcgcgtggtcgatgtgctttccgtaaccacaaccatggaagtgggagtggatatcggtgatttacgcgcggtctttcaggctaacatgcctccacagcgctttaattatcaacagcgtgttggacgtgccggacgacgcggacaggcgttttcattcgtattaaccgcgtgtcgcagcaagagtcacgatctgttttacttccgccatccggaaaaaattaccggcgacctccctccgccaccgtttttgaccacaaagctggaaatgatctgccagagactggtacgaaaaatctggctggtgtcgacattcaaatggttaaggcagcaaacggaaaaagccgatcacccatggccggttgacgactacgcgcacacccctgataaccacggtgagtttttcccggtacactggctgaaagaaaaccaggcggactggctgccaaaaatccggcgggccatcgaagcaactatcctggcgcgcgatgagtttgcccggacttgcacgcagcaagacccccatttgttccagaaaattattcagcctttgacgccggatcaactgattcaggatattaacgccgtactgaacgacagtgcgatggaggcgaaagggctggcagaagcgctggctgaacacggtaaattcccaatgtatggcatgccgacccgatcacgcctgttgctgacaaggcctgtcagcacaggcgaaaaagagatcgaatttgccagcatggatcgcgatctggatattgcgatacaggaatttgcccccggaaaaattctggttcaggacaaacgacgctactttacggcaggttatagtggaatgcttaaacagagcagaaaaaatccacgatcattttattcaaatgcctgcgaaccgggtgaactcagaataatgaccgcctgtccggtgtgcaacatctgggcccctgcaaacgcgcaggctaccgaatgtactatctgcggcgccgttatggataaagcggaacgttatcaatgctatgttccttatggatttatcaccacgctggaaccaaaatcggccaaagaggattttgatcagatcctgaccacggccagtcgtgtatcaattgcagaagcctacactttttctgcaatgccagagcctgacgttaatgtggcgatacagcttcagccgcagacatgtctgcaccgcctgaatcggggaatttataccgataaaacatggcgtggtttcaacgcaacacaggggagcctatcggtccctttcagaaaggaggggacttaccagccgctttgggcgaaccgggtttggatggatagtcaaatcattgagaccgatctgttagttaaaaaccgctttaccgatcgaggggaaaacctaaacacattttatcttgccgcgcctaaagtgactgatctactggcgctgagggttgctcaaaccccgccgggtctccggctacagtattccacgctaaccccggcattcagggcggctgcgctctcggcatcttttatcattgttaactatgcatcaaaagagctgctggatattgatcctgaagaaatcgaaattctggaaccccgcgttcaaatgctgaaaaacggtaagtctgtaccggttctgcaaatggctgatcgtctggttaatgggtcagggttatgtgaacggctacagcagaagggatcatccggttctctcattatccttgagatcatgaagaagattttaaataacaaaacggcctacccactagctgagtttctgcaacccgatcatcgcgaacgctgctttcaggggtgttatcactgtctgcacaggtacggaaaccagccgtatcacggattgctggactggcgtctgggactggatgtcattcaacttcttcaggatcaaacctataacgccgggctgaacggtgattttacatctccgggcgtctctgactggccggaaaatgccctacgattagccaaagaggccgcttcgctatacagcgacagtgacgtaaaagtgatggggaatatacccgtgattcgtaccggggacgggcgctgggccgccgtactacatccattctgggatcccgatgctgcatttgttgcaaaccccgaacttgaggcattttcatatgaggtggacgtagacgcgacgaatacttttgcattgtcccgccgcatggggactgaaatggcgaaattacggactcaggcgtcctcatctcaggagtga

SEQ ID NO: 27902 - DNA, 1086 bp, Pectobacterium carotovorum subsp. carotovorum PCC21
atgagcagtgtttttgagagagagaacgataatattcgggtactttcacttttctccggttgtggtggtatggattttggaattacctcagctggtggagacatcgtctttgccaacgatgttgtagagaatgcctgcaaaacattaggaaattatttccccgatactgatgtcatacatagcgatatctctcaaattcagtcttttccagatgttgatattgttgttggtggctatccttgccagtcattttcaatggcaggtaacagaaaaccaaacaatgacgacagaaccaacctttataaacactttctacgggtattagagaccgttcggcctaagtattttgtggctgagaatgtttctggcttgaaacatttgggggccggcagttttctggaacaacagcttacagcatacaaagctgccggataccaggtcagctatcatctggtaaacgcaagggcttacggcgtacctcagtcacgcaagcgtttgtttatcattggtgtcagaaacgatctggggcaatactttgaattcccggctgaaacacatggtaaagcgacaaaaaagaatcctcatttaaaaccctatgtttcacatggtgaggctattagggatttacctctatggcctgaaggtgagttttacgaacgaccacacgatcctgaagggcatttctcatggtatttcatgtcccgaaaccgtaaagctcaatgggatagccctgcttacaccgtcgtcgctaactggcgtcatgtgacattacatcctgccagcccggtgatgaagttaacgtggtcaaatctggaggatggctggaagcagcgctgggatttttctgatgaatatgaacacctaactgcggatacttctcgtcccaaactggaacaggcaaggcggttatcatggcgggaatgtgcacgaatacaaacttttccacagggttttgaacctacaggagacgtcgagtcaaaatttacccaaattggtaatgccgttcctccactactggctgaggtactttttcggcatttgttttctggggctggtttgaaaaagatgacagcgaacggtaattag

SEQ ID NO: 27903 - DNA, 2766 bp, Pectobacterium carotovorum subsp. carotovorum PCC21
atggatgattctttcccggttactttagaacaatggaacgctgaactagtaaagatcgtctttcttgagtcttcgcatacgggctcgactttaagtcgaattgatactacgggacgcatttttgagcaacttgcaggtccacgtagcaaagaggatgctaagcgaagttttctggcttcgtttggaaaagaggcgtctaaaatccaggctgctctcaaggatgagtcgcggttagatattttagcgcaactaaaaggataccctacttattttgccattttatatttaacattacttgctgccagtgctgatgatgatacgcatgacgaagggaattttcgggttcgattttctgtactgcttggttttgataaaaagaaagaatttatttttactgaattacccaatttatgggaaagattagaaagatggagtagtagaaaacaaaactgtacccgtttagtcctcccagaaccatcaaaaaatgaaagattgattgggtattccaagagaattgctttcccctgctataaggatgaggtttttttacgggacatactcgtcaataatgcattagatagtcattcaacctttgagtcagttaataggttagtacatcaatatatatcttgttttggtgaagtttttaaccaggagtttattgagttcagaacattactttcaaaggctgcaatgcagcaggcttatgactctcctttttggggcgctgttcgtgatatcactgtacatacagagagaaaacaactcaaagagaatggtaaatattgtattcacatggagtttaacgattcgggttatccagaaatttatcttcttatggatgacgctgctgttactgcctcagaaattcagcattattactcattgccgaatgaaatagagaactataataatatatattacgaacaagatataggcaccacactaaataccctggatttactattaaaaaaacggaagggttatctctataaatcacgagtgggggctgcactgcggtctgggtgtttgccactttttcgtgatgatttttgtcatattagttcagaaggggagaattatgataattcttcactctatttaatacttcaccataaatatgcagacagtatttttacagccttgaagaaaactgacgaaagagcacaacgttgggatattaaatctaccaaatggtcgatagtttcttccgataaagttgacaggcaaacactggataagatagtccatttgttaccagaagaagcccatcgttttctcatacagggatggcggcctgcccgacctcgtatgtctggcgcagcgcggtttggacagtctatactgcttaaccctgccagcacccccattattcatatgtctgaagtactaagaggatgctatgtcattagcaataaagacggagaagaattaacccatggctcgctatctcagggggctgaaggattattcatttccccagaggaactgatgggaatatctggtcaggcattttgtcgctataaacttacgttggcgtattcagatatccctataaattttgatgtacacgtgttagatcatgcgccttacgccacttatcgtaaaattacagagccacatgattggctgattgatgggccatcgggagtattaatggcgttagaggatacggcagtgatccccccactgaaacgcgaagaaccaatgccattgagtggtgctcagatgttatggcagtatgaaaatggtcttcctgtaacatgtcaatatactgaattacataatatacccgccgcatttgactggatcgctgaggcgctggctttgcgttttcaacgccgtagcacattgccttttggtgaattaaaaaaacatattgaacctgtatcgcaggtaacgagggtacctgaatggcaattgcgtcgcatgctctttgccgctggctggctttgtgtagtacaacgacgtcatgcgccatatccgttagtctcattggctgaaagaaccatttctgttgatgtgactgagcagggaattgttgcccgaattctggggatgtttacaagaagtgaacgtaatcttctacaagaggcacttaataacggtgagcgaatagggcgtcggttagttgaggataacggcttttcaatggggtgtattgaattgcatctgtcagccagagagcgtgtccatgctttcattgagcagtttgggttacgtttggttaatcatgacgatttacccgccaatgctttgagtggagtattgctaccgtcgtctcaaatgcagtttatcccgactttacccccggatctctatgtgtcgctttggcaagctgaaaaataccaatggtcagaagaacagcggctaactcaaacggctaataacctattgatacgatgtcaggaaaaacagcgttatcgttattttattcggcagaacgccggatactggcaaaccgatagcttctcctgggccttaatggctcagatgatatgtacaggtgaaacgtttggtgtgcaaaaaggcgatagtgactggtgttggtcaacgaaaatcattgcgttaccgccctccgttttacagtggtggacccacgttgctcatgggtgtttgtcgataacagataatggtggctacttatttgcaggaggaaaagttccactctggaacaatgtaataaccttcccctcctgttcacgagcgttggcacgacggagcagagcattgataacacgcaagctgcgcagaaccttacagtaa

SEQ ID NO: 27904 - DNA, 2796 bp, Pectobacterium carotovorum subsp. carotovorum PCC21
atggctaaaaagaaaagtattatcagcgaccggctgggccaaatgtaccacttcggtacagaatctcatgaattgatcaaatgcctgcaagagtgcaaacaaaggctcaccagaaatggcgctaaagcggataatttaccgaaaggaccagagaaaaggttgcattttctccgtacgttaccacctaaggccaaacctgttgtatccgattggcttcgtgaaaatttaacgttttctgaacgaaatgatccacaaaccgttcttagggagctgttagaattagaagcagaaagcaacacggaagatattgaactctgtaaaccgctatggcgtaccattctgggattctatatttcttctgactgccctgaaattataacgaaattcctgaatggtgaagaaattgatttaccccaacatggtgtttctgactccttgacaattaatgtcactgatgaagacattgaacaatgtgccttaattagtcagggtaaagaaattcttatgccagcgcgcactattccaatgtttgtcgggggattggttgacgcactcaagggaacgcgtacaaccgataatcgatggcggacaaagctatcagaacattctttaccgctggcgcgaaaattgggtgaacttatcgatcagtttggagcccgcaacgaccgtaagacaatggatggtactagtgtaatacaggctcttcccgttgtttccaaagaaatcgacggtacgatggacgaagttattttcattggaaaagtgttagcgctaaccgcgtccggtgctttttttgttacgccgattagtctgttaattgatggcaacctacgagacctcccagaggaactggtaaaagattttttcccccatggtggtgaagccattagttttgagaactatttcagcaaaaaatttactcggggtgaaatggcaatatggaaagcccgatatcaaccgtctgataaatccgcgcagtatgtcattactgactacctgtcgcgcgtttatcctgtcgtcgcgctgcctcatacctccgatgatcctgatgctgtcagagagtggttactcaccagctaccagccgcaaaacgatacgccggtcatttttcagctaagtgatggcttatccttgagattaccgggtgacttgcctgatcctaaaaaatatgactttgatatgccgctggagagttatcgtcaggttcctcagacactacttggttctcatgccctcacggtgatcactgaactccctcaggtgagtgaaaaatatgattgcgctgaagccagcacgtggatcaaacgcctgcttaaacgaactgattcagcaaaagatttccctcaatttagtaaagggcagctacaaaacttaacccattttattgctgaacatgagtctgataatgaggcatcctatcttcgcgcagtatctcatctggaacagatagcagatacgagatcctttcttaatgatacgactcaacagttactggctttacctgagattgaagcgcaacttaatattgagaaacaggaaatattggctcgttacgaagacgaacagctccagattaagcaatcaataacggtattatctgaaaagaaaatacagcttgaaaatgaaatagccgatcagaagaaaaagttgaaaaaagaaactgatcgtattaataaagcgctacgtcagcaagaaaatgaactggaacaacggataaaaaagaccttcgaagccgcatctcaagcgggagtggaaacgctggcccagacagcgttactgcgggcgataatcaaaaatgaaacagcgcaggagcaaccagcccaacaacgaatagcaccagaacctgtagccgaatcagcaaattctaatttcccattagctgtattagcagagacgaatgctctgactcgcaagcatcaattatcatcggctatagaaaaacaggcactggcggcgggactaagtgaatctttattatccagcctgattgccgctgcgagtgttacacccgcaatcggattgatgggaaaacagacgaaacatactatcgcctcgttagcgaaccttttagccgggaatgtttggggggaagtatcgatacatagcgatcattttagcttcagtgacttaatgaactcccccacgctgatccgcttatctggcgatactctcaccatgacgctgggtgattttttgacccaacaacaagaggcagggctggcgagcattgttgaattgcgtggttttaaccgcactccgccagaaacgctgctccctgaactccacgattgtttattcagaactcctcatcttgccgcatgcagttggacggatcggcggcaggctctacgacatttgcccatccgacacccgatactttttttactcacattcaccaccgggaaaagcacgtttccattacaggctccccttgctcaccagctacccctgtttctggcagagaatatatggtcggatgaacggccatttgagcaaaatgctgacatcacgccttctcgtattaccccagaactatggcagaaaatctatgtggacaaccaccagccggagcaccaggcttgtgcgccatgggaagagctaaaagcagcgctactctctttactccctgatgaacaagcgcaagccgttgcccgtctggcttacggtctcggccgtaatacagcacaagatattgcgaccacggttgacgttcttgccccggaattagggccatatgttcaggaaatgacgaacggtgaatctgccagcgtacttgagcaccttttccagttataa

SEQ ID NO: 27905 - DNA, 5952 bp, Pragia fontium
atgaacaacccattagaaatgtttgaatcaataagggatttttacatcgcttatcttgagacggccttccgtattggttctcctgccattcaggagtatcgccgagaattacttgaacaacaagggacgttgtgtgcggatctatttctggaaccgatgcccagatataaagattataatttaaccattagtgatctacgggatgcctcgaaaggggatacatggctcccgggatttaccgttcagcaaaggaccgcatttatcgatctatgcctgggcgggcttttgcctcacgatcccaagaatgcgaccaaagggcgttttaaactctatacccatcaattagaaatgttacaacgaggtgtgcaatctggcatgcccggcattgttacttcaggcacgggctctggtaaaacagaatccttcttactgcctgtgctggcgcaaattgccaaagaggcaagtcaatggtcgcaaagttccgcgcttaaaagttggcaaccatggtggcgtgaaccaaatgcccaacccacctttatgcgagatagagaagctcccacttcagggagacctaaagctgtgcgagcattaatcctctatccgatgaatgcgctggtagaagatcaattagtgcgtatgcgcagagcgctcgactctgatgaagctcatgaggtaatggattcccattttggtggcaatcgtattttctttggtcgttataccagtgccaccaaagtgactgggtggttggatcatcctcgacagggtaatgagccaaaagagaaaaaacgtgtcgcaggtaaagttgctgaattacgtgaatatctgcaatttgctgaaaagacccataaagaggctgtgcatcaaggaaacctcgataaggatgataatttacaattcaatttccccagaccaggcggaggcgaagtgcttagccgctgggaaatgcaaaagatgccgccagatattcttattaccaacaccagcatgctttcaactatgctggtgcgtgaaattgacgatcctatctttgatcagacccaacaatggattgaacacgagccgaacgcctacttttaccttgtgctcgatgaactgcatctccagcgcggcacggcaggcactgaagtcagctatttgcttaaacatttgatcaaccgtttgggattagatcaaccacaacatcgacacaaattacgaatcctggcttcgagtgcttcactccccgtgagtggtcaggagggtaatcaaagtattgactatctatggggcatgtttggccaacgcggattaccaatgaatgccagtgcgaaggactggaagacttgcattgttgatggaaaactcgaggaactggttgagataccgtatttttgtggcgatctcccagcgttttgtcaggcggttgagaaactaaagtcaacggaggcatctgtaatatggtgcgacatagctcgtagcctgggatgctaccgcgatggtgttgctatagaagaattggcgcagcatacggtcttattggctgccagaatgctggaaaaaggatgtattgatgataaaaaatctctacgcgcaaccgctatcaaagcactggcaggcaatctatttggggagcatcctgatgcacgtaggggggtcagtgcgctaatcttgatacggacgatggttgatagttggcagcagtggtttgcacatccttttcctgatcacatcgtactaccgcgtttccgtgcccacgcatttttacgcgcattggaaggattatatgttgctccgctgccatcaccgccacaagcagataaagacgaaagaaaccaatggttatttgccgacattactgtcgaatcaggcttccgctatggtaatcgtaggtatggtgataagcgatcgcggtgtgtggaattactctattgtgaatgctgcgctacgctatttctgggaggtaaaccttccgctttctctgcgatagatagccgtcgtatagaactattacccaacgatcctgataccgaaaaacttccggaacatgctaaatcggtcatgattgagcggcgctcagcagaagagtatgccttatttatgccaaccatagatagattctggcctttgggtaaagaaaaacttgcggatagtgactcttttggtcagtggcaagaagcaagctatgatccgttcactgcaactattcaacctatatcacccgtaaaacccttagctgaaactgatattccaggctggttttattatgtaaaaccaggtgacttttcctccccgaaaagagatcaatcgtctaatcagtcccctggttcctcgctaccttttcagtgtcctgcatgtgaaacctcgtataaatacggtaaaggaaaacagtcacctattcgtggattccgggttggttttgcgaaaaccacacagttactcgccagtacattaatgacggagctacaacgttccggcgatcaggaacggttggtcactttttccgacagtcgacaggatgcggccaaagcggcgctcgatcttgaatctgggcatcatgatgatatccggagggagatccttgtctattcactgcaagatctagccgtaggcacatgctcgcatgaaaaacttcaagaacaattgtctgggctagttaagcgcagaaaggaattagtcaataaagaggtcgccgatggtctgacgccagaagaagatcaggagcttgagcatttatttagtgagaggcgcatgctggaagaaaaactggagctgccactggccgacagtatttcactgggtgaaatactggaaccctcagcgcctgaatcgggtaagcggcttaatcgactgctggctaaattggttgaagttggtattcacccgaccgaccggaccgggatcactgctgttcctgacccgtcaaatcaccacgaagatatcaccacttttgtgtggcagcagctatttagtcaagaccctcaaggggaatggtgctggaaggctcatccttcttatgaagatgatctggatgttgcgcgcaaagagatctcgtgggatttgagaaaactggcgggtgaaagtgtattcagtaaaacttacttctcattggaggaggccggatggggctatccttgccttccaatttctggtaactatacacggcaacaactggcaatatttgacgctatgttacgtgtactggccgatgcctaccgtgtaaaaccatcacaatacacgaccaaagaaacactctggaattccacaaatgatgtttctccaaatagtcggttacaccgttttaccagcaggttttgccaacactctggtggcgaccatacctctataatcgacaaatttcttgcactgcttgagttagtgggccatcagggcggcattattgatattggtaaagtacacttccgcttggccgatcctgccgatagcttctggcgttgcgacaagtgcgggcgtgtccacttacatttgggggcaaaaatttgtacccgctgtcatgctccattacctgaaataccgtcaggcgaagccggaatgttgcaaaaacaaaactatctcgggaaacgcatttcatactcatccggtatccgtcgtatgcgttctgaagaacttaccgggatgacaggaaacccggcggcaagattacgccgcttcaaaggtattttgattgcggatgatgatgatattttaccaacaggtctgaaagacttcgaacctgacctggatctggacagattggcccgcgttgttgatgtgctttctgttacaaccactatggaagttggcgttgatatcggtgatttacgtgccgtttttcaggctaacatgccaccacagcgttttaactatcagcagcgtgttggtcgtgctgggcgacgtggtcaggcttttgctttcgttctgaccgcatgtcgtagcaaaagccatgatctgttttacttccgccatccagaaaaaataactggcgaccttccacctccacctttcttaaccaccaagctggaaatgatctgccagcgactggtacgcaaagtctggttggtggctgcgttcaaatggttaagacagaacgcaattaattcacaccagtcatggcctgtggatgaacacaggcaaaaacccgataaccacggcgagttttttcaagttgactggctaaaagaccatcggatcgactggctaccacgtatccgtcaggcactaacagcaacgattagagatcgtgatgaatttgcccatgtctgcatgccggatgatcaatccttctatcatagcattgtacaattattaacccccgataatctgatacaagatattggtgctgcgctaaacgacgatgcgatggcaggtaaagggttggcagaggcattggctgagcgagggcaattcccaatgtatggtatgccaactcgcacgcgtttgttacataccagagccattaccactaatgaagatgatatccagtttgctaacatggatcgcgatctggacattgcgatacaagaatttgcgccgagaaaatatttggtacaggacaaacggcgctacttaacggcaggctatgctgggatgcttcggcaacgctatcctaaatctatagaatttgattccaacgtgaatgaactgggagaaggtcgaacgatgactgcctgtcctgtgtgtcatgtctggattccaatcaatcatacgatcagcgagtgtaccacctgtggagcggtgatagatggtgttgagcagtaccaatgttatgtaccttatgggtttattacctcactggaggataaatcagtcaaagaggatgtcgatcaaaccctgactaatgctagccgagtttctattgctgaggcttactcattttcatctggggtagagtttgatgctaatgttgctattcaacttgaatctcaaatctgtcttcaccgtctaaatcgcggcacttataccgatgaacggtggcacggtttcaatgcgctacagggaaacttacgagttccctttagaaaagagggagtgtatcagtcattaacggcaaatcgcgtttgggtagatagccaattgcttgagactgatcctttattgaaaagacggttcacaccttcgcaggaaagtagaacttctttttatcttgccgcccctaaagtgacggacttgttggctctgatggtggttaatacccctgttggccttcagttacagacgcaggcattccgggccgcagcactctctgctgcatttattattgttaactatgcttcaaaagagttgctcgatattgatcctgaagaaatcgaaattctggagccacgtgtccaacgattagcggacggaaggctggcaccgatactgcaaatggccgatcgtctggttaatggttccggattatgcgagcgcctacaacagaaaggaacatccggtatgccgatcattcttgaggtaatgaaagctattgtcagcaacaaaaatggcttcccgctaaaagagtttctggacaatgatcatccgaaaaaatgtattcaggcgtgttatcactgcctgcaccgatatggtaatcaggcttatcacggggtgcttgattggcgacttgggctggatgttatccaactgctactggataaaaattatgatgctggattgaatggcgatttctctgctcctggtatcgctgactggcgagaaaatgccgtgagtttagccaaagaggctgcgtcactctttaatagtgaagttagaatggtgggccatattccgctgattaacattggcccagaacgctgggttgcggtgacccatccattctggagtgtggatggtgtttttacggctaatcctgagcttgaaagactattccttgagtggcaactggagagaaaaatgatcagtacttttgatctctctcgtcgcatgggggctgttatgaccgagctaagaaacccagacagtaatcaggcgaattga

SEQ ID NO: 27906 - DNA, 1086 bp, Pragia fontium
atgaacagtgtttttgaacgagaggataactgtattaaagtgctttctttattctctggcggtggcggcatggattttggcattgaaactgctgggggaaaggttgtttttgctaatgatattgttgaaaacgcttgtaaaacattagataagtattttcctgactcagatatcagacggggtgatatatcaaatatccataactttccgcatgttgatattgttgttggtggttatccgtgccagtcgttttcgatggcgggtaataggaagccgggtagtgatgctcgaactaatctttataagcaatttttgcgtgtattaaatatcgttcgcccaaaatattttgtggcagagaatgtatcagggttgcagcagcttggcgcgggtagttttttagaacaacagctcacagcatatcagcaagcaggttatcaggttagttatcatctagttaatgctaaagaatatggtgttccacaatcacgtaagcgtttatttattattggtgtcagaaacgatttaaggcaatgttttgaattccctccggcaactcatggtaaaccgagtcagaagaaccctcatctaaagccttatgcatcacatggcgatgttatcagcgacttacccttatggcctgaaggagagttttatgagcgtcctcatgatccagaaggtcatttctcatggtatttcatgtcgaggaatcgtaaggctaaatgggatagccctgcttataccgtggtggctaactggcgacatgtcacattgcacccagcaagcccagtcatgaaattaacatggtcaaaccttgaggatggctggaaacagcgctgggacttttccgatgaatatgaacatatagtagttgatgatacccgccctaaattggaacaagccagacgtttgtcatggcgagaatgtgcccgcatacaaacgtttcgtcacgattatgaaccggtgggggatattgatgccaagtttacccaaataggtaatgctgttccccctatgttagctgaggttctttttagccatcttttttcaggtgcaggcttgaagaacctttcgataaaaagcaggtga

SEQ ID NO: 27907 - DNA, 2799 bp, Pragia fontium
atgggcgcatcatttccggttactttggatgagtggaataccgccctggttaaagccattttttttaatccttcttgtgccgggtcaacattgagccgaattgatgctaccgggcgaatttttgatgaattaaaaggctctcgtagcgaagacgaagctaaacgtagctttttggatgcgtttggtaaaacgccatatcagattcgagctcgctttaaatgttcaacaaaaaatgcagtgcttacgcaacgagacggaattcctccctatttcgcagcgttatacctcactctactttctgccagtgctgacaatgaaactcatgagcaaggagattttcgagttaggttttcaattttgttaggttttggtgaattacaaaattttccatttagtgatttgcccgcattgtgggaccaactagccgattggagccggagacgaagagagcttaaaggtgattgcgctcaattaattcttcctgttccacctgcaagtgaaaagcttattggccattctaagcgtttatcatttccttgttataaagatgaaattcggcttcgtgatttgcttgctaatgaaaaactagatagctattcaccctttcaaaaagtaaacgaagctgtacatcgtcaattattttttttcaatgaagttttcaattatgaggttaagacgtttaattgttttttgttgagtgcatcttggcaacaggccttcaacagcccattctggggtgcagttcgggacattacacggcatgatgaaagccaaaaaatagcagagaatggtagattttgtatacaactagactctactgacgtgtggaacccagaaatatatctattaatggatcagaaaggtgccgaaatattcgctacgccagagatctatacactaccgcaacggacagatatttatactaagggttattatcaatccaatatgaatatcacgctgatacacctttcgtcactattacaaaaacaagagaaagggttttctcaatcgagagtaggtatggcattgcgggcaggatgcttaccgttgtttcaggatgattcaggatatatgagctctgatggtcattattttgatgatggaccagtttgtttggtgatagacagcaattatgtgaaatgtattaatgccgcgtgtaaaagcatcagtttgaaatttagctcattggggcttaattcagaacttgataagtggcaaattcttgtatttgacgcagtaagtcgacaggcgctgaatactctagcaacggcgttgcctaaaaaagctcaacgatttttgatccaaaactggatgcctgcaagaccccacctcactggtggggccagattcggacaggcggtattacttaacccagctagtactccgtttattcgtatggaaggagctaatagtggatggttcgtaattagcgactctgcgggtaatgaacttgctacgggcgaactctcggttagtgacgaagggctatatatttcaccggagaaattggtttccattcacgggcaaacactatgccgttatttattagtagtggacccaaaaaaagctcctctggcttatgatgtttatgtattagaccacgctcctgatgcggtttatcgacggctaaaagaagcgaataattggttaattgatggtcctctgggaactttagtaccacttgatgatattacttataacgaatctacctccggatctgtaaataagcaaaagcttacccctttgggtggtaaatggtcattatggcaacaaaatgagtcctcacttgcggaatgtgagcacattaatttgcattccattcccgccgctcttgactggctagcagaagcactggcgctgcgttttcaaaagcgcagtacgctgcctttggatgaattaaaaaaacatgtcaccttcgtatcaatggctgtgggcgttcctgaatggcgattacgccggatgttatttgcatctggttggctttctgtgattgaaagtcgctatgcaccttatcccttagtaatactggctgtccgtacattatcagtttttgacgagaaaacaggtacggtggctcgtatctgtggaatgatgacaaaaagcgaacgtaatatattgcaaagtgtactgatagataatgagcaggttaaacggtggtcattaccaggtcatgatcttgcagtaggttgtattgagttaaatttgttaggcattgaacgcgcagaattattggctgaacgatttgagttgcgattaatcaccagcgctgatttctctgtcagtccattaagtggtgtgatcttgccaataaccaaaatagaaaatatttcaacgttaccagtcaacatcaacgtgtcgatttggctcgaagggaaaaataagtggtctgaagagtcagaattaattgatcccagtagaaatgttttaatgcgttgtcgggaaaaacagcgcaatcgttattttgtgactactcaaaatggttgctggcagaccgacagttttgcttggggattgatggttcagactattttttcaaagaaaacattgggcagccagagccataacggtgatctctgttggtcaaaagatctaatagagttaccgctttctctcacacaatggtggttacattttgctggcggctgtctttccattagtgatgatggtcacgtttcatttgttggtggtagtagttctatttggggcgatatagatctttcagataatacgatgcaagtatatgttgatcgggccatcattcgccgctcacgggcgttgaagttacgcagaggtcgataa

SEQ ID NO: 27908 - DNA, 2817 bp, Pragia fontium
atggttaaaaaaccgcacgttataaaagaacgactaagccagatgtactgctttggtgcagagcctcacgagttaatcaactgtctgaaagagtgtaagcaaaagcttattatagcgggagctaaagcggataatttacctaaaacacttccacagaaattacgttttctaaatacactacagcctaaagctcggttggttatccagacatggtttcgtactaacgcactatttcctgaattggatgaccccgaaaaaatcgtcgatgaacttctgctaaaagaacgtaacgataacgatgaaatggaatcgttaaagccattatggcgcgctattctaggattttacgtttctccatcgtgtcctgaaattattgagagatttctcaataatgagccgatgatgctattccatgatgatgttgacgaatgcaatgagggtttatcagaggatcaaggcatcaatgtgacggatgatgatattgaacagtgtttattaatttgccaggggcacgatgtattgccatccgaccgcgtattaccgatattcgttgctggtcttgttgatacacttaatggtgagcaggaagctgccagtatatggaaagaaaaattatccaaacatgcgcttcctatggtgcaaaaactcgagaatattatcacggaatttgagtttactagtagcctgaaagaggctgatggtgttgatgtattaccggcagagtttattgcaatagaggatatgaatgactatgtggtagatagcatagcttttgtcggtgtcgttaacaaattgctccccaacgatgccttctttgtttcacctgttggcctgtttattaatgacaaactttggtcactttctgaagaacaagcgaaaatcttataccctcaccgtggtgaaattattggttttataaaaaattacactaaaaattttactcagggggagctaggtgtttggcatgctgggcatcgaccatccgacaaaactgcgcaatacgtattgacgggctaccagtcgcgcgtatatccagtcgtcaggcttccccatttgtccagtgaaccagactctgtcagagagtggttattaactcagtatcaaccacaatatgaatctccagccatttttttgttggatgatggcgtagcgttaagacttcccggtgatcctcccgatcctaaaaaatatgactttgatgtgccacttgatagctacagagaattaacctgtattgaattacattcacagaaaaccaccattgtgactcaacttcctgtagccagcgaaaaatacgattgtgcgcctgctggtacatggataaaacgtctgatgaagctaaattattcatcaactaactttcctgttttcaacaaaacacatttacaaaatttaactcattttattactgagcatgagccagagagtaatgcctatctccgtgccttgactcatctcgagcagattgctgattcaagagaactgttggacgatatggtccagcgactactgaaattgcccgtaatagacgctcaaattaatatagagaagaaagcgatcctggctgattatgaaagtgaacaggagcaattaaaacaggcaattgcttctttggcagataagaaaacacaacttgaagcagaaatcgataaacagaaaaaacatctaaaaactgaaatagagaaatcaaaaaaagtgattcgccagcaggaagcagaactggattcacgtatcaaacaaaccttcgaaaatgcgtcacaagccggtgtcgaaacactagcacaaacggccttattgcgtgcactggtcgctgatgtaatggtgccagtttctcaacctacagttaaacctgaatccgccattgtagccgcactatctataccgcagatggaaccgtatttatcgccaatagcaactgagataaccagtaaaaggcagctattgacagtgattgaagaacaggcagctgcaacagggctaagtgaaaccttattatcaggcattgtcgctgctgcgaatgtaacacctattgttgggctattgggaaaacacactagaaaagcgctttctgctatagctaatgttttttcaggcggagttcggggagaagtttctatccacggtgatctgtttagcatcagtgatttaatgaaatctccggtattaatcagaagtgcggaaaacgcatgctccatgactctgggggattttttgctgcaccagcaagataatagattggctacggtggttgagttacgtggatttaaccgtattccaccagagacattgttacctgagttgagcgactgcctgctcagtgaggaacaagcatctggattttgctggatggatcaacatcagacactgcgccatctttcaatcagccaaccgatactatttgtgttgacgtttactgttggtaaaagtacgttcccattacaggggcctattgctcacagattgccaatgtttctggccgaaagcatctggggtgatgaacaacccgccaataatactactgacatcgcacccacctatgtaacatcagtattatggcaatcgctttatacaagtatccgtcaatctaacgctcatcattctaatgaacagaaaatcttacaaacgacactgaaatctttccattattctgatgaaaaatcacaagcgattaccaagctagcgtttgaatctgggcgtagtacatcggagaaaatagtttcagatattgagccactagcaccaacactaacgaattatgctcgggaaattacgcagggcgaggctgctgtggtacttgattgcctgtttcagtcataa

SEQ ID NO: 27909 - DNA, 5841 bp, Pseudomonas aeruginosa
atgctggaccctattggaagtttttatcgcattcgggatttttttatttcatatgttgaaaccagctttcgaatttccgaccctctagcttctgaagcacggcgtgccctgctcaagaccagcggcatcctggccacagctccatttattgagccagtgcttcgctacgaatcttcggataaaaatcttgaggacctaattgaggaggcagatggcgtcctcaagccactgtcgctaaagggccgcaaggccttcgttgaactggctctgtctggtctgtttgatgggagctctgatgacggccctttactccggaagtcccaatacgcgccataccggcatcaggtctcgatgcttgaacgaggcattcgacctggccgccccggtattgtaacttccggcaccggctcaggaaaaacagagagttttatgcttccgatactggctgctctttctaatgaagcagtcgagtggcaaaaaccggaatccaaatatttgcaagaacactggtggaaaactccgaagtcccaatgggccccccggagagctggcgagaaacggccgagtgccgttagagcactcgtactctatcctatgaatgctcttgttgaagaccagatggttcgcttgcgcaagactctcgactcacaagatgcacatgaagtaatggatgctcgattcgctgggaatcgtcttttcttcggacaatatacgagcgctacccctgtaacaggctacgagcaacatcctcgcctcgcaggtgacaagcaggaagcgaagcgtcgagctcgacgcatctctagattgcgtaaggcgatgcaggatttcttctgcaaccagagcgcagcccgcaaatttgatgaaaattctgagcgtcagcaaggacgtattcgagagaccacgcgctacatcttcccatcgatagatgggggcgaaatggtttcgcgatgggatatgcaggcttcgccgccagacatactagttaccaacgcatccatgctgggagctatgctgtcgagagaaattgaagatgcgattttcgacaaaacccgtgaatggctcttatcagacaaagactcctatttctacctcgtcttcgacgagcttcatttagttcgcggctccgccggcactgagattgcctgcctaattaagtccctgattcagcggcttggccttgatcaaccggagcacgcgtacaaactacgtctacttgcatcttcggcctctcttcctttggaaggcgccgaaggtgttcagtcaaggacatacttacgtgatcttttcgcaccattcggcacaagcatcagcgaagacgatccaggttctaccgatccaagattttggaatgagtgcataatccagggtgtgccgcatatccctcccgcgagagcgggtggcattccttctgaaccattcgctcaattgatgatggctgcacttgaggggaaagatggatttgtcggcatactggatcggactcccgcattagaggctgctatatctaaggcagctgcagcgctgggtgttgtagcaacggcgcaagcctcgcttgagaagttgctagccgaagcggcagccggactactaacacatgcttgtaaaaacgatgacactatccgggctactacacccgaatcgattgctgctagggtatttgccccgggcagcgacgacactgagttggctctccgcggactgatgctggcccgagcgcttccagaggctaacgattcgcgggctagagttgcaggtgcaacgccagccttccgtgtccataccttcattcggaatatagaaggcctatttgcttccgtcaccccacgtcagcatagcgtgacctttagcgatttctctgtagaacggggaacttcgcattcatcccccgcaacgggtcaagcgcgaggccgccggctttttgagcttttatattgtgaagcatgtggggatttgtttgtcggtggccagcgaggccagagtagcggttcaactaatgctactgagctactgccgtcggcagcgaatctggagcacttacctgagcgcccaggagcagaatattacgatgacatgactttagatgagttcgcagttttctggccgcgacgtggtgactggatcggatcagataagggctatgatcaatggatgcccgcccatctcagtccggatacaggtgtagtggaactgggcgagactgcgaaggaaggaaatatagcaggttatctttattatcagacagaaacggcgattagcaaaggaaagaataagcctgttcagcaaccctctgcgcaaccgttttgctgcccaaaatgtggcaccgattactcaaaccggcctgatacaaatcgttcacgctcaccgatccgcgcatttcgtactggcgtgactaaatcttcgcagctagtggcaacggagcttttcgaactgctacatgctataggggccgagcctaaaggaattgtcttttctgatagtcgccaggatgcggctgggcaagctatggagattgagcggctgcatttgcgtgatctgcgtcgtgaaattctagttacaaccgcgagatcctacataaaagaagcatcgatagaagctctcagctcagctgaaataatcgagcttctgggtaaagctcatgctgcgagagataacaacgagatccgcaggttgtccggcctcttaactaaacagaccgaaaatgatgcatctagaactcaaaaggtaaagctggacagacttctagagttaagccaggatggttctattggtagaataacagccgagctagtgcggctaggtatatcgccctataagagcagctcatctagcatcaaagagctcccctggcatcaggagttcgagaaatctggagaagttatttcctacgacaatgcgctgtccctacctcaaatatctgaaataaatctagacatcattgatagtcaatatgaactagtcgacgatgtgattttcgccaatacattcttcgctctcgaggaaactggtctcgcctacccttgcctttcgagtgatgaagaaaatcaagcgttggatgcatggcttcgtatttttgcaagcgcctatcgtgttaaggaaaataagtattttgataagaacaaggtaaagctttggcaaagagggggcgacatcagcaatagtcgaatcaagaaaatcgcccaggcattgtacggtaactcactgtatattgatgaactaacgacggtcttatataaatttgaccgctctggacatcgcggcggcttattcaatattggaaagctattcctgaaagttactaagccgggtgatttattttggcgctgcaccaactgcgaacgtgttcacttgcatgaagggctagggatatgcactcgctgcgctacgccgctgccagagccaagtggaaaggttgaggagctctggtctaccaatttcctaggaaagcgaatcattcgcagcgagcgcgatggtgtggggcgcttccgcttgcgcgtggaagaactaacaggtcaaacagatgacttctctgatcgactcagaaagttcaagggtattttcgttgatgaagttagcgaattagagaggctagcttcagagatagacatgctgtctgtcacgacaacgatggaggttgggatcgatatcggcgctttacagactgtgtatcaagcgaacatgccacctcaacgattcaactatcaacagcgggtggggcgcgctggtcgtcgtgggcaagccttttcgttcgtcgtaactttctgtcgcgggcggagccacgatgcatattacttcgcacatccgcacgcgatcactggcgacccgccacctcctcccttccttgcgcccgctcacgacgccattcctatgcgtctccttcgcaagacttggctgcgagccgcttttaagcagctaagggatcagtgcgccgaacgaggtgagatatttcctggtgatctacttactcctccagatgtgcacggagaatatgtcactaccagagactattaccacaaccaagacatcgactggtctgctcgtttgcatgcggcactggcgcagacccaggcagtgcgagagcagttcatcaacgctgtaacctttgatcaagaacagcgtcaacgactgagggataagttaagcgtcgatctattaattagtgagattaatgaccaacgccctaacgctccatccgatgagatgggactcgctcgatttttagctgagcgaggtttgctgccaatgtacggtatgcctacccgcgttcgtaatctttacgtaggtcttcgcgaaagcaacagccatggcgggggcgcagagtacgaatggtcaacaatggatcgcgatcttgatttggctgtgtttgagtacgcgcctggggcggttcttgttaaagataagaagaaacatagagttgtcggatttacgggaaatctgactgacccacaaatacaggggcgagctatcgaagggatacgttcggtcaccgattggtgtgaatcaaaaacctacgtagccatttgccctacatgtggttcggcttgtcaaagcattgaagtacctggcgaggctttgaaatgcagtgactgccgagcactaatcccgaaggaatgcttcctgctctacgtgacacccgctgctttccgtactgattttgtgcccaaagacgagctcgatgagtttgaacgcatgtctttgcgtaccgttgcgaccgtgttgcgcgaaggcgaagacttggactgcggagccctaaaagttcgaagcggcgcaggcgtaaccatccttcagcttaacgatgggccgaccgatggaaagagtgatggacgccagtttactgttgatcttgttctggaccagagggtgccagtgcctttctcacctcaacgaccaccaattgatggcattcaagcaatcgagtcaggctggcgtcgttcaaataatacacaacgctggggcgcatctcagggggagcaatgtttcggcttgatctcgaaaaaggaaacggactctattcatctcgagctaacaagctttgacgagcgtctaactctaaatatggtggcccgcaaaggtgaattcatgcatttacctacccgagctgcagccatcagcgccactcaaattttggttaacaaagctgcactggccttagacgtttctccagatgaattcgaggctctcgagcctagactccgctcaggaagtccgatgttacaaatagctgatgccctaattaatgggtctggcctttgccgtcggctgggggaaccgggtgccgattcgcgcacacctcttatcgtagacttgctgcgtgagactctcacgaacaccaatgtatggcctcttcaggacttccttgggaccggcgccgatggagtgcacacagctcaatgccagacatcctgctaccgatgcatccagcgatacgggaaccggagatatcacggcttgctcgactggcgcttgggtatggcctatttgcgcgcactggtaactccgaattacgcctgcggtctcatccctggcgatgaaaggtatcctgagattcaaggctggaaggagcgggcctgccagcttgcggaaaacgtcgaagcaatgcgcaaaggcacagttcgctatgaatatctgcgacattcgggcctgccctgtctcagcgagcagaaggacggggctgaactgtggcgcgccgttgtaattcaccctttgtggcggcacacggaagtcggggcaatgcgtgacctgttaggcccggattggtcatcgtcgttaagatatctagatacctttgagctagaacgacgaccactgcgccgcctggcagccttaaagcaagaggaatcttaa

SEQ ID NO: 27910 - DNA, 2553 bp, Pseudomonas aeruginosa
atgaaccctcaatctcccaaaactttcgaagagtgggagcgctgcctagttcggcattttctagttgtgggatcagacggggatgctagtgatatacgctcttttgaggtaacccctactactttagcgctcgcctgcggggcaggaattgatcaagagcgaaatatcgaagaatcattcagaatatttatggctgggatttcaaatcttccaaaccggctgaatattggaatgcaaggagcatccacccgcgagctgcctaatttcttcatctatctcgtcatgacactgttgattgatagccagctggaaggaagtggcgacgggaatgaatttcgagggaaattgcggaagtggctaaattctgaacatggttttcagcagcttcctggcgtaaatataatgtggggggcgcttgggcgctggctggacaagcgagtcgacgaaggtttaccttatcgccgacttattctaccgattattccaaaaacttggtgccacatcggctatacgttgagattaaccttccctaataaggttgatcttcggctgatggaggtttttttagcgaactgccctcaggctgaatctgacccaggtctagtggtaagaagctttccagccatattactcaacgatcgagcatctgatgcacttaaatcagccttcagtgagttccgcgaatcctatttgctaggccggcgcgccctagctgacctacgtttctggcgcttgcttcgccgcgctcacgcccactctgaaaagctcgagcgacacagcgtagtggtcgacatgatgtttgatgctgacgggaccagggagtatttttcttctgcggatcaaacgagtcaggcagtgtttcaccctaccctatttctcgctttgaacggcgtttctgccgagtcgagcttgaatttgagcgccgcagttaaaactggtctcttattctttcgacaaattggtgtaggccgctggcgagcagaggctcggctctgcagcgctccacagggtctccatatggctctggcgcgaaggcatgtgtcacatctaggcagtcgattggggcgattagtgtgcgagggtgattggtttttaacaaccactgtgcacagctaccactccctgcatgaaactcttactcctatgggttttttcccgcgcgcttccgagcagatcgtacgacctcgtctctcaggaggtgtacgtgtagctcatggttggctgggacgaccaggctttttaccgcacattgagtccgatacgactgattacataattaacccagtagacgtccgactcgagaaagaatccattgtgatggagggcgggcagctaacggcattggttccggtcgagggctcctttgtcatagaaccagagcgtgaattagtagagaaagctgccccctggcggcttcgagtgcagttgattcgtaatgcattgccccatctcggcttgggttcgagtgctcgatataagttggagcagctgaacgactggtcgcgagtctcaccttcctccgtcgttttcgaagggcaggatcctttagtttgggaagagatcgtctccgaaagcgaagacttgcttgaggcgatctacgccgacggtgctagtggatgggaagaggcagcgcttgtcactcttctacgaggtgtcgatacaagcacatgggacttacttcgctgtcttcaggacgcaggcattatcgagcctaggctgcgaaacggttggaaaggccgtgcctggactcttgtagcgcctcggctggtcggagtaacgaggggtaatcagaacatcgctgtcatcgagggggcagtctgcgcatcacttatcgacgagttccggtctgtggtcgctaggttgggtggccagtgctttaggcggaccggtgtaagcccttggtctcctccagtaatcggggcgagcgttgcatccgttgaggccctggcagaaaaaatggattggccgttggcacttcaaccgatgatgcctgacgcagagccactggcattcgtcgagactcatcgcatgtcagacttacatgaggtcgcctctgcatgggattggaatgagagacgattcaaggaaagtgcctcccgcgaagagccatttaagctgactcgtttctctcatcccggcgggcgagatcacgacctctactgcctgacgagtcgcagtcgcctgatgaattatctgtcacgtacggctgcaattgctgctgcgcacgcctcttcgcacacccccctgtttgagcagcgtgacgacaatctactagtacgcctcacttgcgacggggggcttcccgacgcggtcgcggccggcctcagacgacgactgctccgcacagcgggtcccgtgggaaatgaatatttttatccgattactcagcaagctcttagttggcttagctcactgttgccaggctgtctagcagggccggatttgattgatgagcgtccccctacccgtcttgtggctgaggcacgtaggtcaagggggcagcaacgattgcactggcgcaaggggcgcctgacgctgccgcgtcacacgtaa

SEQ ID NO: 27911 - DNA, 2136 bp, Pseudomonas aeruginosa
atggcttcaactaccccatggtacgccgggacttgtgaaagacggaatgacatgaccgtccagctcaaggtggtagcagttaaaactaagttgggctggagcttggttgagaacccacacaagttgttccgcaaatcgggagaagtcgagatgcgcggggcagatgtcgcatcactccgatttggggaatgggtgaaatttcaggtagggccaagcgagcgcaaggatcaatggagagctactcggcaccatcgcctatacgcctattacgatttgtcatctgctcaatctgttgaagaagcacgccaaactcttacgtttaacggggtagcgacgcatcggccgccagggatatggatgatccgcatcaatggagatcaggtcgtccagatcgagtttacccggtcgggagacgatctcctattagcatctcacatcactacactaccggcgtatgagtttgatcaggactcggtgatatcaatgccgaccgggtcttctgagcacctgttctatgatcttggttctgacgccaagccctgctacacctacgactggacacctgaaagtggatacattgaacgtgtcatccgtcgcctcgcaggtttccaatcaccacagttggcagagattatttcctggcttcagcagcacgctgatgagcgcactggccgaattaccgttaaccctgatgacgtgcttgccgcccatgaggcgcttcgttcaggtgagctagccaaacgcctaaacgccgaacagacgcttttacgttcattggtggacgcgctgacaggtgatgcccgcatggcaggtctccttgagcgtgaacgcaatgctctaatcgagcaggaacgcaacaccatacataccaatctcgagatgcagttggctgtggaaatggagttgcagcgtgatcttcgcacttctcagctcgaagtccagctaaaagagcatgaagcggccagtcgtgctcaaataaaagaacagctggatcatgatcggcaggaagcggagtccgccatagcggcgtatcaagccgcacaaaaagtcgagatcgataaagttatctgctctcggctagccgcgctggagcaagaaaaggcggagcttacggagtattgcgccaacctatcgcaatctagggacgagctcatcttgacgctacatgaactcgagataaaagccgaagatttaaacgccttggtcggagatctgagtgcagctgttacaattctgaaagaacaaagagagcatggtacagctgaagtcgaacgcctaaaagaaattagccgagtagcatcagaggggcgcggttatgctccggtgactgtcgtcccattttaccgtcccaaacactcgacggcctggtgttgctctgaagctggagaggtattaaagaactgtgcgttgctgacaagtaacgggaaaaaattgatggagcagtttatcgcgctatctctggccggtgagataccgctgctagtaggtcccgatgttgcagactttttgttggtcgctgagtcactagtagcctcaggacggtcagcgcgcttggaagcagatccgacaatcctgacatttgaagatttgtgggtgcgagcaggaacggggttgccaacatctttggctcaaggattaacactagccagcagccaggagccatgctccgttttgggggtaatcgatcgagctgagcgctctgccgcgaggttctggctgcctgcgttgacggaccgagcccgtcgtggagacctccccagacggctcttgctatgtgccactgttgaagacgatagctgcgaagaggctgaagctctgcggggcagccagatttggctgccagtcaaggaagccatcgctaaggatgcagccactgttgccccactgtggctctctccgagccagtatcgagaattagatcccggcgattgcccggttgaaagcatcgagggtggcctcaatgttgcccaaaagctcgcaaaccgccttgggctcgttaacacgctaagagcggttcgatcagcagcagaggtagctactttctataaggggaaggaagctatagatgctattgcgcgaatgaatacattgtttcttaattccgtaggttcggagcaacctgcggtagcatattaa

SEQ ID NO: 27912 - DNA, 5841 bp, Pseudomonas aeruginosa; identical to SEQ ID NO: 27909

SEQ ID NO: 27913 - DNA, 2553 bp, Pseudomonas aeruginosa; identical to SEQ ID NO: 27910

SEQ ID NO: 27914 - DNA, 2136 bp, Pseudomonas aeruginosa; identical to SEQ ID NO: 27911

SEQ ID NO: 27915 - DNA, 5841 bp, Pseudomonas aeruginosa; identical to SEQ ID NO: 27909

SEQ ID NO: 27916 - DNA, 2553 bp, Pseudomonas aeruginosa; identical to SEQ ID NO: 27910

SEQ ID NO: 27917 - DNA, 2136 bp, Pseudomonas aeruginosa; identical to SEQ ID NO: 27911

SEQ ID NO: 27918 - DNA, 5841 bp, Pseudomonas aeruginosa; identical to SEQ ID NO: 27909

SEQ ID NO: 27919 - DNA, 2553 bp, Pseudomonas aeruginosa; identical to SEQ ID NO: 27910

SEQ ID NO: 27920 - DNA, 2136 bp, Pseudomonas aeruginosa; identical to SEQ ID NO: 27911

SEQ ID NO: 27921 - DNA, 5841 bp, Pseudomonas aeruginosa
atgctggaccctattggaagtttttatcgcattcgggatttttttatttcatatgttgaaaccagctttcgaatttccgaccctctagcttctgaagcacggcgtgccctgctcaagaccagcggcatcctggccacagctccatttattgagccagtgcttcgctacgaatcttcggataaaaatcttgaggacctaattgaggaggcagatggcgtcctcaagccactgtcgctaaagggccgcaaggccttcgttgaactggctctgtctggtctgtttgatgggagctctgatgacggccctttactccggaagtcccaatacgcgccataccggcatcaggtctcgatgcttgaacgaggcattcgacctggccgccccggtattgtaacttccggcaccggctcaggaaaaacagagagttttatgcttccgatactggctgctctttctaatgaagcagtcgagtggcaaaaaccggaatccaaatatttgcaagaacactggtggaaaactccgaagtcccaatgggccccccggagagctggcgagaaacggccgagtgccgttagagcactcgtactctatcctatgaatgctcttgttgaagaccagatggttcgcttgcgcaagactctcgactcacaagatgcacatgaagtaatggatgctcgattcgctgggaatcgtcttttcttcggacaatatacgagcgctacccctgtaacaggctacgagcaacatcctcgcctcgcaggtgacaagcaggaagcgaagcgtcgagctcgacgcatctctagattgcgtaaggcgatgcaggatttcttctgcaaccagagcgcagcccgcaaatttgatgaaaattctgagcgtcagcaaggacgtattcgagagaccacgcgctacatcttcccatcgatagatgggggcgaaatggtttcgcgatgggatatgcaggcttcgccgccagacatactagttaccaacgcatccatgctgggagctatgctgtcgagagaaattgaagatgcgattttcgacaaaacccgtgaatggctcttatcagacaaagactcctatttctacctcgtcttcgacgagcttcatttagttcgcggctccgccggcactgagattgcctgcctaattaagtccctgattcagcggcttggccttgatcaaccggagcacgcgtacaaactacgtctacttgcatcttcggcctctcttcctttggaaggcgccgaaggtgttcagtcaaggacatacttacgtgatcttttcgcaccattcggcacaagcatcagcgaagacgatccaggttctaccgatccaagattttggaatgagtgcataatccagggtgtgccgcatatccctcccgcgagagcgggtggcattccttctgaaccattcgctcaattgatgatggctgcacttgaggggaaagatggatttgtcggcatactggatcggactcccgcattagaggctgctatatctaaggcagctgcagcgctgggtgttgtagcaacggcgcaagcctcgcttgagaagttgctagccgaagcggcagccggactactaacacatgcttgtaaaaacgatgacactatccgggctactacacccgaatcgattgctgctagggtatttgccccgggcagcgacgacactgagttggctctccgcggactgatgctggcccgagcgcttccagaggctaacgattcgcgggctagagttgcaggtgcaacgccagccttccgtgtccataccttcattcggaatatagaaggcctatttgcttccgtcaccccacgtcagcatagcgtgacctttagcgatttctctgtagaacggggaacttcgcattcatcccccgcaacgggtcaagcgcgaggccgccggctttttgagcttttatattgtgaagcatgtggggatttgtttgtcggtggccagcgaggccagagtagcggttcaactaatgctactgagctactgccgtcggcagcgaatctggagcacttacctgagcgcccaggagcagaatattacgatgacatgactttagatgagttcgcagttttatggccgcgacgtggtgactggatcggatcagataagggctatgatcaatggatgcccgcccatctcagtccggatacaggtgtagtggaactgggcgagactgcgaaggaaggaaatatagcaggttatctttattatcagacagaaacggcgattagcaaaggaaagaataagcctgttcagcaaccctctgcgcaaccgttttgctgcccaaaatgtggcaccgattactcaaaccggcctgatacaaatcgttcacgctcaccgatccgcgcatttcgtactggcgtgactaaatcttcgcagctagtggcaacggagcttttcgaactgctacatgctataggggccgagcctaaaggaattgtcttttctgatagtcgccaggatgcggctgggcaagctatggagattgagcggctgcatttgcgtgatctgcgtcgtgaaattctagttacaaccgcgagatcctacataaaagaagcatcgatagaagctctcagctcagctgaaataatcgagcttctgggtaaagctcatgctgcgagagataacaacgagatccgcaggttgtccggcctcttaactaaacagaccgaaaatgatgcatctagaactcaaaaggtaaagctggacagacttctagagttaagccaggatggttctattggtagaataacagccgagctagtgcggctaggtatatcgccctataagagcagctcatctagcatcaaagagctcccctggcatcaggagttcgagaaatctggagaagttatttcctacgacaatgcgctgtccctacctcaaatatctgaaataaatctagacatcattgatagtcaatatgaactagtcgacgatgtgattttcgccaatacattcttcgctctcgaggaaactggtctcgcctacccttgcctttcgagtgatgaagaaaatcaagcgttggatgcatggcttcgtatttttgcaagcgcctatcgtgttaaggaaaataagtattttgataagaacaaggtaaagctttggcaaagagggggcgacatcagcaatagtcgaatcaagaaaatcgcccaggcattgtacggtaactcactgtatattgatgaactaacgacggtcttatataaatttgaccgctctggacatcgcggcggcttattcaatattggaaagctattcctgaaagttactaagccgggtgatttattttggcgctgcaccaactgcgaacgtgttcacttgcatgaagggctagggatatgcactcgctgcgctacgccgctgccagagccaagtggaaaggttgaggagctctggtctaccaatttcctaggaaagcgaatcattcgcagcgagcgcgatggtgtggggcgcttccgcttgcgcgtggaagaactaacaggtcaaacagatgacttctctgatcgactcagaaagttcaagggtattttcgttgatgaagttagcgaattagagaggctagcttcagagatagacatgctgtctgtcacgacaacgatggaggttgggatcgatatcggcgctttacagactgtgtatcaagcgaacatgccacctcaacgattcaactatcaacagcgggtggggcgcgctggtcgtcgtgggcaagccttttcgttcgtcgtaactttctgtcgcgggcggagccacgatgcatattacttcgcacatccgcacgcgatcactggcgacccgccacctcctcccttccttgcgcccgctcacgacgccattcctatgcgtctccttcgcaagacttggctgcgagccgcttttaagcagctaagggatcagtgcgccgaacgaggtgagatatttcctggtgatctacttactcctccagatgtgcacggagaatatgtcactaccagagactattaccacaaccaagacatcgactggtctgctcgtttgcatgcggcactggcgcagacccaggcagtgcgagagcagttcatcaacgctgtaacctttgatcaagaacagcgtcaacgactgagggataagttaagcgtcgatctattaattagtgagattaatgaccaacgccctaacgctccatccgatgagatgggactcgctcgatttttagctgagcgaggtttgctgccaatgtacggtatgcctacccgcgttcgtaatctttacgtaggtcttcgcgaaagcaacagccatggcgggggcgcagagtacgaatggtcaacaatggatcgcgatcttgatttggctgtgtttgagtacgcgcctggggcggttcttgttaaagataagaagaaacatagagttgtcggatttacgggaaatctgactgacccacaaatacaggggcgagctatcgaagggatacgttcggtcaccgattggtgtgaatcaaaaacctacgtagccatttgccctacatgtggttcggcttgtcaaagcattgaagtacctggcgaggctttgaaatgcagtgactgccgagcactaatcccgaaggaatgcttcctgctctacgtgacacccgctgctttccgtactgattttgtgcccaaagacgagctcgatgagtttgaacgcatgtctttgcgtaccgttgcgaccgtgttgcgcgaaggcgaagacttggactgcggagccctaaaagttcgaagcggcgcaggcgtaaccatccttcagcttaacgatgggccgaccgatggaaagagtgatggacgccagtttactgttgatcttgttctggaccagagggtgccagtgcctttctcacctcaacgaccaccaattgatggcattcaagcaatcgagtcaggctggcgtcgttcaaataatacacaacgctggggcgcatctcagggggagcaatgtttcggcttgatctcgaaaaaggaaacggactctattcatctcgagctaacaagctttgacgagcgtctaactctaaatatggtggcccgcaaaggtgaattcatgcatttacctacccgagctgcagccatcagcgccactcaaattttggttaacaaagctgcactggccttagacgtttctccagatgaattcgaggctctcgagcctagactccgctcaggaagtccgatgttacaaatagctgatgccctaattaatgggtctggcctttgccgtcggctgggggaaccgggtgccgattcgcgcacacctcttatcgtagacttgctgcgtgagactctcacgaacaccaatgtatggcctcttcaggacttccttgggaccggcgccgatggagtgcacacagctcaatgccagacatcctgctaccgatgcatccagcgatacgggaaccggagatatcacggcttgctcgactggcgcttgggtatggcctatttgcgcgcactggtaactccgaattacgcctgcggtctcatccctggcgatgaaaggtatcctgagattcaaggctggaaggagcgggcctgccagcttgcggaaaacgtcgaagcaatgcgcaaaggcacagttcgctatgaatatctgcgacattcgggcctgccctgtctcagcgagcagaaggacggggctgaactgtggcgcgccgttgtaattcaccctttgtggcggcacacggaagtcggggcaatgcgtgacctgttaggcccggattggtcatcgtcgttaagatatctagatacctttgagctagaacgacgaccactgcgccgcctggcagccttaaagcaagaggaatcttaa

SEQ ID NO: 27922 - DNA, 1185 bp, Pseudomonas aeruginosa
atgaatgacgctttaaagttttatgagttctttgcaggtggtggaatggcgcgcgccggcctaggtggcgattgggactgtttgttcgctaatgacttggatcgtattaaggcgtccacttatattgaaaactggggtgacgcccattttgataaccgcgatgttagagacgtaaagacatcggaccttaaggggattggggatttggcttgggcgtcatttccatgtcaagacttatctgtggcaggaaatggcttaggaattggtagctctggtggaaatgagatcacaaggtctggcgcactttggccttttcttgatcttatagagcagctccgtttagaaaatcgacagccgccactattggtcttggagaatgtagtaggcttgcttacgctggaaggaggtcgtgacttttccgccatctgtgagcgcctcagggaaatgggttattgctacggggcaacgatagtggatgccaagcactttctccctcaatctcgtcctcgagtctttatcattgcaatcctaaagggaattaatatccctacaaaattatttcgcgggatggccagtagtcactggcattcccctacattgcttcgcacttatagggctctcccctctcgcctacatgaagactgggtctggtgggatttaggggatcctcctgctttaagagaagacgcacttcacagtttcattcagcgcaagaatgtgatctggaatacgcaagaggaaactgatcggttaattggcatgatggcgccatcccaccttgcacgcctcgacaaggcaaaactttcaggcagattagctattggcagtctttacttgcgaatgcgcagagagggcggggttaataggcagcgagcagaaataactttctcaccattgctgggttgcttacgaactcctcgaggcggcgcatctcgacccagaatcatcacgatagaaggcggctcggttaaaactcgtttacttacgtctaatgaggcgtctaagttgatggggctggaggattcattcttattgccaagcatatatcaccatgcatttaaggtaataggtgatggagtcgcagtccctgtcgttcgctttcttgctgaacgtctacttgaaccgcttgcatgggcagctcggctacaaaataaccttcagggtcaaacggtggttatgggatga

SEQ ID NO: 27923 - DNA, 2553 bp, Pseudomonas aeruginosa; identical to SEQ ID NO: 27910

SEQ ID NO: 27924 - DNA, 2136 bp, Pseudomonas aeruginosa
atggcttcaactaccccatggtacgccgggacttgtgaaagacggaatgacatgaccgtccagctcaaggtggtagcagttaaaactaagttgggctggagcttggttgagaacccacacaagttgttccgcaaatcgggagaagtcgagatgcgcggggcagatgtcgcatcactccgatttggggaatgggtgaaatttcaggtagggccaagcgagcgcaaggatcaatggagagctactcggcaccatcgcctatacgcctattacgatttgtcatctgctcaatctgttgaagaagcacgccaaactcttacgtttaacggggtagcgacgcatcggccgccagggatatggatgatccgcatcaatggagatcaggtcgtccagatcgagtttacccggtcgggagacgatctcctattagcatctcacatcactacactaccggcgtatgagtttgatcaggactcggtgatatcaatgccgaccgggtcttctgagcacctgttctatgatcttggttctgacgccaagccctgctacacctacgactggacacctgaaagtggatacattgaacgtgtcatccgtcgcctcgcaggtttccaatcaccacagttggcagagattatttcctggcttcagcagcacgctgatgagcgcactggccgaattaccgttaaccctgatgacgtgcttgccgcccatgaggcgcttcgttcaggtgagctagccaaacgcctaaacgccgaacagacgcttttacgttcattggtggacgcgctgacaggtgatgcccgcatggcaggtctccttgagcgtgaacgcaatgctctaatcgagcaggaacgcaacaccatacataccaatctcgagatgcagttggctgtggaaatggagttgcagcgtgatcttcgcacttctcagctcgaagtccagctaaaagagcatgaagcggccagtcgtgctcaaataaaagaacagctggatcatgatcggcaggaagcggagtccgccatagcggcgtatcaagccgcacaaaaagtcgagatcgataaagttatctgctctcggctagccgcgctggagcaagaaaaggcggagcttacggagtattgcgccaacctatcgcaatctagggacgagctcatcttgacgctacatgaactcgagataaaagccgaagatttaaacgccttggtcggagatctgagtgcagctgttacaattctgaaagaacaaagagagcatggtacagctgaagtcgaacgcctaaaagaaattagccgagtagcatcagaggggcgcggttatgctccggtgactgtcgtcccattttaccgtcccaaacactcgacggcctggtgttgctctgaagctggagaggtattaaagaactgtgcgttgctgacaagtaacgggaaaaaattgatggagcagtttatcgcgctatctcttgccggtgagataccgctgctagtaggtcccgatgttgcagactttttgttggtcgctgagtcactagtagcctcaggacggtcagcgcgcttggaagcagatccgacaatcctgacatttgaagatttgtgggtgcgagcaggaacggggttgccaacatctttggctcaaggattaacactagccagcagccaggagccatgctccgttttgggggtaatcgatcgagctgagcgctctgccgcgaggttctggctgcctgcgttgacggaccgagcccgtcgtggagacctccccagacggctcttgctatgtgccactgttgaagacgatagctgcgaagaggctgaagctctgcggggcagccagatttggctgccagtcaaggaagccatcgctaaggatgcagccactgttgccccactgtggctctctccgagccagtatcgagaattagatcccggcgattgcccggttgaaagcatcgagggtggcctcaatgttgcccaaaagctcgcaaaccgccttgggctcgttaacacgctaagagcggttcgatcagcagcagaggtagctactttctataaggggaaggaagctatagatgctattgcgcgaatgaatacattgtttcttaattccgtaggttcggagcaacctgcggtagcatattaa

SEQ ID NO: 27925 - DNA, 5841 bp, Pseudomonas aeruginosa; identical to SEQ ID NO: 27909

SEQ ID NO: 27926 - DNA, 1185 bp, Pseudomonas aeruginosa; identical to SEQ ID NO: 27922

SEQ ID NO: 27927 - DNA, 2553 bp, Pseudomonas aeruginosa; identical to SEQ ID NO: 27910

SEQ ID NO: 27928 - DNA, 2136 bp, Pseudomonas aeruginosa; identical to SEQ ID NO: 27911

SEQ ID NO: 27929 - DNA, 5841 bp, Pseudomonas aeruginosa; identical to SEQ ID NO: 27909

SEQ ID NO: 27930 - DNA, 2553 bp, Pseudomonas aeruginosa; identical to SEQ ID NO: 27910

SEQ ID NO: 27931 - DNA, 2136 bp, Pseudomonas aeruginosa; identical to SEQ ID NO: 27911

SEQ ID NO: 27932 - DNA, 5841 bp, Pseudomonas aeruginosa; identical to SEQ ID NO: 27909

SEQ ID NO: 27933 - DNA, 1185 bp, Pseudomonas aeruginosa; identical to SEQ ID NO: 27922

SEQ ID NO: 27934 - DNA, 2553 bp, Pseudomonas aeruginosa; identical to SEQ ID NO: 27910

SEQ ID NO: 27935 - DNA, 2136 bp, Pseudomonas aeruginosa; identical to SEQ ID NO: 27911

SEQ ID NO: 27936 - DNA, 5841 bp, Pseudomonas aeruginosa; identical to SEQ ID NO: 27909

SEQ ID NO: 27937 - DNA, 1185 bp, Pseudomonas aeruginosa; identical to SEQ ID NO: 27922

SEQ ID NO: 27938 - DNA, 2553 bp, Pseudomonas aeruginosa; identical to SEQ ID NO: 27910

SEQ ID NO: 27939 - DNA, 2136 bp, Pseudomonas aeruginosa; identical to SEQ ID NO: 27911

SEQ ID NO: 27940 - DNA, 5841 bp, Pseudomonas aeruginosa; identical to SEQ ID NO: 27909

SEQ ID NO: 27941 - DNA, 1185 bp, Pseudomonas aeruginosa; identical to SEQ ID NO: 27922

SEQ ID NO: 27942 - DNA, 2553 bp, Pseudomonas aeruginosa; identical to SEQ ID NO: 27910

SEQ ID NO: 27943 - DNA, 2136 bp, Pseudomonas aeruginosa; identical to SEQ ID NO: 27911

SEQ ID NO: 27944 - DNA, 5841 bp, Pseudomonas aeruginosa; identical to SEQ ID NO: 27909

SEQ ID NO: 27945 - DNA, 1185 bp, Pseudomonas aeruginosa; identical to SEQ ID NO: 27922

SEQ ID NO: 27946 - DNA, 2553 bp, Pseudomonas aeruginosa; identical to SEQ ID NO: 27910

SEQ ID NO: 27947 - DNA, 2136 bp, Pseudomonas aeruginosa; identical to SEQ ID NO: 27911

SEQ ID NO: 27948 - DNA, 5841 bp, Pseudomonas aeruginosa; identical to SEQ ID NO: 27909

SEQ ID NO: 27949 - DNA, 1185 bp, Pseudomonas aeruginosa; identical to SEQ ID NO: 27922

SEQ ID NO: 27950 - DNA, 2553 bp, Pseudomonas aeruginosa; identical to SEQ ID NO: 27910

SEQ ID NO: 27951 - DNA, 2136 bp, Pseudomonas aeruginosa; identical to SEQ ID NO: 27911

SEQ ID NO: 27952 - DNA, 5841 bp, Pseudomonas aeruginosa; identical to SEQ ID NO: 27909

SEQ ID NO: 27953 - DNA, 1185 bp, Pseudomonas aeruginosa; identical to SEQ ID NO: 27922

SEQ ID NO: 27954 - DNA, 2553 bp, Pseudomonas aeruginosa; identical to SEQ ID NO: 27910

SEQ ID NO: 27955 - DNA, 2136 bp, Pseudomonas aeruginosa; identical to SEQ ID NO: 27911

SEQ ID NO: 27956 - DNA, 5841 bp, Pseudomonas aeruginosa; identical to SEQ ID NO: 27909

SEQ ID NO: 27957 - DNA, 1185 bp, Pseudomonas aeruginosa; identical to SEQ ID NO: 27922

SEQ ID NO: 27958 - DNA, 2553 bp, Pseudomonas aeruginosa; identical to SEQ ID NO: 27910

SEQ ID NO: 27959 - DNA, 2136 bp, Pseudomonas aeruginosa; identical to SEQ ID NO: 27911

SEQ ID NO: 27960 - DNA, 5841 bp, Pseudomonas aeruginosa; identical to SEQ ID NO: 27909

SEQ ID NO: 27961 - DNA, 1185 bp, Pseudomonas aeruginosa; identical to SEQ ID NO: 27922

SEQ ID NO: 27962 - DNA, 2553 bp, Pseudomonas aeruginosa; identical to SEQ ID NO: 27910

SEQ ID NO: 27963 - DNA, 2136 bp, Pseudomonas aeruginosa; identical to SEQ ID NO: 27911

SEQ ID NO: 27964 - DNA, 5841 bp, Pseudomonas aeruginosa; identical to SEQ ID NO: 27909

SEQ ID NO: 27965 - DNA, 1185 bp, Pseudomonas aeruginosa; identical to SEQ ID NO: 27922

SEQ ID NO: 27966 - DNA, 2553 bp, Pseudomonas aeruginosa; identical to SEQ ID NO: 27910

SEQ ID NO: 27967 - DNA, 2136 bp, Pseudomonas aeruginosa; identical to SEQ ID NO: 27911

SEQ ID NO: 27968 - DNA, 5841 bp, Pseudomonas aeruginosa; identical to SEQ ID NO: 27909

SEQ ID NO: 27969 - DNA, 1185 bp, Pseudomonas aeruginosa; identical to SEQ ID NO: 27922

SEQ ID NO: 27970 - DNA, 2553 bp, Pseudomonas aeruginosa; identical to SEQ ID NO: 27910

SEQ ID NO: 27971 - DNA, 2136 bp, Pseudomonas aeruginosa; identical to SEQ ID NO: 27911

SEQ ID NO: 27972 - DNA, 5841 bp, Pseudomonas aeruginosa; identical to SEQ ID NO: 27909

SEQ ID NO: 27973 - DNA, 1185 bp, Pseudomonas aeruginosa; identical to SEQ ID NO: 27922

SEQ ID NO: 27974 - DNA, 2553 bp, Pseudomonas aeruginosa; identical to SEQ ID NO: 27910

SEQ ID NO: 27975 - DNA, 2136 bp, Pseudomonas aeruginosa; identical to SEQ ID NO: 27911

SEQ ID NO: 27976 - DNA, 5871 bp, Pseudomonas aeruginosa
atgcttgacccaataggcggcttccgccgaatccaagatttcgtcatcaactatgttgagactagtttccgtatctcggatacggcagccgctgaagcacgacgcaaccttctacagacggtcggagtgttagcaaccgagccatttattgaacctgtgctgcgctacgaatctcatcaggagagtctcgagcaattggcacaacgtaatgacggtccgcttgcgccgctatcttgggagggcaagcgctcttttgtagagctggcactttctggcctattcgacggcaagcgctgcaaaggagagattcgtcggaaatccagctatgccccctataaccatcaggtcgaaatgctcagacgcggcctgctgccaggtatgccgggtatcgtcacgtcgcgtaccggcagcggaaaaacggaaagcttcatgttgcccgtgctggctgcgatctctaatgaagcggtgacgtggaatgcccctgactgcaactacttgaagaacgattggtggaaggaagacaaggcgcggtggttggcgcggcggcagggagaaaatcgtccaagcgcagtccgaaccttaattatttaccctatgaacgccctggtcgaggaccagatgcagcgactgcgcaaatcgcttgactcggaagatgcgcgcgaagtgatgcaagagcgcttcaaaggtaaccggattttcttcggtcagtacaccagttccacgcctgtcactggcttcgagcgccacccgcgcattgctgagaacgaaggcgagaagcagcgccgtacccggcgcattacgcgcctccgcgaggcaatgcggaggttcaggcgcgaccaagatgcggcgctcgcctttgacctacaagaagaagcagctgcgcaggatgaaagggaggctatgccggacaaaacccgctatatctttccttctgtggatggcggcgagatggtatctcgatgggatatgcaggcgaatccgccggacattcttgtcactaacgcctcaatgcttggcactatgctatctcgtgaagtcgaggagccaatattcgcccagacccgtgactggttgctgaacaacgatgatgcctatttttatctggtctttgacgaactgcacctgatccgcggttcggcaggcacggaaatagccttccttgtcaaaatgctcatccagcggctcgggctcgacctgccggggcatagacataagctacgtttattagcctcctcggcctcactgcctactgatggagagcaaggcctgcagtcactggcgtatcttcgcgatctctttgcaccctatggcaccagccgccatgctaacgatccgggggtggatgacccagatttctggcatgactgcatagtggcgggcagcccacatgttccgacctttggcaccaggtcgatcaaacctcaacccttcgtcgacctgcttgaaacagcgttggagtgcaacaaaggttttgttgccaagatcctaagtgccgaggcgatgaatccggccgttgagcaggcagccaacgctctgggcatctctgcaaacaatgccgtggaccgggtcaaggcgctggctgaagcggctgcggctgtgctgactcaggcttgcctcgacggagcagaggtacgtgctacgtctacttcggacatggctgcccgcatcttcagggccggttcaaataatctggataaggcgttgcgcggcctgcttctggctcgtgcgttacccgagtccaaagtttggcccgcgaccgtttcgctcactacgcccgcatttcgcgtccacacctttattcgcaatatcgaggggctatttgcctcggttgttcccaacggatgtataccaaagttcggcgatttcacggtagagcgtggtgtgacacacgcaatgccacaggccgaaggcgggcgcggcctacgactctttgaattgctctattgtgaagcttgcggtgacctgcttattggtggtcagcgcggacagagtattgcggaaagcagggtaacggaactgctaccgtcggcggccgacctcgagagtctgcccgagaaggttggctccgaatactacgacaagatgactctagacgaattcgcggtcttctggccgcgacgatcgcagccgtcactttccgaacgggactacgacgcatgggacgctgctagtctgaaccctgagacaggtctggtgttgactggccaggttgcgccaccagggcatattgatggttacctctatcgccagacagaggcggcggtgaagggccgtcacggtaagacaacaggccctttgatggcgcagccattttgttgtccgaagtgcggtacagattattcgaatagaccggtttccagtcgttcgcgttcgccaattcgtgcatttcgcaccggtgttacgaaaacttcgcagctagtagcgacggaactattcgaacttctgcatgcgatcggtgcggagccgaaggggattgtcttctcggacagccggcaggacgccgcaaaccaggcgttagagatcgaaacacttcatttgagagatcttcgacgagaagttctggtgattgccgctcgggcgttggtcaagcaggcaaatgcagattggattgacccgacgcaattcccgtcgctgatagctgccgccgctgaaaaccatgaagagatgaaacggcttgcagaaaaatttcaaaagcaaatggcgtccggtggccagaggaacagcggcaaaattccgcttggcaaattactgcaatgtgacggtatggatattggtgctctcactgcagagttcgcctcactgggtgtccatccgttcgatcgagtcggcaagaaactctataaaggaaaacggtggcacgatcttttcgctgagaatggggaacgacttgtttattctccaaagctcaatgacgcgcagaaggcaggaattaataaggaaattctcgaaggtcagtacgaactgatcgatgacgtcctttttgctaatactttctttgcgctggaagagactggcctggcctacccgtccatcatggtaggggacgaggccaaagcagatcgattagatgcctggctccgcgtgtttgcaggcgcttatcgcgttctggacaacaagtacgtcaatggcgaaaatttgaatgaatgggtttctgggttagatgttaagcacaaacgcgtgttgcgcttcgcccaagccgtatttggggcgagctccgcaaccgaaggcctgagtggcatcctcagcgagttttcagcgctcgagcatccgagcggtatgattcatattggcaaactgtacctcaaggtcgcagaggcacatgactcctactggcgttgccgcaattgtgagcgggtgcatcttcattggggacctggtaagtgcacgcgctgcggggaaatcttggacgagcagccaacgggtcaagcagcagaattatggcgtagtaactttctaggcaaccgcatcgtacgaggacaagatgagggcgttgatcgattccgattgcgcgtagaagagttgactggacagacagatgatttctcggaacgcttgcgcaagttcaagggtattttcgttgacggcgagaacgaaattcagaagcgcgcccaggaaattgacatgctgtctgtcaccaccaccatggaggtggggatcgacatcggatcattgcagaccgtataccaggccaacatgccgcctcagcgattcaactaccaacagcgtgttggtcgagctggtcgtcgaggtcaagctttctcaatggttgtcaccttctgccggggtcgcagtcacgatgcgtattacttcgctcatccgcacgcaatcaccggcgatccaccgcctccgcctttcctggctatcaaccacgaccccattccattacggctggtgcgcaagaactggctgcatgcggcattcaggcatttgcgagacgagtgcgctaaggccggctacgagtacccaggggacttactaattccgcccgatgtgcacggtgagtacgtctcgacacatgacttctatcatgatgttcaagcggattggcctaagcgattgcgcgaagcacttaaggaaactattttcgtacgcgatagtttcattgatgcagcttccttcgatcgggatcagtgtgttcggcttaccgagcaaacggacatcgacctgctgatgcaagagatcgaaaatctcagatcgtacgcgccagactcggagatcgggcttgcccgattctttgctgaatggggattattgccgatgtatggcatgcctactcgcgttcgaaatttgtacctcggccttcgctcggtagaggttggcaaagaggagaactttgagtggtccatcatggaccgcgacctggatctagcggttttcgagtacgcgccaggcgcagttctagtgaaggacaagcaaaaacatcgtgtggtcggctttacaggcagcctatcgactccgcaaaccgttaaaaaggacgaactttcaatcaaggcgttgtctcgctggtacgaatcagaaactcatgtggcgctctgctcagcctgcggctcggcgacgcgcagggatgttttgccaaactcttcccttccatgcgacgactgccatgaggtgatcctgcctgatgcattcaagccctatattgtgccagcgggcttccgaaccgacttcaatccaaagaatgacgaagaagacatcggtcgcatgtccgtacggagcatggcaaccctggtgcatgaaggcgagcgcttggaatatggaagcgtaactgtgctgcacggtgccaatgtcaccatcatgcagatgaacgatggtgtcgcaaacatagagggtgaaggcgacggttttcttattgaagaagcattcgatctgaaagttccaatgccgtcaggatctaggaaacacccaaaaatagaaggaatgccccaagcattcgaggctggttggctcaacgctgcgcgcagtgggaattggggacaggcgcgctggagtaagttcggaaatccgctgccaagatttggtctcatttcctgcaagcagacagaatcggttcacttggagcttagccagattgacccgaggctggacctggcacatgtggcacgacgcggtaagtatggtcgcttgtcggtacgcgcagccgcaatcagtgcgacgcagatcttggtgcagcgggccgcccttgaactggacgtgtccgctgaggagtttgaggcgctcgaaccgagggtgcgctctggtaagccgatgcttcagatcgccgatgccttgatcaacgggtctggcctatgtcgtcgtttaggcgaaaccgttcctggaggctcaaggtcgaaaatcctagagatcctggatgacatcctggcaaatcatgataagtggccccttgttgacatgctcaagagatcagaagagggagagcactccgcgcaatgccatacctcttgctaccgctgtattcaacgctatggcaatcgccgctatcacagccttctggattggcgccttggcttggcttacctgcgcgccatgacaacgccggagtatgcatgcggattgaatgcgaatgatgagacctatcctgaaatcagcgattggcgtggacgggccgaatggttaacggagaacgttgcacagatgcgtcccggtaccttgactacttatcgtttgccgcattcgggactgtcttgcctgattgagcgggtgggtggagccgaaacgcgctacgtggttgtccacccgctctggagtttggagtcgagtgtgctttccgacgtgctgggagctgattggtcaccgaaactgctcttcgtggatacatttaatttggagcgtcgtccacttaagtcgatgagcactcctttattgcctcgctaa

SEQ ID NO: 27977 - DNA, 2541 bp, Pseudomonas aeruginosa
gtgaacttgccgcgaacttttgatgcatgggagagacagctcgtcgattatttcctgcgtgtcggcccagatggtgatgccagcccaatccgagccttcgaggtcacaccacgcaccttggcgctagcttgcggcgccccacccgagagtgagccaaacgtcgaagaggccttccggcgcatgttgtcggtcgaccctttgctgatgaactcgctgcgcttgggttcccagcgctttgaaaagcttgatgtccccaactgcttttcctacctcgcatttaccttgttgatcgatagcctgctggaaggcaatacgacgcaaagtggcgaatttcgcctgaagctaatgaaatggttggggattaaaactcctttttccgatcttcgcggggttgcgttgatgtgggaaagcctggtgcggtggctcgacgagcgcattcaggcgggtcaaccatttcgccgtctgattctgccggatccaggccattggtcgcagatcggatactcgcgccgcctgtcctttcccagtaagcccgacttgcgcttattggcgaatttctgccgggaacatccggaagcacttcgtaatccgcgagtcagtattacagcgtttgaacgagtgctgactgacagtcgcgcctcatggggcctgcaccgtgcgttcgatgagtttcgctgcgcttactacctgcagcgtcgcgcgttgggcagctttcccttttggcgtcttctggagcacgcctcaactctgacggggcgcccagcacgctccagcgtcacaatcgaaatgctatttgatatggacaagcgtgctctcttctttgcttgccgccgtgaggacggtgaagctgagccgtttacatccctgagtgaagcgctggtatttgctggggcggatcacagcgagaacctagctaccgctgctgcgttaggtatcgtgtttttccgtctggtcggtgcggggcggtggcgggctgaagcggacgccaacgattccgcttttggcttgcatgtggctgtggctgaacgacacaggcggaaaatcggtaatcgattgggtgacctgtccggcagcaactcgtgggcgatcacgacccagcctttgactcttgaggctatcaaggatgctctcaaagcagccaagctgcttagcccccagcaggaaaggatcgtacgtcctctcctgtccggtggagtgcgtagcgatggggtttggctgggccgcccacgatttcttccaactctcgaatctgacacctccgactatgtcatccgcgatgcgttgccgtgcgtaaccgacgtcccgcttaagattgatcagggacaacttatcgccacccggccagtagaaggctgcttcttcatccaaccgaccctcttgcgtgatgaggagcatgcgccatggagtattcgtctccaattcgtcagtaacgctttcccacacgaggcgcttgagggtgctcgctacaagctgccgccgttgctcgactggatgccacgtgtatctgatcgccttgaggtcagcacaaaggccactctagcgtgggaggcagatgagcctgcctgcgcggatcttctcgaggcggtctacgccagcggccgaagtggatgggaggaaacgcagataatttcactcctgggatgtgctgacgtagcgatgagtccctggcacttactgcgaagtctgcgggatgcgggcattgtcgaaccgcgactccgcgctggctggaaagggcggacctggaccttgagggagccaagcattatcgaagctcatcagggggggcagaagctagccctggccgaaggggcgctttgtgcgcggatggtcgacgcttttaagcaggccgttgaaggttttggcgggactcccttccgccgtttgggtgctacctcttgggccgtccccctggttggtgcaaagggggttcaagccaaagcgctcgccgagtttctcggctggcgttttgtggccgaacctgcaacgccgaccgagaagcctttggcatttgtcgaaacccgacatcaagccttgcactataagcaggcggattcttggtcttggtctgtagggcgctttctgtcaggtggctgcattgaagagggcgttaggctggtgcgcttgacccatctcggcgagcgcgaccacgatgtctaccgagtcgagcacaacagttgcgtatttcactacttgtcgcgcaccgctgccatcgcctcagctcatgctctggcacaaatgccgttgtttgattggcgcccggaggaggaggtgattgcccttatggggcacgaaggcggacttcccgatgcccttgctacagaagtgcgccgacgcatgctgcgcaacggtgggccgcgtggcgttgaatatttttatcccgtgaacaacgaagtggtgcgctggctagccgggaggttaccaggctgtatcgctggactggcagagggcgagattcggggggcaccgacgctgatcagcctctcccgccgttctaccggacggctacgcctgcaatggcgcaacgggaaaacctctctttag

SEQ ID NO: 27978 - DNA, 2094 bp, Pseudomonas aeruginosa
atggcggcgaatttggcgtggtatgccgggcaatgcgtgagcaagaacgatgtcaatatgactgtcaaagtcgttggcattcggtcggaagatggatggtcgctgctcgataagccacagaagctcttcccgaaagctggtgaggtagaagtccgtttacaggccgcttctgggtatcacaagaacgattgggtaatattccaagtcgctcacaaggagccccgagggaaatggaaagcatccacccatcgcaaactcacgcccttcctggacctacaggacataggaagtcttgatgcattgcgtagctgcctaactgaagagggtgtggacgggccggatcatagtgctggctgggtgatccgctacagcgaggatcgcatcatcttactcgacctgatccgctctccggataatcgatacaggatggcagttggtgacaatttctatgtatacgtctacgaaccagaactcttgcattgcatgccatcagatacgggcgaagtgttcctttacgattgcaagcggacgggcgaatgccttcaagttctcgactgggcaccagatgatggatacatcaagcgaatcgtgcgtgccatggcgggagctcacgatccaagtgtggaattcgtcatcgagtggctgaagcgccacgcggacgaggctacaggacaaatcggaagcagtcttgaagataagctagtcgcgcaacagtctgcacgctcaggagagttaatcaaacgattgctggccgataagagtctcctcgggcaactgaccgagttgctactagcagacgccaagatgctttcccacctccaaagcgaaatccaagcgatagctgagcaggaacgtggggccattcgcgcttcgctcatggacgcgttggagcacgaggtcatggcattacgcgaggagcgtttgttagcgttcgaggccgagttgcgttcgctggaagcggagcagcatgaggtgttgaggggccagctagagcaggatatgaagtccaatatcttggccatggaggagcgcgtagcagcccgccagacgaagttggaggatcagcttgaatctcggcgcactgaactgcagcaggggatcgatgcgctcgccgctcagcgtgaggcgcttaagggggaactggagagcatcggtttccaaattaaagcaggtgagcaatcgctggcagagcttaaggcgcatgaaactctcgtcgctgaggagatcgaacggcttaaagatgatgccgcctcgatacacgtgccgaagagcgtcaagcttgagtccgtattgcgcttcaacccacctcagtgcgctcctacccttggcgtcggggacatgcatcgagagattaaagaaagcatcctgcttacgtccgtgggaaaagagcggatgacacagtttttcgcgctgctgctggcgggtgaaagtccagtgctgcacggcccagaaacgcaggatttcttattggcggccgaggcgctgttgtcgtccggacggtcgatgcgtctggaggccgaccctactgttatcacctttgaagatctctggttgcgcgcaggcacccaactgccaaccgccttgacccatgggctggaactctcctgcggacaaacaccagtcaccgtactggcgattgtcgagcgcgccgagcgatccggagcccgattctggcttccggcgcttgcagaccgcacgcgccgtggtgaactgccaagacgcttctttatctgtgcaactgtcgaagacgaagattgcgaggaagctcaagcgattcgtagccaagtgccatggctccatgtcagcggaaccatagctccgtcggcaccagccctggttcccatggtttttgccccagctaaagtttggcaactcgatccgggcgagcgcccgcaggacatcacgccagcgatgacggcggtggcaccactagtgaaccaactcacgttggtgaatgcgcttaggctggcccgcgcagcgactgaatgggtccgcttaaatcagggtgttggttacgagcaaactccatcggcgctaaccgggctgttcatagatcaacgcgctcaggccgaccgcacgcaacagaagtcataa

SEQ ID NO: 27979 - DNA, 5841 bp, Pseudomonas aeruginosa; identical to SEQ ID NO: 27909

SEQ ID NO: 27980 - DNA, 1185 bp, Pseudomonas aeruginosa; identical to SEQ ID NO: 27922

SEQ ID NO: 27981 - DNA, 2553 bp, Pseudomonas aeruginosa; identical to SEQ ID NO: 27910

SEQ ID NO: 27982 - DNA, 2136 bp, Pseudomonas aeruginosa; identical to SEQ ID NO: 27911

SEQ ID NO: 27983 - DNA, 5841 bp, Pseudomonas aeruginosa; identical to SEQ ID NO: 27909

SEQ ID NO: 27984 - DNA, 1185 bp, Pseudomonas aeruginosa; identical to SEQ ID NO: 27922

SEQ ID NO: 27985 - DNA, 2553 bp, Pseudomonas aeruginosa; identical to SEQ ID NO: 27910

SEQ ID NO: 27986 - DNA, 2136 bp, Pseudomonas aeruginosa; identical to SEQ ID NO: 27911

SEQ ID NO: 27987 - DNA, 5841 bp, Pseudomonas aeruginosa; identical to SEQ ID NO: 27909

SEQ ID NO: 27988 - DNA, 1185 bp, Pseudomonas aeruginosa; identical to SEQ ID NO: 27922

SEQ ID NO: 27989 - DNA, 2553 bp, Pseudomonas aeruginosa; identical to SEQ ID NO: 27910

SEQ ID NO: 27990 - DNA, 2136 bp, Pseudomonas aeruginosa; identical to SEQ ID NO: 27911

SEQ ID NO: 27991 - DNA, 5841 bp, Pseudomonas aeruginosa; identical to SEQ ID NO: 27909

SEQ ID NO: 27992 - DNA, 1185 bp, Pseudomonas aeruginosa; identical to SEQ ID NO: 27922

SEQ ID NO: 27993 - DNA, 2553 bp, Pseudomonas aeruginosa; identical to SEQ ID NO: 27910

SEQ ID NO: 27994 - DNA, 2136 bp, Pseudomonas aeruginosa; identical to SEQ ID NO: 27911

SEQ ID NO: 27995 - DNA, 5871 bp, Pseudomonas aeruginosa; identical to SEQ ID NO: 27976

SEQ ID NO: 27996 - DNA, 2541 bp, Pseudomonas aeruginosa; identical to SEQ ID NO: 27977

SEQ ID NO: 27997 - DNA, 2094 bp, Pseudomonas aeruginosa; identical to SEQ ID NO: 27978

SEQ ID NO: 27998 - DNA, 5841 bp, Pseudomonas aeruginosa; identical to SEQ ID NO: 27909

SEQ ID NO: 27999 - DNA, 1185 bp, Pseudomonas aeruginosa; identical to SEQ ID NO: 27922

SEQ ID NO: 28000 - DNA, 2553 bp, Pseudomonas aeruginosa; identical to SEQ ID NO: 27910

SEQ ID NO: 28001 - DNA, 2136 bp, Pseudomonas aeruginosa; identical to SEQ ID NO: 27911

SEQ ID NO: 28002 - DNA, 5841 bp, Pseudomonas aeruginosa; identical to SEQ ID NO: 27909

SEQ ID NO: 28003 - DNA, 1185 bp, Pseudomonas aeruginosa; identical to SEQ ID NO: 27922

SEQ ID NO: 28004 - DNA, 2553 bp, Pseudomonas aeruginosa; identical to SEQ ID NO: 27910

SEQ ID NO: 28005 - DNA, 2136 bp, Pseudomonas aeruginosa; identical to SEQ ID NO: 27911

SEQ ID NO: 28006 - DNA, 5841 bp, Pseudomonas aeruginosa; identical to SEQ ID NO: 27909

SEQ ID NO: 28007 - DNA, 1185 bp, Pseudomonas aeruginosa; identical to SEQ ID NO: 27922

SEQ ID NO: 28008 - DNA, 2553 bp, Pseudomonas aeruginosa; identical to SEQ ID NO: 27910

SEQ ID NO: 28009 - DNA, 2136 bp, Pseudomonas aeruginosa; identical to SEQ ID NO: 27911

SEQ ID NO: 28010 - DNA, 5841 bp, Pseudomonas aeruginosa; identical to SEQ ID NO: 27909

SEQ ID NO: 28011 - DNA, 1185 bp, Pseudomonas aeruginosa; identical to SEQ ID NO: 27922

SEQ ID NO: 28012 - DNA, 2553 bp, Pseudomonas aeruginosa; identical to SEQ ID NO: 27910

SEQ ID NO: 28013 - DNA, 2136 bp, Pseudomonas aeruginosa; identical to SEQ ID NO: 27911

SEQ ID NO: 28014 - DNA, 5841 bp, Pseudomonas aeruginosa; identical to SEQ ID NO: 27909

SEQ ID NO: 28015 - DNA, 1185 bp, Pseudomonas aeruginosa; identical to SEQ ID NO: 27922

SEQ ID NO: 28016 - DNA, 2553 bp, Pseudomonas aeruginosa; identical to SEQ ID NO: 27910

SEQ ID NO: 28017 - DNA, 2136 bp, Pseudomonas aeruginosa; identical to SEQ ID NO: 27911

SEQ ID NO: 28018 - DNA, 5841 bp, Pseudomonas aeruginosa; identical to SEQ ID NO: 27909

SEQ ID NO: 28019 - DNA, 1185 bp, Pseudomonas aeruginosa; identical to SEQ ID NO: 27922

SEQ ID NO: 28020 - DNA, 2553 bp, Pseudomonas aeruginosa; identical to SEQ ID NO: 27910

SEQ ID NO: 28021 - DNA, 2136 bp, Pseudomonas aeruginosa; identical to SEQ ID NO: 27911

SEQ ID NO: 28022 - DNA, 5841 bp, Pseudomonas aeruginosa 39016; identical to SEQ ID NO: 27909

SEQ ID NO: 28023 - DNA, 2553 bp, Pseudomonas aeruginosa 39016; identical to SEQ ID NO: 27910

SEQ ID NO: 28024 - DNA, 2136 bp, Pseudomonas aeruginosa 39016; identical to SEQ ID NO: 27911

SEQ ID NO: 28025 - DNA, 5841 bp, Pseudomonas aeruginosa 6077; identical to SEQ ID NO: 27909

SEQ ID NO: 28026 - DNA, 1140 bp, Pseudomonas aeruginosa 6077
atggcgcgcgccggcctaggtggcgattgggactgtttgttcgctaatgacttggatcgtattaaggcgtccacttatattgaaaactggggtgacgcccattttgataaccgcgatgttagagacgtaaagacatcggaccttaaggggattggggatttggcttgggcgtcatttccatgtcaagacttatctgtggcaggaaatggcttaggaattggtagctctggtggaaatgagatcacaaggtctggcgcactttggccttttcttgatcttatagagcagctccgtttagaaaatcgacagccgccactattggtcttggagaatgtagtaggcttgcttacgctggaaggaggtcgtgacttttccgccatctgtgagcgcctcagggaaatgggttattgctacggggcaacgatagtggatgccaagcactttctccctcaatctcgtcctcgagtctttatcattgcaatcctaaagggaattaatatccctacaaaattatttcgcgggatggccagtagtcactggcattcccctacattgcttcgcacttatagggctctcccctctcgcctacatgaagactgggtctggtgggatttaggggatcctcctgctttaagagaagacgcacttcacagtttcattcagcgcaagaatgtgatctggaatacgcaagaggaaactgatcggttaattggcatgatggcgccatcccaccttgcacgcctcgacaaggcaaaactttcaggcagattagctattggcagtctttacttgcgaatgcgcagagagggcggggttaataggcagcgagcagaaataactttctcaccattgctgggttgcttacgaactcctcgaggcggcgcatctcgacccagaatcatcacgatagaaggcggctcggttaaaactcgtttacttacgtctaatgaggcgtctaagttgatggggctggaggattcattcttattgccaagcatatatcaccatgcatttaaggtaataggtgatggagtcgcagtccctgtcgttcgctttcttgctgaacgtctacttgaaccgcttgcatgggcagctcggctacaaaataaccttcagggtcaaacggtggttatgggatga

SEQ ID NO: 28027 - DNA, 2553 bp, Pseudomonas aeruginosa 6077; identical to SEQ ID NO: 27910

SEQ ID NO: 28028 - DNA, 2136 bp, Pseudomonas aeruginosa 6077; identical to SEQ ID NO: 27911

SEQ ID NO: 28029 - DNA, 5841 bp, Pseudomonas aeruginosa BL08; identical to SEQ ID NO: 27909

SEQ ID NO: 28030 - DNA, 1140 bp, Pseudomonas aeruginosa BL08; identical to SEQ ID NO: 28026

SEQ ID NO: 28031 - DNA, 2553 bp, Pseudomonas aeruginosa BL08; identical to SEQ ID NO: 27910

SEQ ID NO: 28032 - DNA, 2136 bp, Pseudomonas aeruginosa BL08; identical to SEQ ID NO: 27911

SEQ ID NO: 28033 - DNA, 5841 bp, Pseudomonas aeruginosa BL14; identical to SEQ ID NO: 27909

SEQ ID NO: 28034 - DNA, 1140 bp, Pseudomonas aeruginosa BL14; identical to SEQ ID NO: 28026

SEQ ID NO: 28035 - DNA, 2553 bp, Pseudomonas aeruginosa BL14; identical to SEQ ID NO: 27910

SEQ ID NO: 28036 - DNA, 2136 bp, Pseudomonas aeruginosa BL14; identical to SEQ ID NO: 27911

SEQ ID NO: 28037 - DNA, 5841 bp, Pseudomonas aeruginosa BL17; identical to SEQ ID NO: 27909

SEQ ID NO: 28038 - DNA, 1140 bp, Pseudomonas aeruginosa BL17; identical to SEQ ID NO: 28026

SEQ ID NO: 28039 - DNA, 2553 bp, Pseudomonas aeruginosa BL17; identical to SEQ ID NO: 27910

SEQ ID NO: 28040 - DNA, 2136 bp, Pseudomonas aeruginosa BL17; identical to SEQ ID NO: 27911

SEQ ID NO: 28041 - DNA, 5841 bp, Pseudomonas aeruginosa BWH030; identical to SEQ ID NO: 27909

SEQ ID NO: 28042 - DNA, 1140 bp, Pseudomonas aeruginosa BWH030; identical to SEQ ID NO: 28026

SEQ ID NO: 28043 - DNA, 2553 bp, Pseudomonas aeruginosa BWH030; identical to SEQ ID NO: 27910

SEQ ID NO: 28044 - DNA, 2136 bp, Pseudomonas aeruginosa BWH030; identical to SEQ ID NO: 27911

SEQ ID NO: 28045 - DNA, 5871 bp, Pseudomonas aeruginosa BWH050
atgcttgacccaataggcggcttccgccgaatccaagatttcgtcatcaactatgttgagactagtttccgtatctcggatacggcagccgctgaagcacgacgcaaccttctacagacggtcggagtgttagcaaccgagccatttattgaacctgtgctgcgctacgaatctcatcaggagagtctcgagcaattggcacaacgtaatgacggtccgcttgcgccgctatcttgggagggcaagcgctcttttgtagagctggcactttctggcctattcgacggcaagcgctgcaaaggagagattcgtcggaaatccagctatgccccctataaccatcaggtcgaaatgctcagacgcggcctgctgccaggtatgccgggtatcgtcacgtcgcgtaccggcagcggaaaaacggaaagcttcatgttgcccgtgctggctgcgatctctaatgaagcggtgacgtggaatgcccctgactgcaactacttgaagaacgattggtggaaggaagacaaggcgcggtggttggcgcggcggcagggagaaaatcgtccaagcgcagtccgaaccttaattatttaccctatgaacgccctggtcgaggaccagatgcagcgactgcgcaaatcgcttgactcggaagatgcgcgcgaagtgatgcaagagcgcttcaaaggtaaccggattttcttcggtcagtacaccagttccacgcctgtcactggcttcgagcgccacccgcgcattgctgagaacgaaggcgagaagcagcgccgtacccggcgcattacgcgcctccgcgaggcaatgcggaggttcaggcgcgaccaagatgcggcgctcgcctttgacctacaagaagaagcagctgcgcaggatgaaagggaggctatgccggacaaaacccgctatatctttccttctgtggatggcggcgagatggtatctcgatgggatatgcaggcgaatccgccggacattcttgtcactaacgcctcaatgcttggcactatgctatctcgtgaagtcgaggagccaatattcgcccagacccgtgactggttgctgaacaacgatgatgcctatttttatctggtctttgacgaactgcacctgatccgcggttcggcaggcacggaaatagccttccttgtcaaaatgctcatccagcggctcgggctcgacctgccggggcatagacataagctacgtttattagcctcctcggcctcactgcctactgatggagagcaaggcctgcagtcactggcgtatcttcgcgatctctttgcaccctatggcaccagccgccatgctaacgatccgggggtggatgacccagatttctggcatgactgcatagtggcgggcagcccacatgttccgacctttggcaccaggtcgatcaaacctcaacccttcgtcgacctgcttgaaacagcgttggagtgcaacaaaggttttgttgccaagatcctaagtgccgaggcgatgaatccggccgttgagcaggcagccaacgctctgggcatctctgcaaacaatgccgtggaccgggtcaaggcgctggctgaagcggctgcggctgtgctgactcaggcttgcctcgacggagcagaggtacgtgctacgtctacttcggacatggctgcccgcatcttcagggccggttcaaataatctggataaggcgttgcgcggcctgcttctggctcgtgcgttacccgagtccaaagtttggcccgcgaccgtttcgctcactacgcccgcatttcgcgtccacacctttattcgcaatatcgaggggctatttgcctcggttgttcccaacggatgtataccaaagttcggcgatttcacggtagagcgtggtgtgacacacgcaatgccacaggccgaaggcgggcgcggcctacgactctttgaattgctctattgtgaagcttgcggtgacctgcttattggtggtcagcgcggacagagtattgcggaaagcagggtaacggaactgctaccgtcggcggccgacctcgagagtctgcccgagaaggttggctccgaatactacgacaagatgactctagacgaattcgcggtcttctggccgcgacgatcgcagccgtcactttccgaacgggactacgacgcatgggacgctgctagtctgaaccctgagacaggtctggtgttgactggccaggttgcgccaccagggcatattgatggttacctctatcgccagacagaggcggcggtgaagggccgtcacggtaagacaacaggccctttgatggcgcagccattttgttgtccgaagtgcggtacagattattcgaatagaccggtttccagtcgttcgcgttcgccaattcgtgcatttcgcaccggtgttacgaaaacttcgcagctagtagcgacggaactattcgaacttctgcatgcgatcggtgcggagccgaaggggattgtcttctcggacagccggcaggacgccgcaaaccaggcgttagagatcgaaacacttcatttgagagatcttcgacgagaagttctggtgattgccgctcgggcgttggtcaagcaggcaaatgcagattggattgacccgacgcaattcccgtcgctgatagctgccgccgctgaaaaccatgaagagatgaaacggcttgcagaaaaatttcaaaagcaaatggcgtccggtggccagaggaacagcggcaaaattccgcttggcaaattactgcaatgtgacggtatggatattggtgctctcactgcagagttcgcctcactgggtgtccatccgttcgatcgagtcggcaagaaactctataaaggaaaacggtggcacgatcttttcgctgagaatggggaacgacttgtttattctccaaagctcaatgacgcgcagaaggcaggaattaataaggaaattctcgaaggtcagtacgaactgatcgatgacgtcctttttgctaatactttctttgcgctggaagagactggcctggcctacccgtccatcatggtaggggacgaggccaaagcagatcgattagatgcctggctccgcgtgtttgcaggcgcttatcgcgttctggacaacaagtacgtcaatggcgaaaatttgaatgaatgggtttctgggttagatgttaagcacaaacgcgtgttgcgcttcgcccaagccgtatttggggcgagctccgcaaccgaaggcctgagtggcatcctcagcgagttttcagcgctcgagcatccgagcggtatgattcatattggcaaactgtacctcaaggtcgcagaggcacatgactcctactggcgttgccgcaattgtgagcgggtgcatcttcattggggacctggtaagtgcacgcgctgcggggaaatcttggacgagcagccaacgggtcaagcagcagaattatggcgtagtaactttctaggcaaccgcatcgtacgaggacaagatgagggcgttgatcgattccgattgcgcgtagaagagttgactggacagacagatgatttctcggaacgcttgcgcaagttcaagggtattttcgttgacggcgagaacgaaattcagaagcgcgcccaggaaattgacatgctgtctgtcaccaccaccatggaggtggggatcgacatcggatcattgcagaccgtataccaggccaacatgccgcctcagcgattcaactaccaacagcgtgttggtcgagctggtcgtcgaggtcaagctttctcaatggttgtcaccttctgccggggtcgcagtcacgatgcgtattacttcgctcatccgcacgcaatcaccggcgatccaccgcctccgcctttcctggctatcaaccacgaccccattccattacggctggtgcgcaagaactggctgcatgcggcattcaggcatttgcgagacgagtgcgctaaggccggctacgagtacccaggggacttactaattccgcccgatgtgcacggtgagtacgtctcgacacatgacttctatcatgatgttcaagcggattggcctaagcgattgcgcgaagcacttaaggaaactattttcgtacgcgatagtttcattgatgcagcttccttcgatcgggatcagtgtgttcggcttaccgagcaaacggacatcgacctgctgatgcaagagatcgaaaatctcagatcgtacgcgccagactcggagatggggcttgcccgattctttgctgaatggggattattaccgatgtatggcatgcctactcgcgttcgaaatttgtacctcggccttcgctcggtagaggttggcaaagaggagaactttgagtggtccatcatggaccgcgacctggatctagcggttttcgagtacgcgccaggcgcagttctagtgaaggacaagcaaaaacatcgtgtggtcggctttacaggcagcctatcgactccgcaaaccgttaaaaaggacgaactttcaatcaaggcgttgtctcgctggtacgaatcagaaactcatgtggcgctctgctcagcctgcggctcggcgacgcgcagggatgttttgccaaactcttcccttccatgcgacgactgccatgaggtgatcctgcctgatgcattcaagccctatattgtgccagcgggcttccgaaccgacttcaatccaaagaatgacgaagaagacatcggtcgcatgtccgtacggagcatggcaaccctggtgcatgaaggcgagcgcttggaatatggaagcgtaactgtgctgcacggtgccaatgtcaccatcatgcagatgaacgatggtgtcgcaaacatagagggtgaaggcgacggttttcttattgaagaagcattcgatctgaaagttccaatgccgtcaggatctaggaaacacccaaaaatagaaggaatgccccaagcattcgaggctggttggctcaacgctgcgcgcagtgggaattggggacaggcgcgctggagtaagttcggaaatccgctgccaagatttggtctcatttcctgcaagcagacagaatcggttcacttggagcttagccagattgacccgaggctggacctggcacatgtggcacgacgcggcaagtatggtcgcttgtcggtacgcgcagccgcaatcagtgcgacgcagatcttggtgcagcgggccgcccttgaactggacgtgtccgctgaggagtttgaggcgctcgaaccgagggtgcgctctggtaagccgatgcttcagatcgccgatgccttgatcaacgggtctggcctatgtcgtcgtttaggcgaaaccgttcctggaggctcaaggtcgaaaatcctagagatcctggatgacatcctggcaaatcatgataagtggccccttgttgacatgctcaagagatcagaagagggagagcactccgcgcaatgccatacctcttgctaccgctgtattcaacgctatggcaatcgccgctatcacagccttctggattggcgccttggcttggcttacctgcgcgccatgacaacgccggagtatgcatgcggattgaatgcgaatgatgagacctatcctgaaatcagcgattggcgtggacgggccgaatggttaacggagaacgttgcacagatgcgtcccggtaccttgactacttatcgtttgccgcattcgggactgtcttgcctgattgagcgggtgggtggagccgaaacgcgctacgtggttgtccacccgctctggagtttggagtcgagtgtgctttccgacgtgctgggagctgattggtcaccgaaactgctcttcgtggatacatttaatttggagcgtcgtccacttaagtcgatgagcactcctttattgcctcgctaa

SEQ ID NO: 28046 - DNA, 1155 bp, Pseudomonas aeruginosa BWH050
atggccagggccggacttggtgatcgttggcaatgtttatttgccaacgatatggatatcgtgaaagcctcaacatatataagaaactggggcgcggaacacttcgatgggcgcgacattcgagaagtcaacgtgacagaccttaagggatgtggtgatttagcatgggcatcatttccatgtcaggatttgtccgttgccggaaatggcttagggatgggcgagagcggtaccgaagagtttacgaggtcgggtgcgctctggccgtttcttgatctgattgatgatctgcgcctagagtcaagacagccgcatcttctagtgttagaaaatgtggttgggttgcttactcttgagcaaggtcgtgattttgcggccatatgtttaaggcttggcgaaatgaagtatcgttacggcgctgtcattattgatgccaaaacattcttgccacaatcacgtccgcgagtatttataattgcagtgcggaacgatattgaaattccgtgtaagctctcaagcgagacggcaacagattcttggcacgctccaacgttaattcgcgcgtataagtatttacccagcaaggcgcatgaagattggatctggtgggacttagggcctgcccctctacttaagaaaaatgcactagaagatcttattcggctcaatgatgctgaatggcatgcgcccgaagagacccagcgttttataaatatgatgacgcctcttcatttggcacgtctggaggaagcgaaaaatgcagaaaatttctctgttggcagtctttatttgcgaatgcgtcgagagggaaatgcaaacaagcaacgtgcggaagtaactttttcccctattctaggttgtctaagaacgccaagaggaggggcttcccgttcaagaattattgtggcgggaaaaggtcaggttagaactcgccttctttccattagtgaagcagcggcattgatggggctggaccatacctatactctacctgatatctatcatcatgcttttaaggtgataggggatggcgttgcggttccctcagtacgtttcctagctgatcggcttcttgaaccgctcattctagctgcccggaaaccagcagttcctggcagtgagaagaggcccgataaatgtatagcactagcgtga

SEQ ID NO: 28047 - DNA, 2631 bp, Pseudomonas aeruginosa BWH050
ttgcatcgatggaaactgtcggagaacttatggttctacggttgccgagcagaagagaagcatgaggctttcatcaaggatggattaaatgtgaacttgccgcgaacttttgatgcatgggagagacagctcgtcgattatttcctgcgtgtcggcccagatggtgatgccagcccaatccgagccttcgaggtcacaccacgcaccttggcgctagcttgcggcgccccacccgagagtgagccaaacgtcgaagaggccttccggcgcatgttgtcggtcgaccctttgctgatgaactcgctgcgcttgggttcccagcgctttgaaaagcttgatgtccccaactgcttttcctacctcgcatttaccttgttgatcgatagcctgctggaaggcaatacgacgcaaagtggcgaatttcgcctgaagctaatgaaatggttggggattaaaactcctttttccgatcttcgcggggttgcgttgatgtgggaaagcctggtgcggtggctcgacgagcgcattcaggcgggtcaaccatttcgccgtctgattctgccggatccaggccattggtcgcagatcggatactcgcgccgcctgtcctttcccagtaagcccgacttgcgcttattggcgaatttctgccgggaacatccggaagcacttcgtaatccgcgagtcagtattacagcgtttgaacgagtgctgactgacagtcgcgcctcatggggcctgcaccgtgcgttcgatgagtttcgctgcgcttactacctgcagcgtcgcgcgttgggcagctttcccttttggcgtcttctggagcacgcctcaactctgacggggcgcccagcacgctccagcgtcacaatcgaaatgctatttgatatggacaagcgtgctctcttctttgcttgccgccgtgaggacggtgaagctgagccgtttacatccctgagtgaagcgctggtatttgctggggcggatcacagcgagaacctagctaccgctgctgcgttaggtatcgtgtttttccgtctggtcggtgcggggcggtggcgggctgaagcggacgccaacgattccgcttttggcttgcatgtggctgtggctgaacgacacaggcggaaaatcggtaatcgattgggtgacctgtccggcagcaactcgtgggcgatcacgacccagcctttgactcttgaggctatcaaggatgctctcaaagcagccaagctgcttagcccccagcaggaaaggatcgtacgtcctctcctgtccggtggagtgcgtagcgatggggtttggctgggccgcccacgatttcttccaactctcgaatctgacacctccgactatgtcatccgcgatgcgttgccgtgcgtaaccgacgtcccgcttaagattgatcagggacaacttatcgccacccggccagtagaaggctgcttcttcatccaaccgaccctcttgcgtgatgaggagcatgcgccatggagtattcgtctccaattcgtcagtaacgctttcccacacgaggcgcttgagggtgctcgctacaagctgccgccgttgctcgactggatgccacgtgtatctgatcgccttgaggtcagcacaaaggccactctagcgtgggaggcagatgagcctgcctgcgcggatcttctcgaggcggtctacgccagcggccgaagtggatgggaggaaacgcagataatttcactcctgggatgtgctgacgtagcgatgagtccctggcacttactgcgaagtctgcgggatgcgggcattgtcgaaccgcgactccgcgctggctggaaagggcggacctggaccttgagggagccaagcattatcgaagctcatcagggggggcagaagctagccctggccgaaggggcgctttgtgcgcggatggtcgacgcttttaagcaggccgttgaaggttttggcgggactcccttccgccgtttgggtgctacctcttgggccgtccccctggttggtgcaaagggggttcaagccaaagcgctcgccgagtttctcggctggcgttttgtggccgaacctgcaacgccgaccgagaagcctttggcatttgtcgaaacccgacatcaagccttgcactataagcaggcggattcttggtcttggtctatagggcgctttctgtcaggtggctgcattgaagagggcgttaggctggtgcgcttgacccatctcggcgagcgcgaccacgatgtctaccgagtcgagcacaacagttgcgtatttcactacttgtcgcgcaccgctgccatcgcctcagctcatgctctggcacaaatgccgttgtttgattggcgcccggaggaggaggtgattgcccttatggggcacgaaggcggacttcccgatgcccttgctacagaagtgcgccgacgcatgctgcgcaacggtgggccgcgtggcgttgaatatttttatcccgtgaacaacgaagtggtgcgctggctagccgggaggttaccaggctgtatcgctggactggcagagggcgagattcggggggcaccgacgctgatcagcctctcccgccgttctaccggacggctacgcctgcaatggcgcaacgggaaaacctctctttag

SEQ ID NO: 28048 - DNA, 2094 bp, Pseudomonas aeruginosa BWH050
atggcggcgaatttggcgtggtatgccgggcaatgcgtgagcaagaacgatgtcaatatgactgtcaaagtcgttggcattcggtcggaagatggatggtcgctgctcgataagccacagaagctcttcccgaaagctggtgaggtagaagtccgtttacaggccgcttctgggtatcacaagaacgattgggtaatattccaagtcgctcacaaggagccccgagggaaatggaaagcatccacccatcgcaaactcacgcccttcctggacctacaggacataggaagtcttgatgcattgcgtagctgcctaactgaagagggtgtggacgggccggatcatagtgctggctgggtgatccgctacagcgaggatcgcatcatcttactcgacctgatccgctctccggataatcgatacaggatggcagttggtgacaatttctatgtatacgtctacgaaccagaactcttgcattgcatgccatcagatacgggcgaagtgttcctttacgattgcaagcggacgggcgaatgccttcaagttctcgactgggcaccagatgatggatacatcaagcgaatcgtgcgtgccatggcgggagctcacgatccaagtgtggaattcgtcatcgagtggctgaagcgccacgcggacgaggctacaggacaaatcggaagcagtcttgaagataagctagtcgcgcaacagtctgcacgctcaggagagttaatcaaacgattgctggccgataagagtctcctcgggcaactgaccgagttgctactagcagacgccaagatgctttcccacctccaaagcgaaatccaagcgatagctgagcaggaacgtggggccattcgcgcttcgctcatggacgcgttggagcacgaggtcatggcattacgcgaggagcgtttgttagcgttcgaggccgagttgcgttcgctggaagcggagcagcatgaggtgttgaggggccagctagagcaggatatgaagtccaatatcttggccatggaggagcgcgtagcagcccgccagacgaagttggaggatcagcttgaatctcggcgcactgaactgcagcaggggatcgatgcgctcgccgctcagcgtgaggcgcttaagggggaactggagagcatcggtttccaaattaaagcaggtgagcaatcgctggcagagcttaaggcgcatgaaactctcgtcgctgaggagatcgaacggcttaaagatgatgccgcctcgatacacgtgccgaagagcgtcaagcttgagtccgtattgcgcttcaacccacctcagtgcgctcctacccttggcgtcggggacatgcatcgagagattaaagaaagcatcctgcttacgtccgtgggaaaagagcggatgacacagtttttcgcgctgctgctggcgggtgaaagtccagtgctgcacggcccagaaacgcaggatttcttattggcggccgaggcgctgttgtcgtccggacggtcgatgcgtctggaggccgaccctactgttatcacctttgaagatctctggttgcgcgcaggcacccaactgccaaccgccttgacccatgggctggaactctcctgcggacaaacaccagtcaccgtactggcgattgtcgagcgcgccgagcgatccggagcccgattctggcttccggcgcttgcagaccgcacgcgccgtggtgaactgccaagacgcttctttatctgtgcaactgtcgaagacgaagattgcgaggaagctcaagcgattcgtagccaagtgccatggctccatgtcagcggaaccatagctccgtcggcaccagccctggttcccatggtttttgccccagctaaagtttggcaactcgatccgggcgagcgcccgcaggacatcacgccagcgatgacggcggtggcaccactagtgaaccaactcacgttggtgaatgcgcttaggctggcccgcgcagcgactgaatgggtccgcttaaatcagggtgttggttacgagcaaactccatcggcgctaaccgggctgttcatagaccaacgcgctcaggccgaccgcacgcaacagaagtcataa

SEQ ID NO: 28049 - DNA, 5841 bp, Pseudomonas aeruginosa BWHPSA006; identical to SEQ ID NO: 27909

SEQ ID NO: 28050 - DNA, 1140 bp, Pseudomonas aeruginosa BWHPSA006; identical to SEQ ID NO: 28026

SEQ ID NO: 28051 - DNA, 2553 bp, Pseudomonas aeruginosa BWHPSA006
atgaaccctcaatctcccaaaactttcgaagagtgggagcgctgcctagttcggcattttctagttgtgggatcagacggggatgctagtgatatacgctcttttgaggtaacccctactactttagcgctcgcctgcggggcaggaattgatcaagagcgaaatatcgaagaatcattcagaatatttatggctgggatttcaaatcttccaaaccggctgaatattggaatgcaaggagcatccacccgcgagctgcctaatttcttcatctatctcgtcatgacactgttgattgatagccagctggaaggaagtggcgacgggaatgaatttcgagggaaattgcggaagtggctaaattctgaacatggttttcagcagcttcctggcgtaaatataatgtggggggcgcttgggcgctggctggacaagcgagtcgacgaaggtttaccttatcgccgacttattctaccgattattccaaaaacttggtgccacatcggctatacgttgagattaaccttccctaataaggttgatcttcggctgatggaggtttttttagcgaactgccctcaggctgaatctgacccaggtctagtggtaagaagctttccagccatattactcaacgatcgagcatctgatgcacttaaatcagccttcagtgagttccgcgaatcctatttgctaggccggcgcgccctagctgacctacgtttctggcgcttgcttcgccgcgctcacgcccactctgaaaagctcgagcgacacagcgtagtggtcgacatgatgtttgatgctgacgggaccagggagtatttttcttctgcggatcaaacgagtcaggcagtgtttcaccctaccctatttctcgctttgaacggcgtttctgccgagtcgagcttgaatttgagcgccgcagttaaaactggtctcttattctttcgacaaattggtgtaggccgctggcgagcagaggctcggctctgcagcgctccacagggtctccatatggctctggcgcgaaggcatgtgtcacatctaggcagtcgattggggcgattagtgtgcgagggtgattggtttttaacaaccactgtgcacagctaccactccctgcatgaaactcttactcctatgggttttttcccgcgcgcttccgagcagatcgtacgacctcgtctctcaggaggtgtacgtgtagctcatggttggctgggacgaccaggctttttaccgcacattgagtccgatacgactgattacataattaacccagtagacgtccgactcgagaaagaatccattgtgatggagggcgggcagctaacggcattggttccggtcgagggctcctttgtcatagaaccagagcgtgaattagtagagaaagctgccccctggcggcttcgagtgcagttgattcgtaatgcattgccccatcccggcttgggttcgagtgctcgatataagttggagcagctgaacgactggtcgcgagtctcaccttcctccgtcgttttcgaagggcaggatcctttagtttgggaagagatcgtctccgaaagcgaagacttgcttgaggcgatctacgccgacggtgctagtggatgggaagaggcagcgcttgtcactcttctacgaggtgtcgatacaagcacatgggacttacttcgctgtcttcaggacgcaggcattatcgagcctaggctgcgaaacggttggaaaggccgtgcctggactcttgtagcgcctcggctggtcggagtaacgaggggtaatcagaacatcgctgtcatcgagggggcagtctgcgcatcacttatcgacgagttccggtctgtggtcgctaggttgggtggccagtgctttaggcggaccggtgtaagcccttggtctcctccagtaatcggggcgagcgttgcatccgttgaggccctggcagaaaaaatggattggccgttggcacttcaaccgatgatgcctgacgcagagccactggcattcgtcgagactcatcgcatgtcagacttacatgaggtcgcctctgcatgggattggaatgagagacgattcaaggaaagtgcctcccgcgaagagccatttaagctgactcgtttctctcatcccggcgggcgagatcacgacctctactgcctgacgagtcgcagtcgcctgatgaattatctgtcacgtacggctgcaattgctgctgcgcacgcctcttcgcacacccccctgtttgagcagcgtgacgacaatctactagtacgcctcacttgcgacggggggcttcccgacgcggtcgcggccggcctcagacgacgactgctccgcacagcgggtcccgtgggaaatgaatatttttatccgattactcagcaagctcttagttggcttagctcactgttgccaggctgtctagcagggccggatttgattgatgagcgtccccctacccgtcttgtggctgaggcacgtaggtcaagggggcagcaacgattgcactggcgcaaggggcgcctgacgctgccgcgtcacacgtaa

SEQ ID NO: 28052 - DNA, 2136 bp, Pseudomonas aeruginosa BWHPSA006; identical to SEQ ID NO: 27911

SEQ ID NO: 28053 - DNA, 5829 bp, Pseudomonas aeruginosa C48
atgcttgatccaatcggtggttttaaccgtatcagggatttctttatctcgtatgtggagacaaactttcgcattgcggataggagtattgcggcagagcgccgtcgcctcctcgaaacaaccaacgtctttgccacagcatcatttgtggagccggtactgcgttatcggacgcatgacctgcgcattgatcagatggtcggggttgtggacggcccactcgcgaatctgccgtatgatgtgcaggtggcgttcgctgaattggtgctttccggtttattcgaaggcgatgctgcttctggtgaactaacgcgtgtcggccgctatgcgccctataagcatcaggtcgagatgcttcaacgaggtattcagtcagggcatcctggcatcgtcacatcaggaaccggctcaggtaaaaccgagagctttatgttgccaatcatggccgcattgtcccgtgaggctgtcagctggtcgaagccggatgccggatatctcaagacgccctggtgggcgtcatcgaggggaaagtggagcccgcagcgtgatggagagaaccgtccggctgcagtgcgcgctcttgtgctgtatcccatgaacgccctcgtcgaggatcaaatggttcgtctccggcgcacgctagattcggacgaggcaagagcggtaatggatcaccggttcgaagggaatcgagtgttctttggacagtacacgtcctccacaccggtgactggatacgaagatcaccctcgtatcgcggatagcgagggggagaaaaagcggaggcagcgccggcagcgagagcttcgttcggcgatgaggaagttcaaccaggatcagaacgacgcgcgcaatcatgatgccgaggcgcggaaaagcgcagaggaacggggagcgtcccctcctgatatgacccgctttattttcccgtctttagatggcggtgaaatgctatcgcgttgggatatgcaggagacgccaccagacgttctcgttactaacgcatcgatgcttggcgcgatgttgtcgcgcgaggttgagggcccaatcttcgagaagactcgtacatggctccgcgacaatgatgatgcttacttctatctcgtcttcgacgagctccatctcattcgtggctctgctggcacggaggtggccttcctaatcaagtccctcattcaacgattggggctggatgatctagcccatcggcataagctacgtgtcctcgcctcgtcggcatcgttgccgatggatggcgaacccggcattcaatctcggcgatatctgcgtgatcttttcgcaccattcggcacaagcgctaaggccggagaggctggctcagagaacgaggagttttggaccgactgcgtcattaaaggcgaggccgacattccatcttgggaaggcgggtttattgcgtctggaccgttcctcaagttgatggaggctgcgcgcactaacgataaggacttcatcgcgaagattgtgaggagcgatgccttagagaaagctctcgatgctgttgccaacgcgctcaatgtcaccgcatccggtgatgcccgcatcgttcagatcgcggaagtcgcagcggcggttctcactagcgcatgtagggtagatgagggggttcgggccgccagcattgctgatctcggcaagcggctgtttggtgatatagcgaatgctgatgtcgccgtccaaggactaatgctcgcacgtgctctgccagaaagtgggcagtggagtggacgtgtttctcaggggacgccgtcgttcagggttcacgcgttcgtgcgcaatgtggaagggctgtttggcgcgccctccaatgttgcaggcaaagtcacatttacagctctaagtgttgagcgtggtttgtcccacggccagcccgccccgggcgaagctcgtggccgaaggctatttgagatgctttattgcgaggcgtgtggtgacctgctactcggcggtcaacgtggtaagcgcgtcggaaccagctcattgaccgagttgctgccctcaactgctgagctcgaaaatctaccggagcgcgccgcttcggaatactacgatcgtatgtcgtttgatcagttcgccgtgttttggccgagccagcttaccccacagcaggatgcccgcggctgggatgaatgggagccagctcatctcgatccagaatctggcgtcgtgactctgggggaggaggtgcccggcgggcggattggcggaaggctctatcatcagtctacgactgcgtcgcaaaacgggcatcgcaccgctcagccgttctgctgcccgaactgcggcaccgattactcgaataggccgcccagctcgcgttcgcggtcaccaatccgtgcattccgtaccggtgtcagcaaggcatcacaattggtggcgacagaactattcgagctacttcatgcggtgggggcagaggctaagagcatagttttctcggatagtcggcaggacgcggctaatcaatcgcttgagatcgagcgcctccatcttcgcgatttgcgccgcgagattttagtgaccgttgctcgagattaccttcaatgtgcagctgtagcaaaagttgatccgaagtcagctatggctgcagcgcagaagctgctggacgcgggggatatggagggcttccaaaaggctgtcgctgcgatcagcgcgcaggcgcaagacactcagatctctgtagagtctcgaaaagtacaaatcagcagactatttgactacaaggacactaccggcggtgtcggggcgttgatctccgaatacgtgaatctcggcatccatccgttcgatgaggttggtcgcaagccctacgataagcgtccttggttccaggctttccagaagtcaggagaactaatcagctatgcatcttggcttgacgatactcagcaaaaagagctgggcgtgttcattgagcaggagctgatggaactcgtcgacgacgttattttcgccaacaccttctttgcgctagaagaaaccggactcgcctatccatcaatcagtcgcgaatctggccctgacatcgatcgactagacgcttggctccgtgtcttcgcgagcgctactcgtgtccaggagaacaagttctatgatcgcagccgaaccaccgagtgggatcaggcaagcaagattaggccttcaagccgtgtttggaagtttgccgatgctctgaatggagatacaaataaccagcttcagagcgttctcgatgcatttggcaagcatggccatgtgaacggcatcatccgtgtaggacgtgtgtttcttcgggtttctgagccaggtgatccattttggcggtgcagttattgcgagcgcatccatctccatcggggagtaggcaactgtactcgttgttacaagccgctgccgtctgagaagagtggcaaggtggaggagctctgggagaccaatttcctcgggcggcgcatcgtccgaggtcagaaggacggagttgcccgtttccgcctcaggtgcgaggagttgactgggcagactgatgatttctcagagcgtttgcgtaaattcaagaacattttcgttgacgacttcggcgaagtggcgaggctagcgcgcgagattgacatgctgtcagtcacgacaacgatggaggttgggatcgacattggatcactccagactgtctaccaggcgaacatgcctcctcaacgcttcaactatcagcagcgcgttggtcgggctggtcgccgcggtcaggctttttccttcgtcatcactttctgtcgtgggcgaagtcacgacgcatattactttgcccatcccgcagctattactggggatccaccgccaccgccgttcctggcaacaggtcacgacccgattcctcgccgtcttctgacgaaggtttggcttcgcgcggcgtttcagaaagtgcgcgacgactttgtcaatgaagggggggtgtatcccggcgatctgctcgtcccaccggacgtccatggcgaatatgtgccaacggatgactattacgacgatagcgaaggttgtaactggcaggggcggttgaaggacgctcttcaggcgactatcgcgcaacgagacgcctatatcgacgcagcctgcattgatccagttcagcgggagcgcctccgcgcggagtccagtgtcgagaggctgatagaggagatcggtggacagaaggaatacaagccggtcagtcgacaggggcttgctcagttcttggccgaacgggggttgctgccgatgtatggcatgcctactcgggtacggcagctctatctgggagtgcgtgcggaaaccgacgacactaatccggattattcatggtcgaccatggatcgggatattgatactgccgttttcgagtttgcgcctggtgcggtactgacgaaggataagcagcgccatcgtgtgatcggcttcagtggcacgctttcagctccagaaagacgcgggaaggatgtggtgattgaaagcctatcgagttgggcagaatctgagcaccaggtggctctctgccaggcctgcggatccgcccgatacagccttcttcggccgcaatgtgctcaacaatgtgaagactgcggcgccgatatagagcctaacgagttcaacgattacattaccccggctgcattccgaaccgatttcaaagcagctgaaaccgacctcgacactgtgggacggatggcggtgagaacggtcgctacggtactccatttaggggggtggaaggatgctggatcgcttcgggtacgtcgcggtgctggcgtgacgattatgcagcttaacgacggggtggatgatgatactgggaagccaagtagattctccgtgtgcgaggctgaagatagtcgcgtccgtatccctcgagctgcatcaacgactcttacggatgatcaggcgatcgtacttgaagagatatctggctcgagcagtcgatgggtggtgaagtccaatacccagcgtactttcggcctcatcgctaagaaagagactgacgcgctttatctcgaactcctcgatttcgatcccaggctgactctcgataacgttgctaggaaaggtaatttcagtcatctacccacgcgctcagccgcgatcagcgcaacgcagattcttgtgcagaaggctgcgttagatcttgatgtttcccccgatgaattcgaagcactcgaacctcgattgcgcgaaggcaatccgatgctgcaaattgccgattctctaatcaacggttcaggactttgtcgccgtctcggcgaagatcgtagcgatggtactccgcacatcgtgcatcttatccgggagatgctcgcggatcgcgcgatttggccattgattgagttcctaagtgttgatgaggatggcgatcatgccgcacgatgtcagacgtcgtgctaccggtgtattcaacgatacggaaaccgctcctatcacggacttcttgattggcggctcgggctcacttacctacgagcactggtaacaccgggctacactgcggggctggatgcgaaggaccagatgttcccggagacaactggttggagtcagcgcgcccttgcgcttgcagaggccgttgcggggatgcggccggactcgctttcggttgaagtccatggcccttcgaatctgcctgtgcttcgtgaaaagcataaaggaggcgatactttcctgatcgttcaccctctctggcgcgtcgatggtgatttcggaaaaagtttgagtgacggggctgaggtgaagttcctcgatacctttaacctcgaacggagaccattacgggctatcgagctggcgaagattgaccagatgctgcgttag

SEQ ID NO: 28054 - DNA, 1197 bp, Pseudomonas aeruginosa C48
ttgtattctgaaaagctaaagtattacgagttcttcgcgggcgtcggtatggcgagggcaggacttgggggggattggcaatgcttgttcgctaacgacagcgaccagcttaagagacagtcgtattctgaaaattgggcaggagaagcttttgattctcgcgatgttgcggaggttgaaacaactgacctcgatggaatggccgatctcgcctgggcttcctttccttgccaagatctatctcaagctggctcgaaagccggtatcggggaggccgatggctcctcggtgacacgctctggcgctgtgtggccgttcctgaggatcattcgtggcctggcggaagaggggcgacacccggtcctgctagcactggagaatgtggtcggcctccttagcgcgaatagtggcaatgacttccgttcactctgtggtgccctgaacgagattggctatcgttttggtgcgatcgtagctgatgcctcgcatttcgttccccaatctcgcccacgggtgttcatagtggcgattcgccgcgaggtgcccataccggcagcgctacaggctgagcttccacaatctccatggcatcccaaaactttacttcgtgcccgtgcaggcctttctgttgaggatatggctggttgggtctggtggtccccaggtgccccacctccccaaaaggacttcgagctcggggatatcatcgatctgagtgaggatgccgattggaacaccgaagaggcaacccagcgcctcattggtatgatgagtgagttgcaactcaatcggttggcagcggccaaggcagaggccaggccgatgatcgggagtctctatctgcgaatgcgccccaacggggatgacggtaatgtgcagcgggctgagattgcttttggggccacgcttggctgtctgcgcactccgaaaggaggagcgtctcggccacgcatcattgtcgttgagggcgagcgtatccgcacacgtttgcttaccgtggtggaggccgcgcgtttaatgggacttgaggaggatttcgctctcccggaaacctatcatgactgcttccgcctgatcggtgatggtgtcgtgccggcggtcgttcgttttctggcagatagactgttggagccattggcgaagcacgcgaagggaggaagccttttcgccacacttaaacggagagaattggcgtga

SEQ ID NO: 28055 - DNA, 2520 bp, Pseudomonas aeruginosa C48
gtgacgcaaagtgtgcaagtgtcatcggagcttccggttacattgcacgattgggagctgacactcactcgggcgctattgcgcgctgagggcggagatagtgacgccatccgctcgttcgagattactcctgagacgcttgcaatctcctgtgggcttgatatgggggctgccgaggccgcggagtcagcattcaggaatgcgctccgagccgacccccatctgatttggtgccttcagcacggtcggttcaaaaagccagataacgaccagccgaactgcttcgcgatgcttgcgctcagtttgttggtagatagtcttcttgacggcatttacgaagaaaaagggcaatatcgcgccaagcttgccgaatggttgagcattgatcgctccttcacggacttgcacggtatagcgattatgtggcggcagcttgtcgcttggctggacagtcgcatcgctgccggtgcgccgttccgacgccttatcctgccagcgataccgataagctggactcatatcggttataccagatacctgtcttttcctaccaagcgtgatatccgcttgctgtccaagcagatcaatcgcaggggcagcactagcatcgatcctgcaacgttggtgtggcagctcgacccgataatacgcgcttcgagcacctcgcacggactaaaggctgctttcgaagatttcaagatggctctcaggtcgggtgcggcatccgttgatcaccggttctggcgcttggtgcttcgagcgagtatgcagtcggggcatgcggaaccgaaagctggaagcctcgtgatggatttcgatgaggacggtgttcgtcgctaccgggttgggcagttgctggatggaaatactgcgttcaacttgctaggtagcgcaatcgcatcgcccggggtcgctgatagttcaaatctaggaccgtccaccagacgcggcgtcttgtttttccgctccagcgggctcgcgagttggaccgctgctggcgagccccaccctggcagcggtccctttcatgtgggaatttccagtcaacacattggttctgttaggggggtgtgtaccgagttcatatcctccggaagttggttcattactgcacacccaattaccgggcgaattgttgatgacatcctgacccagatcggcatcttgaacgccaagcagacagtgcgaatgatcggtcttgtggatggcgtgcgcgtcggtaattcctggctcggtcagcctcgataccttccataccttggcggagcatctggtgatgtcgtgatcgaatcagtggacggtggttcgcgtgaaggattgtcctggatagacggcgaacttcgagctgatggtcccgtggatgggcagttctcgatctctgatgctggtgcgcattggaccaggcgcgcatcgttcgtggcactggccgaagtccatgctagcttcagcgcttcggcctactctctgccggagcaggcagaatggttgggcgcaacgaaccgaaggtgtgaccactctcatgctgtggcgagggagtgggacgatactccctgcacaaaccaggacatgatcgaagccctctacgcttcgtcgcggtcaggcatatctgagggcgacgtgatttcgattatcgaccgagctgcggggccctttaggtggcaatctctccggctgctccaagaggcctcatttttcgatgctcgcccgctcgctcgttggagaggtcgggtcttcacgctaggacggccgaggctcgtgcagattcaaatgggtagcagaacggcgctgctggtttctggcgcagtgcccgcacgactcgaagccaactttcgctcgacggtgatatcgcagggggggacagcctttcgcaggctttcaaaagagagtttcgctcttccgctgttgggggcgtttggagtggtgcccgagatattgtcgagagctcttgggtggccgctggttgacgcaccttttcagccggatggcaccggcgtcagtcgactgattgaaaccaaggtgattggagaaggctaccaagtatcgtcccattgggattggtctgttggccgattttgtagtggagtaggtactgatgagtcggtagctcttgtcagactcgtccatccaggattacgagaccacgatatctatcgtgttcagggtcgtaaatgcattaggtcattccactcacggcatgccgccattatcgatgcttacctgcaggccggaaggccactatttagatttgacgaagatcatttatctcggctcacctctgagggtgcgctgcccttggaaatatcggctgcactccgcgtacgaactctcttcaatgcagcttgtacaggcagcagctggcgatatgaggtaaccaagcaagacgctgtgtggttggccagacttttgccaggccttattgatggcctgcaaggagaattagtggcagatgctgctacatcgtatcgtcgtgggcggggctaccggcgtcctatttggactgatggaggacttgtggagtga

SEQ ID NO: 28056 - DNA, 2133 bp, Pseudomonas aeruginosa C48
gtgacagtggatgttaaaatggagcgcagcgtatttgcagcttccgacttaaagcgattcgcgggtcactttgtccgctggcagggacagtatggttccatcgcggttgttggccaattgaaccagaatggtttggacataattgcgaacccgaagcgactattcccacgtgatggtctggttgagatacaagggggggggcagcatggtgacttacaccaaggcgagtgggtcgagtttgatgtaatcaggaacacgcgattcagagctcctgcatttaaggcgcttcacttgaagcgactaccgcgcttcgcggttctaccggagtcaaccttgtcgatttaccgtgatctcctgacccgagacggctggtcgggagatgcgaggcctggtctctgggcgttccgcctagccgacgacacggtgatagtctccgagttggaaaccggtaaggacggtcggctccgcattacgcgaacttccgctcgagaggtgaaacgttacaactacgttcatgagggcgtggtacgcgctaataatggcgtgaagtctgacgacgtcttcatcacttcgatatctggtgagatgacctcattagattggtcggacgatgtggactacgtatcccgcgttgtcagttctcttgcagacatgagcgaccctcgcgtcgcggagatcatcagctggctagagcgtcatcaggaagtcataacgaatcgggtatccaccccggacgacagagaacctgtgcttgacgtgctacgttcggcagctttggcaaaccgccttcgagtcgatcgtaagctgatggaggtttatcttgcggcggtgcttcgcgacgaagccgtgcgcaatgtcgtggctgattatgtgaaggaggggcacggagccgaaggggacaagctgcgtgccgaacttcgtgaggaaatcagtgcacagaggacgcggtgcctcgcccagctatcagctgaaattagtgcggagcgtacggagaggatggctcgcattgaacaggagcttgaaaagtacgaggcagacggtcgttcggagtgtgacgtaaggctacaggatgccgagcacgctgtttccgtccgaatccaggcgctcgaagccagcgccagtgaacgtagcgagcaggtagagcgtcaaattgctgagcagacgcagaggctgatggatatcaaggcagaggtcgcaggtgtagaggctgagcgggggacgctttgggccgaagcggaatatgctcgaacacagcttaccgatgcgaagggggagatcgatcgcttacttgccatcgcagctcagcttagtcctccaatgatcagtgccccgcagcatgcagcaagtaagatcggtatcggtaggatctttccgaactatccgaaggttgacgtagccgctaaggggcagctgatcgcgcgtcaagtgatgctctcggagaaggggaaggatgttctgcggagcctggtcgttatgttgctctcgggagagctgccaatccttgtcggcagcgacactacggatctattgcgtgttgctgagtcggtcatctgtcccggacggtttgtttccgtcgaagcagacccgacgcttatctcactcgacgacctctgggccaggccgggttcgggcgcgcctactctactggcagcagccgctgaggccgttaaggatggtggagcgactttggttgttatacgaggtattgagcggtccggcgcgcgcttctggttgccggccttgtcggaagtccttcggagtggtgggttgccacgcgggctatttgtctgttgtacggtccatgagcccgagcacgaagaggtgcgcgttctcaggggaagcgtcccgtggctcgaaataacgaacgtcttctcgcctggagcagcgttggctggaccgtctctcctgacgcctccccggattgagctggagatactggatccaggggaaatgccgattgatctatctggagctagttcgctcgcgctggagctcggtgaaaacttgagcctggatattgctatgcgtagcgcgcgcatgctcgcggaagcattcatattgctcggtgacatggagttggcgcagcgtctcgtcctcaaagttgcgaagcagctggtcatgagttccaactaa

SEQ ID NO: 28057 - DNA, 5841 bp, Pseudomonas aeruginosa JJ692; identical to SEQ ID NO: 27909

SEQ ID NO: 28058 - DNA, 1140 bp, Pseudomonas aeruginosa JJ692; identical to SEQ ID NO: 28026

SEQ ID NO: 28059 - DNA, 2553 bp, Pseudomonas aeruginosa JJ692; identical to SEQ ID NO: 27910

SEQ ID NO: 28060 - DNA, 2136 bp, Pseudomonas aeruginosa JJ692; identical to SEQ ID NO: 27911

SEQ ID NO: 28061 - DNA, 5841 bp, Pseudomonas aeruginosa MH27
atgctggaccctattggaagtttttatcgcattcgggattttttaatttcatatgttgaaaccagctttcgaatttccgaccctctagcttctgaagcacggcgtgccctgctcaagaccagcggcatcctggccacagctccatttattgagccagtgcttcgctacgaatcttcggataaaaatcttgaggacctaattgaggaggcagatggcgtcctcaagccactgtcgctaaagggccgcaaggccttcgttgaactggctctgtctggtctgtttgatgggagctctgatgacggccctttactccggaagtcccaatacgcgccataccggcatcaggtctcgatgcttgaacgaggcattcgacctggccgccccggtattgtaacttccggcaccggctcaggaaaaacagagagttttatgcttccgatactggctgctctttctaatgaagcagtcgagtggcaaaaaccggaatccaaatatttgcaagaacactggtggaaaactccgaagtcccaatgggccccccggagagctggcgagaaacggccgagtgccgttagagcactcgtactctatcctatgaatgctcttgttgaagaccagatggttcgcttgcgcaagactctcgactcacaagatgcacatgaagtaatggatgctcgattcgctgggaatcgtcttttcttcggacaatatacgagcgctacccctgtaacaggctacgagcaacatcctcgcctcgcaggtgacaagcaggaagcgaagcgtcgagctcgacgcatctctagattgcgtaaggcgatgcaggatttcttctgcaaccagagcgcagcccgcaaatttgatgaaaattctgagcgtcagcaaggacgtattcgagagaccacgcgctacatcttcccatcgatagatgggggcgaaatggtttcgcgatgggatatgcaggcttcgccgccagacatactagttaccaacgcatccatgctgggagctatgctgtcgagagaaattgaagatgcgattttcgacaaaacccgtgaatggctcttatcagacaaagactcctatttctacctcgtcttcgacgagcttcatttagttcgcggctccgccggcactgagattgcctgcctaattaagtccctgattcagcggcttggccttgatcaaccggagcacgcgtacaaactacgtctacttgcatcttcggcctctcttcctttggaaggcgccgaaggtgttcagtcaaggacatacttacgtgatcttttcgcaccattcggcacaagcatcagcgaagacgatccaggttctaccgatccaagattttggaatgagtgcataatccagggtgtgccgcatatccctcccgcgagagcgggtggcattccttctgaaccattcgctcaattgatgatggctgcacttgaggggaaagatggatttgtcggcatactggatcggactcccgcattagaggctgctatatctaaggcagctgcagcgctgggtgttgtagcaacggcgcaagcctcgcttgagaagttgctagccgaagcggcagccggactactaacacatgcttgtaaaaacgatgacactatccgggctactacacccgaatcgattgctgctagggtatttgccccgggcagcgacgacactgagttggctctccgcggactgatgctggcccgagcgcttccagaggctaacgattcgcgggctagagttgcaggtgcaacgccagccttccgtgtccataccttcattcggaatatagaaggcctatttgcttccgtcaccccacgtcagcatagcgtgacctttagcgatttctctgtagaacggggaacttcgcattcatcccccgcaacgggtcaagcgcgaggccgccggctttttgagcttttatattgtgaagcatgtggggatttgtttgtcggtggccagcgaggccagagtagcggttcaactaatgctactgagctactgccgtcggcagcgaatctggagcacttacctgagcgcccaggagcagaatattacgatgacatgactttagatgagttcgcagttttctggccgcgacgtggtgactggatcggatcagataagggctatgatcaatggatgcccgcccatctcagtccggatacaggtgtagtggaactgggcgagactgcgaaggaaggaaatatagcaggttatctttattatcagacagaaacggcgattagcaaaggaaagaataagcctgttcagcaaccctctgcgcaaccgttttgctgcccaaaatgtggcaccgattactcaaaccggcctgatacaaatcgttcacgctcaccgatccgcgcatttcgtactggcgtgactaaatcttcgcagctagtggcaacggagcttttcgaactgctacatgctataggggccgagcctaaaggaattgtcttttctgatagtcgccaggatgcggctgggcaagctatggagattgagcggctgcatttgcgtgatctgcgtcgtgaaattctagttacaaccgcgagatcctacataaaagaagcatcgatagaagctctcagctcagctgaaataatcgagcttctgggtaaagctcatgctgcgagagataacaacgagatccgcaggttgtccggcctcttaactaaacagaccgaaaatgatgcatctagaactcaaaaggtaaagctggacagacttctagagttaagccaggatggttctattggtagaataacagccgagctagtgcggctaggtatatcgccctataagagcagctcatctagcatcaaagagctcccctggcatcaggagttcgagaaatctggagaagttatttcctacgacaatgcgctgtccctacctcaaatatctgaaataaatctagacatcattgatagtcaatatgaactagtcgacgatgtgattttcgccaatacattcttcgctctcgaggaaactggtctcgcctacccttgcctttcgagtgatgaagaaaatcaagcgttggatgcatggcttcgtatttttgcaagcgcctatcgtgttaaggaaaataagtattttgataagaacaaggtaaagctttggcaaagagggggcgacatcagcaatagtcgaatcaagaaaatcgcccaggcattgtacggtaactcactgtatattgatgaactaacgacggtcttatataaatttgaccgctctggacatcgcggcggcttattcaatattggaaagctattcctgaaagttactaagccgggtgatttattttggcgctgcaccaactgcgaacgtgttcacttgcatgaagggctagggatatgcactcgctgcgctacgccgctgccagagccaagtggaaaggttgaggagctctggtctaccaatttcctaggaaagcgaatcattcgcagcgagcgcgatggtgtggggcgcttccgcttgcgcgtggaagaactaacaggtcaaacagatgacttctctgatcgactcagaaagttcaagggtattttcgttgatgaagttagcgaattagagaggctagcttcagagatagacatgctgtctgtcacgacaacgatggaggttgggatcgatatcggcgctttacagactgtgtatcaagcgaacatgccacctcaacgattcaactatcaacagcgggtggggcgcgctggtcgtcgtgggcaagccttttcgttcgtcgtaactttctgtcgcgggcggagccacgatgcatattacttcgcacatccgcacgcgatcactggcgacccgccacctcctcccttccttgcgcccgctcacgacgccattcctatgcgtctccttcgcaagacttggctgcgagccgcttttaagcagctaagggatcagtgcgccgaacgaggtgagatatttcctggtgatctacttactcctccagatgtgcacggagaatatgtcactaccagagactattaccacaaccaagacatcgactggtctgctcgtttgcatgcggcactggcgcagacccaggcagtgcgagagcagttcatcaacgctgtaacctttgatcaagaacagcgtcaacgactgagggataagttaagcgtcgatctattaattagtgagattaatgaccaacgccctaacgctccatccgatgagatgggactcgctcgatttttagctgagcgaggtttgctgccaatgtacggtatgcctacccgcgttcgtaatctttacgtaggtcttcgcgaaagcaacagccatggcgggggcgcagagtacgaatggtcaacaatggatcgcgatcttgatttggctgtgtttgagtacgcgcctggggcggttcttgttaaagataagaagaaacatagagttgtcggatttacgggaaatctgactgacccacaaatacaggggcgagctatcgaagggatacgttcggtcaccgattggtgtgaatcaaaaacctacgtagccatttgccctacatgtggttcggcttgtcaaagcattgaagtacctggcgaggctttgaaatgcagtgactgccgagcactaatcccgaaggaatgcttcctgctctacgtgacacccgctgctttccgtactgattttgtgcccaaagacgagctcgatgagtttgaacgcatgtctttgcgtaccgttgcgaccgtgttgcgcgaaggcgaagacttggactgcggagccctaaaagttcgaagcggcgcaggcgtaaccatccttcagcttaacgatgggccgaccgatggaaagagtgatggacgccagtttactgttgatcttgttctggaccagagggtgccagtgcctttctcacctcaacgaccaccaattgatggcattcaagcaatcgagtcaggctggcgtcgttcaaataatacacaacgctggggcgcatctcagggggagcaatgtttcggcttgatctcgaaaaaggaaacggactctattcatctcgagctaacaagctttgacgagcgtctaactctaaatatggtggcccgcaaaggtgaattcatgcatttacctacccgagctgcagccatcagcgccactcaaattttggttaacaaagctgcactggccttagacgtttctccagatgaattcgaggctctcgagcctagactccgctcaggaagtccgatgttacaaatagctgatgccctaattaatgggtctggcctttgccgtcggctgggggaaccgggtgccgattcgcgcacacctcttatcgtagacttgctgcgtgagactctcacgaacaccaatgtatggcctcttcaggacttccttgggaccggcgccgatggagtgcacacagctcaatgccagacatcctgctaccgatgcatccagcgatacgggaaccggagatatcacggcttgctcgactggcgcttgggtatggcctatttgcgcgcactggtaactccgaattacgcctgcggtctcatccctggcgatgaaaggtatcctgagattcaaggctggaaggagcgggcctgccagcttgcggaaaacgtcgaagcaatgcgcaaaggcacagttcgctatgaatatctgcgacattcgggcctgccctgtctcagcgagcagaaggacggggctgaactgtggcgcgccgttgtaattcaccctttgtggcggcacacggaagtcggggcaatgcgtgacctgttaggcccggattggtcatcgtcgttaagatatctagatacctttgagctagaacgacgaccactgcgccgcctggcagccttaaagcaagaggaatcttaa

SEQ ID NO: 28062 - DNA, 1536 bp, Pseudomonas aeruginosa MH27
atggctctggcgcgaaggcatgtgtcacatctaggcagtcgattggggcgattagtgtgcgagggtgattggtttttaacaaccactgtgcacagctaccactccctgcatgaaactcttactcctaagggtttttacccgcgcgcttccgagcagatcgtacgacctcgtctctcaggaggtgtacgtgtagctcatggttggctgggacgaccaggctttttaccgcacattgagtccgatacgactgattacataattaacccagtagacgtccgactcgagaaagaatccattgtgatggagggcgggcagctaacggcattggttccggtcgagggctcctttgtcatagaaccagagcgtgaattagtagagaaagctgccccctggcggcttcgagtgcagttgattcgtaatgcattgccccatctcggcttgggttcgagtgctcgatataagttggagcagctgaacgactggtcgcgagtctcaccttcctccgtcgttttcgaagggcaggatcctttagtttgggaagagatcgtctccgaaagcgaagacttgcttgaggcgatctacgccgacggtgctagtggatgggaagaggcagcgcttgtcactcttctacgaggtgtcgatacaagcacatgggacttacttcgctgtcttcaggacgcaggcattatcgagcctaggctgcgaaacggttggaaaggccgtgcctggactcttgtagcgcctcggctggtcggagtaacgaggggtaatcagaacatcgctgtcatcgagggggcagtctgcgcatcacttatcgacgagttccggtctgtggtcgctaggttgggtggccagtgctttaggcggaccggtgtaagcccttggtctcctccagtaatcggggcgagcgttgcatccgttgaggccctggcagaaaaattggattggccgttggcacttcaaccgatgatgcctgacgcagagccactggcattcgtcgagactcatcgcatgtcagacttacatgaggtcgcctctgcatgggattggaatgagagacgattcaaggaaagtgcctcccgcgaagagccatttaagctgactcgtttctctcatcccggcgggcgagatcacgacctctactgcctgacgagtcgcagtcgcctgatgaattatctgtcacgtacggctgcaattgctgctgcgcacgcctcttcgcacacccccctgtttgagcagcgtgacgacaatctactagtacgcctcacttgcgacggggggcttcccgacgcggtcgcggccggcctcagacgacgactgctccgcacagcgggtcccgtgggaaatgaatatttttatccgattactcagcaagctcttagttggcttagctcactgttgccaggctgtctagcagggccggatttgattgatgagcgtccccctacccgtcttgtggctgaggcacgtaggtcaagggggcagcaacgattgcactggcgcaaggggcgcctgacgctgccgcgtcacacgtaa

SEQ ID NO: 28063 - DNA, 2142 bp, Pseudomonas aeruginosa MH27
ttggtgatggcttcaactaccccatggtacgccgggacttgtgaaagacggaatgacatgaccgtccagctcaaggtggtagcagttaaaactaagttgggctggagcttggttgagaacccacacaagttgttccgcaaatcgggagaagtcgagatgcgcggggcagatgtcgcatcactccgatttggggaatgggtgaaatttcaggtagggccaagcgagcgcaaggatcaatggagagctactcggcaccatcgcctatacgcctattacgatttgtcatctgctcaatctgttgaagaagcacgccaaactcttacgtttaacggggtagcgacgcatcggccgccagggatatggatgatccgcatcaatggagatcaggtcgtccagatcgagtttacccggtcgggagacgatctcctattagcatctcacatcactacactaccggcgtatgagtttgatcaggactcggtgatatcaatgccgaccgggtcttctgagcacctgttctatgatcttggttctgacgccaagccctgctacacctacgactggacacctgaaagtggatacattgaacgtgtcatccgtcgcctcgcaggtttccaatcaccacagttggcagagattatttcctggcttcagcagcacgctgatgagcgcactggccgaattaccgttaaccctgatgacgtgcttgccgcccatgaggcgcttcgttcaggtgagctagccaaacgcctaaacgccgaacagacgcttttacgttcattggtggacgcgctgacaggtgatgcccgcatggcaggtctccttgagcgtgaacgcaatgctctaatcgagcaggaacgcaacaccatacataccaatctcgagatgcagttggctgtggaaatggagttgcagcgtgatcttcgcacttctcagctcgaagtccagctaaaagagcatgaagcggccagtcgtgctcaaataaaagaacagctggatcatgatcggcaggaagcggagtccgccatagcggcgtatcaagccgcacaaaaagtcgagatcgataaagttatctgctctcggctagccgcgctggagcaagaaaaggcggagcttacggagtattgcgccaacctatcgcaatctagggacgagctcatcttgacgctacatgaactcgagataaaagccgaagatttaaacgccttggtcggagatctgagtgcagctgttacaattctgaaagaacaaagagagcatggtacagctgaagtcgaacgcctaaaagaaattagccgagtagcatcagaggggcgcggttatgctccggtgactgtcgtcccattttaccgtcccaaacactcgacggcctggtgttgctctgaagctggagaggtattaaagaactgtgcgttgctgacaagtaacgggaaaaatttgatggagcagtttatcgcgctatctctggccggtgagataccgctgctagtaggtcccgatgttgcagactttttgttggtcgctgagtcactagtagcctcaggacggtcagcgcgcttggaagcagatccgacaatcctgacatttgaagatttgtgggtgcgagcaggaacggggttgccaacatctttggctcaaggattaacactagccagcagccaggagccatgctccgttttgggggtaatcgatcgagctgagcgctctgccgcgaggttctggctgcctgcgttgacggaccgagcccgtcgtggagacctccccagacggctcttgctatgtgccactgttgaagacgatagctgcgaagaggctgaagctctgcggggcagccagatttggctgccagtcaaggaagccatcgctaaggatgcagccactgttgccccactgtggctctctccgagccagtatcgagaattagatcccggcgattgcccggttgaaagcatcgagggtggcctcaatgttgcccaaaagctcgcaaaccgccttgggctcgttaacacgctaagagcggttcgatcagcagcagaggtagctactttctataaggggaaggaagctatagatgctattgcgcgaatgaatacattgtttcttaattccgtaggttcggagcaacctgcggtagcatattaa

SEQ ID NO: 28064 - DNA, 5841 bp, Pseudomonas aeruginosa NCGM2.S1
atgctggaccctattggaagtttttatcgcattcgggatttttttatttcatatgttgaaaccagctttcgaatttccgaccctctagcttctgaagcacggcgtgccctgctcaagaccagcggcatcctggccacagctccatttattgagccagtgcttcgctacgaatcttcggataaaaatcttgaggacctaattgaggaggcagatggcgtcctcaagccactgtcgctaaagggccgcaaggccttcgttgaactggctctgtctggtctgtttgatgggagctctgatgacggccctttactccggaagtcccaatacgcgccataccggcatcaggtctcgatgcttgaacgaggcattcgacctggccgccccggtattgtaacttccggcaccggctcaggaaaaacagagagttttatgcttccgatactggctgctctttctaatgaagcagtcgagtggcaaaaaccggaatccaaatatttgcaagaacactggtggaaaactccgaagtcccaatgggccccccggagagctggcgagaaacggccgagtgccgttagagcactcgtactctatcctatgaatgctcttgttgaagaccagatggttcgcttgcgcaagactctcgactcacaagatgcacatgaagtaatggatgctcgattcgctgggaatcgtcttttcttcggacaatatacgagcgctacccctgtaacaggctacgagcaacatcctcgcctcgcaggtgacaagcaggaagcgaagcgtcgagctcgacgcatctctagattgcgtaaggcgatgcaggatttcttctgcaaccagagcgcagcccgcaaatttgatgaaaattctgagcgtcagcaaggacgtattcgagagaccacgcgctacatcttcccatcgatagatgggggcgaaatggtttcgcgatgggatatgcaggcttcgccgccagacatactagttaccaacgcatccatgctgggagctatgctgtcgagagaaattgaagatgcgattttcgacaaaacccgtgaatggctcttatcagacaaagactcctatttctacctcgtcttcgacgagcttcatttagttcgcggctccgccggcactgagattgcctgcctaattaagtccctgattcagcggcttggccttgatcaaccggagcacgcgtacaaactacgtctacttgcatcttcggcctctcttcctttggaaggcgccgaaggtgttcagtcaaggacatacttacgtgatcttttcgcaccattcggcacaagcatcagcgaagacgatccaggttctaccgatccaagattttggaatgagtgcataatccagggtgtgccgcatatccctcccgcgagagcgggtggcattccttctgaaccattcgctcaattgatgatggctgcacttgaggggaaagatggatttgtcggcatactggatcggactcccgcattagaggctgctatatctaaggcagctgcagcgctgggtgttgtagcaacggcgcaagcctcgcttgagaagttgctagccgaagcggcagccggactactaacacatgcttgtaaaaacgatgacactatccgggctactacacccgaatcgattgctgctagggtatttgccccgggcagcgacgacactgagttggctctccgcggactgatgctggcccgagcgcttccagaggctaacgattcgcgggctagagttgcaggtgcaacgccagccttccgtgtccataccttcattcggaatatagaaggcctatttgcttccgtcaccccacgtcagcatagcgtgacctttagcgatttctctgtagaacggggaacttcgcattcatcccccgcaacgggtcaagcgcgaggccgccggctttttgagcttttatattgtgaagcatgtggggatttgtttgtcggtggccagcgaggccagagtagcggttcaactaatgctactgagctactgccgtcggcagcgaatctggagcacttacctgagcgcccaggagcagaatattacgatgacatgactttagatgagttcgcagttttctggccgcgacgtggtgactggatcggatcagataagggctatgatcaatggatgcccgcccatctcagtccggatacaggtgtagtggaactgggcgagactgcgaaggaaggaaatatagcaggttatctttattatcagacagaaacggcgattagcaaaggaaagaataagcctgttcagcaaccctctgcgcaaccgttttgctgcccaaaatgtggcaccgattactcaaaccggcctgatacaaatcgttcacgctcaccgatccgcgcatttcgtactggcgtgactaaatcttcgcagctagtggcaacggagcttttcgaactgctacatgctataggggccgagcctaaaggaattgtcttttctgatagtcgccaggatgcggctgggcaagctatggagattgagcggctgcatttgcgtgatctgcgtcgtgaaattctagttacaaccgcgagatcctacataaaagaagcatcgatagaagctctcagctcagctgaaataatcgagcttctgggtaaagctcatgctgcgagagataacaacgagatccgcaggttgtccggcctcttaactaaacagaccgaaaatgatgcatctagaactcaaaaggtaaagctggacagacttctagagttaagccaggatggttctattggtagaataacagccgagctagtgcggctaggtatatcgccctataagagcagctcatctagcatcaaagagctcccctggcatcaggagttcgagaaatctggagaagttatttcctacgacaatgcgctgtccctacctcaaatatctgaaataaatctagacatcattgatagtcaatatgaactagtcgacgatgtgattttcgccaatacattcttcgctctcgaggaaactggtctcgcctacccttgcctttcgagtgatgaagaaaatcaagcgttggatgcatggcttcgtatttttgcaagcgcctatcgtgttaaggaaaataagtattttgataagaacaaggtaaagctttggcaaagagggggcgacatcagcaatagtcgaatcaagaaaatcgcccaggcattgtacggtaactcactgtatattgatgaactaacgacggtcttatataaatttgaccgctctggacatcgcggcggcttattcaatattggaaagctattcctgaaagttactaagccgggtgatttattttggcgctgcaccaactgcgaacgtgttcacttgcatgaagggctagggatatgcactcgctgcgctacgccgctgccagagccaagtggaaaggttgaggagctctggtctaccaatttcctaggaaagcgaatcattcgcagcgagcgcgatggtgtggggcgcttccgcttgcgcgtggaagaactaacaggtcaaacagatgacttctctgatcgactcagaaagttcaagggtattttcgttgatgaagttagcgaattagagaggctagcttcagagatagacatgctgtctgtcacgacaacgatggaggttgggatcgatatcggcgctttacagactgtgtatcaagcgaacatgccacctcaacgattcaactatcaacagcgggtggggcgcgctggtcgtcgtgggcaagccttttcgttcgtcgtaactttctgtcgcgggcggagccacgatgcatattacttcgcacatccgcacgcgatcactggcgacccgccacctcctcccttccttgcgcccgctcacgacgccattcctatgcgtctccttcgcaagacttggctgcgagccgcttttaagcagctaagggatcagtgcgccgaacgaggtgagatatttcctggtgatctacttactcctccagatgtgcacggagaatatgtcactaccagagactattaccacaaccaagacatcgactggtctgctcgtttgcatgcggcactggcgcagacccaggcagtgcgagagcagttcatcaacgctgtaacctttgatcaagaacagcgtcaacgactgagggataagttaagcgtcgatctattaattagtgagattaatgaccaacgccctaacgctccatccgatgagatgggactcgctcgatttttagctgagcgaggtttgctgccaatgtacggtatgcctacccgcgttcgtaatctttacgtaggtcttcgcgaaagcaacagccatggcgggggcgcagagtacgaatggtcaacaatggatcgcgatcttgatttggctgtgtttgagtacgcgcctggggcggttcttgttaaagataagaagaaacatagagttgtcggatttacgggaaatctgactgacccacaaatacaggggcgagctatcgaagggatacgttcggtcaccgattggtgtgaatcaaaaacctacgtagccatttgccctacatgtggttcggcttgtcaaagcattgaagtacctggcgaggctttgaaatgcagtgactgccgagcactaatcccgaaggaatgcttcctgctctacgtgacacccgctgctttccgtactgattttgtgcccaaagacgagctcgatgagtttgaacgcatgtctttgcgtaccgttgcgaccgtgttgcgcgaaggcgaagacttggactgcggagccctaaaagttcgaagcggcgcaggcgtaaccatccttcagcttaacgatgggccgaccgatggaaagagtgatggacgccagtttactgttgatcttgttctggaccagagggtgccagtgcctttctcacctcaacgaccaccaattgatggcattcaagcaatcgagtcaggctggcgtcgttcaaataatacacaacgctggggcgcatctcagggggagcaatgtttcggcttgatctcgaaaaaggaaacggactctattcatctcgagctaacaagctttgacgagcgtctaactctaaatatggtggcccgcaaaggtgaattcatgcatttacctacccgagctgcagccatcagcgccactcaaattttggttaacaaagctgcactggccttagacgtttctccagatgaattcgaggctctcgagcctagactccgctcaggaagtccgatgttacaaatagctgatgccctaattaatgggtctggcctttgccgtcggctgggggaaccgggtgccgattcgcgcacacctcttatcgtagacttgctgcgtgagactctcacgaacaccaatgtatggcctcttcaggacttccttgggaccggcgccgatggagtgcacacagctcaatgccagacatcctgctaccgatgcatccagcgatacgggaaccggagatatcacggcttgctcgactggcgcttgggtatggcctatttgcgcgcactggtaactccgaattacgcctgcggtctcatccctggcgatgaaaggtatcctgagattcaaggctggaaggagcgggcctgccagcttgcggaaaacgtcgaagcaatgcgcaaaggcacagttcgctatgaatatctgcgacattctggcctgccctgtctcagcgagcagaaggacggggctgaactgtggcgcgccgttgtaattcaccctttgtggcggcacacggaagtcggggcaatgcgtgacctgttaggcccggattggtcatcgtcgttaagatatctagatacctttgagctagaacgacgaccactgcgccgcctggcagccttaaagcaagaggaatcttaa

SEQ ID NO: 28065 - DNA, 2553 bp, Pseudomonas aeruginosa NCGM2.S1; identical to SEQ ID NO: 27910

SEQ ID NO: 28066 - DNA, 2136 bp, Pseudomonas aeruginosa NCGM2.S1; identical to SEQ ID NO: 27911

SEQ ID NO: 28067 - DNA, 5841 bp, Pseudomonas aeruginosa U2504; identical to SEQ ID NO: 27909

SEQ ID NO: 28068 - DNA, 1140 bp, Pseudomonas aeruginosa U2504; identical to SEQ ID NO: 28026

SEQ ID NO: 28069 - DNA, 2553 bp, Pseudomonas aeruginosa U2504; identical to SEQ ID NO: 27910

SEQ ID NO: 28070 - DNA, 2136 bp, Pseudomonas aeruginosa U2504; identical to SEQ ID NO: 27911

SEQ ID NO: 28071 - DNA, 5841 bp, Pseudomonas aeruginosa WS394; identical to SEQ ID NO: 27909

SEQ ID NO: 28072 - DNA, 1140 bp, Pseudomonas aeruginosa WS394; identical to SEQ ID NO: 28026

SEQ ID NO: 28073 - DNA, 2553 bp, Pseudomonas aeruginosa WS394; identical to SEQ ID NO: 27910

SEQ ID NO: 28074 - DNA, 2136 bp, Pseudomonas aeruginosa WS394; identical to SEQ ID NO: 27911

SEQ ID NO: 28075 - DNA, 5847 bp, Pseudomonas protegens Pf-5
atggtgctggatcctatcggtggctttcaccgcattcaagatttcttcatctcgtacgtcgagactagctttcgtatctccaaccccaccgctgccgaggcgcggcgagctctgctgaagacctgcggcatcctggctacggaaccctttatcgagcccgtgctgcgctacgaatcttcggataaaaaccttgaggatcttatcgaggaggaggacggtacgctccagcctctttcgctcgagggccgaaaggcgttcgttgaactggccctgtccggtctgttcgatggcgagccgagcaaggggcttttgcgccgaaaatctgcctatgcaccctaccgtcaccagatatcgatgctggagcggggtgtgcgcgctggctgtcccggcatcgtcacctcaggtactggttccggcaaaaccgagagtttcatgctgccggtgcttgccgcccttgcgaacgaagctgtcgactggccaaagccgggcgtcaactacttgcaggagcactggtggcagacgcccaagtctaggtggtctcctcgccgagctggagaaaaacggccggctgctgttagagctctagtgctctaccctatgaacgcactggttgaggatcagatggtgcgcttgcgcaagaccctcgacgcggaggaagcgcacgcagtaatggatgagcgcttcaccggaaaccgtctcttcttcggccagtatacgagcgcgacacctgtaaccggttacgaacagcatccgcgcctcgcaggtgacaagcaggaagtaaaacgccgcgctcgccgtattgcccgactgcgtaaagcgatgcagaatttccagcgtgaccaggatgcagcgcgtaggttcgatgctgacgtgcagtcagatggcaaagccagcgtcgaaaagacacgctacatattcccgtcggtcgacggaggcgaaatggtatcgcgatgggacatgcatgccgcaccgccggatatcctggttaccaacgcctctatgctaggcgccatgttgtcgcgcgagatcgaagatgcgattttcgagaagacgcgtgagtggctgatgtcggatgaagatgcgtacttctatctcatcttcgacgagcttcacttaatccgcggctcggcaggtaccgagatcgcattgctaattaaatcgctgatccaacgcctcgggctggaccagcccgaacactgctacaagctgcgtctgcttgcatcctccgcatccctgcccatggaaggagtcgaaggagtgcagtcacggacttatctgcgtgacctctttgctccgttcggcacaagcagcaggccgaacgacttgggctctattgacccaagcttctggagcaaatgcataatccagggcgttgtacatatcccgcccgtgcaacagtgcggtatccccgccgagcctttcgttcaactgatgaaggcggcacttgaggggaaagacaattttgtcggtcaactcgacaggactcctgcgctggacgctgcgattgtccaagcagctaaggtattaggcataacagagacggaacaaaccacactggtgaagcagctcgccgaaacggcagccagtctgctgacgcacgcctgcaaaaacgacgggaccatccgagccactacgcccaggtcgatcgccgcccggatctttgcaccagcgaccggcgacactgagctagctcttcgtgggctgctgctggctcgatcgcttccggagtccaaccagtcagcggtgaaagtagccgtcgcaacgcccgcttttcgagtgcacacgttcatccgaaacattgaaggcctgttcgcctccgtcgccccaggagagccagatgtggctttcgacaacttctcagtggagcgcggcacctcccactccgcccccgtggaaggacaaaggcgtggccaccggctcttcgagcttctgtactgtgaggcatgcggtgatcttttcgttggtggccagcgaggtcaaagcagcggctcgatgaatgcaacagaattgctcccatccgcagcgaatctagagcatctaccggaacgtcccggagctgaatattacgatgacatgacgttggacgagttcgcggttttctggccgcggcgcggtgattggatcgggtcggataagggatacgatcaatgggaaccggcgcatctgaatcccgatacgggtatcgtagagatcggcgagatcgcgaaggaaggcaatatcgcggggtatctctactaccagacaaaggcggccgttagtaaagataaagagaggtccactcagcagccctctgcgcagcctttctgctgtcctaagtgcggcaccgattactcaaaccgaccggacactaatcgttcacgctcgccgatccgcgcatttcgcaccggcgtgacgaagtcttcgcaattggtggcgacagaactcttcgaactgctgcacgctatcggtgctgaacctaagggcatcgtcttctcggacagtcgccaggatgcggccgcgcaggccatggagatcgaacggttacatctgcgtgatctacgtcgcgaagtgctcgttacggcagcacgttcctatgtgaaggatgcttcgatagaagtcctgacgtcaaaagagattattgagcggttaataaaagccgagaccgcaggagataaagacgaagtcattagactatctgagctcctaaagaaacaaacggttgcttgtgggcctaaaactcgtaaggtcaagctcgataaactcctggagttcggcaatgatggctccatcggtcgaataacggcggagttggtgcgcctaggtatttccccttacaaacattcctcctccaatgatgccaaggagctgccctggtatagggagttcgagaaaaatggcgacctcattgcctatgaccatacgctgtcgtatacacaaacagtcggactcaacaaggatattgtcgaaggccaatacgaactgattgatgacgtcattttcgccaacaccttttttgccttagaagaaaccggtctcgcctacccttgcttgccgatggatgaggatgaccaagctctggatgcttggctgcgtgtttttgcaagcgcctatagggtgaaggacaacagatacttcgacaagaacaaggtcaaactatggcagaaggggcctgacgttaccaacggacgaatcaagaaagttgcccgagcactgtatggggaaacccggtacggcgatgagttgaccagagttttaggagaattcgagcgtttggggcatcgaggtggtctgttcaacattggcaaacttgccctcaaagttaccgagccgggtgatgatttctggcgctgcagtaactgcgaacgcgtccatctgcatcggggacttggggtctgtactcgctgcgtagccccattacatgaacccagcggcaaagttgaggcactctgggagaccaacttcctcggcagacgcattgtccgtggcgagcgagatggtgttggacgcttccgcttgcgtgtggaggaattgacaggtcagacggatgacttctccgaccgactgcgcaagttcaagggcatatttgtcgatgacgtgagtgaactagagaagcttgcgtcagagatcgacatgctgtctgtgacgacaaccatggaggtaggcatcgatatcggtgcactgcagaccgtctaccaagcgaacatgccgccacagcgtttcaattatcaacagcgtgtgggccgcgcgggtcgccgtgggcaagcattttccttcgtcgtaactttctgccgcggccgtagccacgacgcatactactttgcacatccgcaagccattaccggcgaccctcctccaccgcctttccttgcgaccgggcacgacgccattcccatgcgcctacttcgcaagacttggctgcgggctgccttcaagcagcttcgcgaacagtgcgccaaattgggtgaatcattccccggcgatctgctcattccaccggacgtgcatggtgagtacgtcacaacaaaggactattaccatagtcaagagatcgactggccaatccgtttaagtgaagcactgaagcagacgcaatcagtgcgtgaccgcttcatcgaaacagcaacattcgaccaagagcagcgtcaacgtttatacgctaagtcgagcattgatctattgttgaaggaaatcaacgatcagcgtccccatgcacctgacgacgaagtagggctcgcgcggttcctcgctgaacgggggctgctcccgatgtacggtatgcccacacgtgttcgtaatctctatgtggggcttcgtgaaagcaaaacgcaaagcgatcactccgaatacgaatggtcgatgatggaccgcgaccttgacctagcagtgtttgagtacgcacctggtgcagtcctggtcaaggataagaagaaacatcgggtaattggcttcactgggaatcttactgatccgcaagcacagggacggagtattgaaggaatacgctcggtcaccgactggtctgaatcgcaaacctatgtagcaatttgtccagcgtgtgggtcggccagtcaaagtaagcaagctcctgaagggcctttagcctgcaacgactgccaagcgccgattccgaaggaatccttccttcactacgtaacacccgctgcctttcgcaccgacttcttgccaaaggatgaactcgacgagtttgaacggatgtccttacgcacagtggcgacggtgttgcgtgagggtgattgttttaactatagggcactgacagtccgcagcggcgccggcgtgaccatcctacaactcaacgacggcccgaccgatggcaagaatgatgggcagcgattcactgttgatcttgtgcaggatcagagggtgccagtgcctttctcgactcagaggccggcgattgatggcattcaggccatcgagtcaagttggcggcgatcgcatatcagcccgcgctggagccagccactgagtgaacaacggtttggattgatctcacaaaaagaaactgactctattcatctggaactaacacgcttcgataaacgcctcaccctcgacatggtgtcccgaaaaggagacttcatgcatttgccgacgcgcgcagcagccatcagcgccactcagattctggtaaacaaagctgcactagcgctggacgtctcccccgatgagtttgaagcgctggagccacgtctccgttcgggacacccgatgctgcaaatagctgatgcgctcatcaacggctcgggtctttcccgacgactgggcgagccggcctccgatgggcccacgccgctgctcgttgatttgctgcatgagattctggagaaaccaaatgtttggccgctccaagactttctcagaaccggtgctgaaggcccacacgcggctcagtgccagacttcctgctatcgttgcattcagcgctatggcaatcggagatatcacggtctgctggactggcgacttgggttggcctacctacgcaccctagtcacgccagcgtatgcctgtgggctcacgcctggcgatgataaatatccggagattcagggatggagggaacgggccagccagctggcggatgatgttgaggctatgcgtaaaggtacaattcgcaccgagcgcttaccgcattctgacctgccctgcctcattgagcagaaggatggtgtcgagctatggcgcgccgttgtcattcaccccttgtggcgacattctgagcccggcgtaatgcgtgacctcctgggagcggactggtcaccttctttacgctacctagatacgttcgaactggagcgacgcccgttgcgacgcttagcagctctcaagcaagagggttcataa

SEQ ID NO: 28076 - DNA, 1185 bp, Pseudomonas protegens Pf-5
atgagtgaagaccttaggtttttcgaattcttcgcgggcggggggatggcccgagctggactaggcaatcaatggcaatgtttgttcgccaatgacatggatcgcattaaagcctcaacgtatattcagaactggggtaaggatcattttgatagtcgtgacattcgagaagtaaattcagaagaccttgagcgcaatggtgatttagcgtgggcttcgtttccatgccaagacttgtctgtggccgggaatggtttaggaataggtagctccagcgctaaggactttacaaggtcaggagcgctttggccttttcttgatctaatagacacgttgcgccaagaggagcggcaaccaccgctgttagttctggaaaatgtggtcggactgctcactctagagggcggccgtgattttgctgcgatttgcgagagactcggtgaaattgggtatcgttatggggcagtcattatagacgccaaacacttccttccccagtcccggccgcgtgtattcatcatagcggttcaacgcaatatcgatatcccatgcaagttatcccgcggcatggcgacagctaattggcacactccaactttgctgcgtgcgtacaaatcacttaccccgattttacatgcggattgggtttggtgggaactaggggatgctccgatattacaagagaatgcccttgaaagctttattcagcgcgaaggggtactctggaatacgcctgaagaaaccaaacgaattatcagtatgatggctcctgcccatctcgctcgacttgagaatgccaagtgcgcagggggggtcgccgttggcagcctttatctgcgcatgcgtcgagagggaggcatcaacaagcaacgtgcagagataactttttcgcctctcttaggctgtctaagaacgccgcgtgggggcgcatcccgccctagaatcattgtcgtagagagcggccacgtcagaactcgcttgcttacaatatgtgaagccgcgagattaatgggtctagcaaacacttacatcctacctgaaatctatcatcatgcgtttaaggtaataggggatggtgttgcggttcccgccgtgcgtttccttgctgagcgtctactcgagccacttgcaatcgctgctcggggacaaattgctattccccatgaaaaggcgttcatggcatga

SEQ ID NO: 28077 - DNA, 2556 bp, Pseudomonas protegens Pf-5
atgacctggagtccgccaagaacttttgaagaatgggaacaaaggctagttcagcattttctgactgtaggtcaggatggtgacgccagcgatatacgctcgtttgaggtgacagcgactacgcttgcccaagcatgcggggcagaaagtgatcaagagtcaatagtcgagggtaccttccgagacattatgagtcggataccaaacctgccacatcgcctgaatattggcatgcaaagatcgtcgacccgcgaatggccaaattttttcatttacttggtcatgaccctgcttatcgacagccagctggaggggcatgaagacggtaatgaatttcgcagcaagctgcgcaaatggcttaacacaggccatagcctccagcagttacctggtatcaatctgatgtgggaggaactggcgcactggcttgaacggcgtatcaatgaaggccgtccatttcgacgactgatcctgccgacaatccctaaaaactggcgtcatatcggctatacccggcgcttaacctttccgaataaaactgacctgcgcttgatggaaggctttctcgccgactgcccccaggcccaaactgatccgaatcttgtggtcaggaaattcccggtcgtgttgctcaatgagcgagcctccgatgcacttaaattggcgttcagagagttccgcgaagcctacctgctgggtcgacgtaccctggccgatctgcctttctggcgcctgctccgccgcgccctcgcccactcggggaagtctgcacggcgtagtgtagtggtagacatgatgttcgacgctgacggcagccgcagctatttttcctgcccagagcaggcactccaggctgaatttcaccctaccctcttcatggcactgagcggcgtttcagcgcaagtaagcctgaatttgggggtcgcgatccaatccggcttcttgttctttcggcaagtcggtgtgggtcgctggcgcgcggaagcccgaccttgcaatgcgccacaaggcctgcatgttgcgctcgcgcgacggcatgcacagcgcctaggcaatcgactgggcagtttggtgagcgaaagcgaatggcttctaacgagtgctgcacacagctaccacgccgtttacgaaacccttgggcccatgggattgatttctcaaccctccgagcagattgtacggccactcctgtcgagcggtgtgcgtgtgcctcacggatggctagggcgaccaggctttttgccgtttatcgaatcggatgcggtcgactacctcattagaccagccgacgccagcgaggaggaagcgcccatcacgatggaaggtggacagttggtggctctctccccggtcgagggctcctttgttatagaaccggtgcgagaactcggagaaaaatccgcgccctggaggcttcgggtgcagctctttcaggacgcgctgccccacccggacctgggctcgagtgcacgatatcgacttgagcggctttctgattggtcgcgtgtgtctcctgccctggtaattttcgacgagcaagacgttttggaatgggaaacaggtcccgtcgattgcgagcatctgctcgaagtgatctacgccagcggggtaagcggatgggaggaagcggaacttgtcacgcttctacatcgcctcaatgctagttcatggaccctgcttcgctgcttccaggacgccggcatcatcgagccgcgccagcgcagcggctggaaaggacgcgcctggacgctggctgaaccccggttagtccgcatcgcccggccaggacatgaggatcttgtcgtgatcgaaggggcggtgtgtgcccgacttgttgaggactttcagacggcggtcatagggctaggtggcaagtgtttcaggcgactcggcgtgagcccctggtctcctcctgtgattggggcgagcgttgcatcgctcgaggctctggcaaaaataatggattggccgctcgtacttaacccgctgatgcctgacgcggtgccattggcatttgccgggaccgagcgtatgcctgacctgcacgaagtcgcttcgacgtgggactggagcaccggatgtttcaaggatattgcgactcgcgaggaaacagtcacgttgacacgtcgcgttcaccccggagggcgtgaccatgacctgtattgtctgaccagtcgcaggggcacaacgaattggttgtcacgcactgcggctattaccgctgcgcacgccctgacgcgcacctctctgttcgagcaacgtgacggccagctgctggtgcgcctcgctcgcgacggaggccttcccgacgcactggccgccgggctcagacgtcgactgctccgaacaggcgggcctatgggggctgaatacgtctatccggtcaccccggatatcctaaagtggttgggttcactgctacctggatgcctggccgagctggccttgcctgacgaacaatcccctggccgtctcgtcgctgaggcgcgcagatctagggggcaacaacgattgcattggtgcaatgggcaactgactctaccgcgtcacacctaa

SEQ ID NO: 28078 - DNA, 2139 bp, Pseudomonas protegens Pf-5
atggcagcaatcaccccttggtacgccggaacgtgcgagagacggaacgatatgatcgtccacctcaaggtagtgacggtcaagacagagtcgggctggaccctggtggataatccgcacaagttgttccgcaaatcgggcgaagtcgagatgcgcggcgtggatgccgcatcgcttcgatttggggaatgggtcaagtttcaggtggggcctagcgaacgcaaggatcaatggagggccacgcgacatcatcgcctatacgcgtattacgacctgtctcaagctaagtccattgaggaagcgcggcgcattctgactctcgagggattagccgcacacaggccggcaggtacttggatggttcgtatccatgacgcccaggtcatccaagtcgaacttgcccgctctggcgatgacaccctactaggcgcccacatcactacactgccagcgtacgactatgatccggactcggttttatcaatgccgacgggagcatccgatcatgtgttttatgacctgagcgccgatgttaagccttgccacatctatgactggacacctgagaagggctacatcgagcgtgtcgtccgccgtctcatcggtgcgcaagcgccgcaaatgacgcagattgtttcctggcttcagcagcataccgatgagcacacaggccgcgttacggccaaccctggcgacgcactggccgcccacgaggctctgcgctctggcgagttggccagacgcctcgctgccgagcagacgctgcttcgcgccttcgcggacgggctggtaagcgatgcccgaatagcaaacctcctcgagcgcgagcgcaaagcgctcattgaggaagagcgcggcaccatccgccagcagatccagacacaattggcccaggaaacggagctgcagcgcagacttcgcgcttcagaactcgacgcgaagctaaaggagtatgaagccagccaccgtgccgagctgatgaagcacttggagcacgagcgacaggaaacggaaaatgctctgattacgtaccaggcagcacagaaagccgagatcgacaaagtcctcggtgcgcaacgggctgtggtggagcaagaaaaggcagagcttgaggaggtctgtgccgatctatcgcagcatcgagacggccttgtctcagcactgcagacactggaggcgcaagcccagaacctaaatgcatcggtcgcagacttgaaagctgatgttgcgatcttggaggagcgaaaagagcaggagacagctgagctagaacgcctgaaggcaactacgacagtggtttttgacaagcgatcgcccgcgtcgacggccgtcataccttttcaccgcccgaacactgcccaggtatggttttgctctgaagctggccagatcattaaggattgtgcgttgcttaccggcgcgggcaaaaagctgatggagcagtttatggcgctagttttagcaggcgagacgccattgcttgtcggttccgatgtagaagattttttgttgatcgcagagtccctaatggcgtctgggcggtcagctcggttggaggcggacccgacgatcctgacctttgaggacttgtgggttcgagcgggaacggggctacctactccgctcgcccaagggttagcactggcgagcagcgagaatccctgctccgttctggcaatcattgagcgagttgaacggtctggagcgcgattctggctgccagcgctgacggatcgggcccgtcgtggtgacctgccccggcgttttttgctttgtgcgaccgttgacgacgctgactgtgaagaagcagaggcgctgcgggtacggcagatttggctgcaagtcgacggggccgtagccagagataccgcaacagttgccccgctgtggttatcctctggctaccgccgtgaactggacccgggcgatcacccgcctgaggacatcgagagtggactgggcgtcgcccacaaattggccaatcgcctagggctagtcaataccctgcgggcagtgcgagcggcggcggaagtagcggccttccataggggcaaggacgccatagatgccatggtgcgaatgaatacactgtttcttaattccgtaggctcggaactacctgcggtggcgtctgactaa

SEQ ID NO: 28079 - DNA, 5838 bp, Pseudomonas syringae BRIP34876
atgctggatccaatcggtggtttcaaccgcatcaaggatttcttcatatcgtatgtcgaaaccaactttcgtatcgcggataggcaaattgcggcggagcgccgtcgtctcctcgaaacaactaacgtattcgctaccgcatcattcgtggaaccagtactacgttatcgagcgcatgagctgcgcatcgatcagatggttggggtcataaacggcccgctcgcgaagcttccatatgatgttcaagtggcattcgccgaacttgtgctttcgggtttgttcgaaggagatgatgccgcaggcaaactgatgcgcgtcggccgttacacaccttataaacatcaggtcgagatgcttcagcggggtattcagccggggcatcccggtattgtcacgtctggaacaggttcaggtaaaacagaaagcttcatgctgccaattatagccgcgctgtcacgtgaggctattagctggtcgaagccggatatcggatatctcgaaacgccttggtgggcatcaccgaaggggaagtggaacccgcagcgcgaaggagagaaccgcacagcagcagtgcgcgctcttattctgtatcccatgaatgctctcgtcgaggaccaaatggttcgtctccggcgtacgctggactcggacgaggcaagagcggtaatggatcgtcgtttcggagggaatagggtgttctttgggcaatacacctcatccacgcctgtgaccggatacgagtatcaccctcgtacctcggatagtgaggttgagaagaagcggaggcagcgacgccaacgccagctccgttcggcaatgaagaaggccaaccaagatcagattgacgcgcgtaatcatgatatggaagagcagaggagagcggtggaaaggggaacgtctccccctgaacgaacccgctttattttcccgtccctcgatggcggtgaaatgctttcacgttgggatatgcaagcgacccccccagacgttcttgttaccaacgcatcgatgctcggcgcgatgctatcacgcgaggttgagggaccaatcttcgagaagacacgaacatggctccgtgacaatgatgatgcgtatttctatctcgtcttcgacgaactccacctgattcgaggctctgccggaaccgaagtggccttcctaatcaagtcacttattcaacgactggggctggatgatcccgctcatcgttataagctacgtgtcctagcctcatcggcatcgttgccgatggatggcgagtctggcattcaatctcgacggtatctacgtgatcttttcgcaccgtatggaacaagcgctagcgccggagagactggctcagaagacgaggagttttggaccgactgcattgttaaaggtgaagctgatattccctcttgggaagggggggagattgcacctgatccattcatcaatctgatggaggcttcatactctaacgatcgggacttcgtcgcaaagattgtgagaaccgatgccttagagcaagctatcgaagatgttgcccgcgcgctcaaggtcacagcatctagagatgctcgtatcgtcgggatcgctgaaaccgcggccgcggttctcacttccgcgtgtagggcgggtgagggagttcgggccaccagcattgccaagctcggcaagcagctgtttggtgacttggcgaatgctgacgtcgccgtgcaaggactgatgctcgcacgtgctttaccagaaagtggccaatgggaaggacgcgtttcccaggggacaccgtccttcagggttcacgcgtttgtacggaacgtagaagggttgtttggtgccccttctgctgcagcaggcaaatttacatttacagatcttagtgttgaacgtggtctctctcacggccagcccgccccgggcgaagttcgtggtcggaggctgtttgagatgctttactgcgaggcgtgtggtgatctgctgctgggtggtcaacgcggtaaacgcgtcggagccagtccgttgaccgagttgctaccctcgaccgctgagctcgaaaatttaccggagcgtaccgcttcggaatactacgatcgtatgtcgtttgagcagttcgccgtgttttggccgagtagacttaccccacagcaggacggccgcggctgggatgaatgggaagctgctcatctcgatccggaatccggcgtcgtctctctgggcgaggaagtacccagtgggcgaatcggcgggaggctctatcatcagtctacgactgcgtcgcagaacgggcatcgtaccgcccagccgttctgctgtccgagctgtggtaccgattactcaaatagaccttccagttcgcgttcgcggtcaccaattcgtgcattccggactggtgtcagtaagacatcgcaactggtggcgaccgagctattcgagctgcttcatgcggtgggggccgaagctaagagcattgtcttttcggatagtcgacaggacgcagctaatcagtctcttgagatcgagcgtctccatcttcgtgatctgcgtcgtgaaattttggtgactgtcgctcgagattatctccagcgcgcggtagcagccaaagttgatccgaaagtagctatggtcgctgcgaataagctgttggaagcgggtgacatggagggctttcaaaaggctatcgccgcgatcagcacacaggcaaacgacacgcaaatctccgttgagtcccgaaaagtgcaaatcagcaggctattcgactacaaggacgcaactggtggtgtcggtgcgttgatcgccgaatatgtgaatctcggcattcatccgttcgatgaagttggacgtaagccctacagagggcgaccgtggttccaggctttccagaagtcaggtgatttaatcagctatgcgtcttggctagacgacactcagcagaaggagctgggggtattcattgagcaagagctgatggagctcgtcgacgatgtcattttcgcgaacaccttctttgcgctagaagaaaccggactcgcctacccatcgatcagtcgcgaatctggccccgatattgatcgactagacgcctggctccgtgtcttcgcgagcgcaactcgtgttcaggagaacaagttctatgatcgcagccgaaccaccgagtgggatcaggcaagcaagattagaccttcaagccgtgtttggaagtttgccgatgctctaaatggagatacaaatgacgagctccagagtgttctcaaggcgtttggcaaccatggtcatgtaaacggcatcatccgtgtggggcgagtgtttcttcggatttccgagccaggtgatccgttttggcgctgtggctattgcgagcgcatccacctccatcgcggactgggcagttgcactcgttgctacaagccgctggcttctgagagaagcggcaaggtagagcagctctgggataccaatttcctcgggcggcgcatcgtccgtggccagaaagacggtgtcgcccgcttccgcctacgatgcgaagagctgactgggcagaccgatgatttctccgaccgtttgcgaaaattcaagaacatctttgttgacgatctcggcgaagtagcaaggctagcgcgggaaattgacatgctttcagtcactacgactatggaggtggggatagacattggatcactccagacggtctatcaggcgaacatgccgccgcaacgtttcaactatcagcagcgtgttggccgagccggccgtcgtgggcaggccttctctttcgttattaccttctgccgtggccgaagtcacgacgcttattattttgcccatcccgcagccatcaccggggattcacccccaccgccgttcttggcagcgggtcatgatcccattcctcgacgtctcctaacgaaggtctggcttcgtgccgcatttaaaaaagtgcgcgacgacttcgtcgatgaaagagggatatatcccggcgacctactcgttccgccggacgtccatggtgaatacgtgccaacagacgattattacgatgatcccgatggctgcaactggaaaaggcggctacaagaagcccttcgggcgactgttgcgcagcgtgacgcatatatcgacgcagcttgcattgatctagttcagcgagagcgcctccgagcagaatccacagacgagaagctaataacggaaattggtaagcaggaggaatttaagcctgtcaatcgagtaggactcgctcagtttttggccgaacggggactcctcccaatgtatggcatgcccacacgggtgcggcagctctatcttggagtgcgtgcggaaacggacgaaagcaaccccgattactcatggtcgactatggatcgggatctcgacactgccgtctttgagtttgcacccggtgcggtgttgacgaaggataagcaacgacatcaggtgattggcttcagtggtacgctttcagctccggaaagacgtgggaagaacgtattgcttgaaagcctatcctcttggatcgaatctgaacatcaggtagcgctctgctcggcttgtgggtccgctcggtatagccttagtcagccgcaatgtactctgcaatgtgaagattgcggcggtgatatagaacctaaagagttcgaagattacattaccccggctgcgttcagaaccgatttcaaagcagcagaaactgacctcgacactgttggtcgaatggcggtgcgtaccgtcgccacggtactccatttgggtgcgttttcagacgctggatcgcttcgagtgcgtcgcggtgccggtgtgacgattatgcaactcaacgatggggttgatgatgatattggtcagccaatcagattcaccgtgcgtgaggctgaggatggccatgtacgtattccaagagcttcatcgacaactcttgtggataatcaggcgatcatacttgatgagatttccagctctaacaaccgttggacagcgaagcctaacactgagcgtactttcggcctgattgccaagaaagagacagacgccctttatctcgaactccttaacttcgatcctaggctgaccctcgatcatgtcgctagaaaaggtaaattcagccacctacccactcgttctgccgcgattagcgcaacacagattctcgtgcagaaagctgcattggatcttgacgtttcctccgatgagtttgaagcactcgagccccggctgcgagaaggcaacccgatgctgcaaatcgctgatgccctaatcaacggttcaggacttagtcggcgtctcggtgaggatcgcagcgacggtatcccgcacatcgtacatctcatccgagagacgcttacggagaagacggcctggccactaattgaatttctaagcgctgatgagaatggtgatcacgcagcacggtgccagacgtcctgctaccgctgcatccagcgatacggaaaccggtcctatcacggactccttgattggcggctagggctttcctacctgcgtgcattggtgacaccgggatacaccgcgggactggacgcgggagatcagatgttcccagaaacaataggctggaatcagcgtgcactagcgctcgcggaagctgttgcgggaatgcgtccagactcgctatcggttgaagtgcatggcccttctaatctgccagcacttcgtgaaaaacatgacgggggcgacacctttctaattgttcatccgctttggcgtgttgatggcgattttggtaaaaggttgagtggagggggagaggttaagtttctcgatactttcaatctcgagcggcgaccattgcgagctatcgagctggcacagattggagaggcaccgaaaatcgaagcctga

SEQ ID NO: 28080 - DNA, 1200 bp, Pseudomonas syringae BRIP34876
atgattttgaattttgaaaagctgaaatattacgagttcttcgccggtgtcggtatggcgagggctgggctgggcggcgattgggagtgtttgttcgccaatgatagtaatcagcggaagaagcagtcgtatcttgacaattgggcaggagaaacattcgactctcgcgacgttgctgaagtccaaaccacagatcttgacggaatagccgacctcgcctgggcatccttcccttgccaagatctatcgcaagctggctcaaaagcaggtattggagaggccgatgacatctcggtgacgcgctctggagcagtgtggccgtttctgaggatcattcggggcttggctgaagaggggcggcctcctgctttgcttgcgttggagaacgtgaccggccttcttaacgcgaatagtggcagtgactttcgctcactctgtagcgcattgaacgaaattggctatagattcggcgcgatcgtagcggacgcatcgcatttcgttccccaatctcgcccacgggtttttatagtagcggttcgccgcgaaatcccgatacctgcgcgactgcagaccgagcttccacaacctacgtggcatcccaaaatcctgcttcgtgcccatgccggactttccgttacggatgtggcagcttgggtatggtggtcccccggtgctccgcctccaaaaaaacacttcgagctcgaggatatagtcgatctgagtgacgatgctgattggagtagcgacgaggcaacgcagcgtctcatcggcatgatgagtgagagtcaactcaatcggctctcagcagcccagagagtggctaggcccatgattggcagtctctatcttcggatgcggcccgatggggatagcggtaatgtccagcgagccgagatcgcttttggcgccacgcttggctgtctgcgcacgccgaagggaggagcatctagggcgcgcataattgtcgtcgagggcgaacgtgtccgcacgcgattgcttacggtggcagaagctgcgcgtttaatggggctcgaggagggttttgtcctgccggaaacctatcacgactgcttccgcttgatcggtgatggcgtagtgccggcagtcgtgcgatttctagcagacaggctgttggagccattggcgaagcacgcgaaagaaagtgttttcccaccgtttaacaggaaagaattagcgtga

SEQ ID NO: 28081 - DNA, 2517 bp, Pseudomonas syringae BRIP34876
gtgaccctcggtgtgcaaacatcattgggacttcccattacattgtacgattgggagctgaccctcactcgagcgctgttgcgcgctgaggccggggatagtgatgcaatccgctcgttcgaaattactcctgagacgcttgccatacattgcgggcttgatagggagcatgccgaggctgcggaggctgcattcaagaatgcgcttcgtgccgaccctcatctgatttggtgccttcagcacggtcgaatcaagaaaccagataataagcagccgagctgcttcgcgatgcttgcgcttagtttgctggtagatagcttgctcgacggtgtttacgaggataaagggcaatatcgcgccaagctcgctgaatggttgagcgttgatcggtcatttacagacctgcatggtatcgcgatgatgtgggatcagctcgtcgcatggctagatagtcgcatcgatgggggggcgccgttccgacgtcttatcctgccggtgataccggcgagttggactcatatcggttacaccagatatctgtcttttccaaccaaacgtgatattcgcttgctgtccaagcagatcgatcgtgggatcaacgctagtatcgatccggtatcgttagtgtggcagctcgaccctataatgcgagcttcgagcacctcctacggactgaaggttgccttcgaagatttcaagatggcgcttagatcgggcgcagcatccgttgatcaccggttctggcgcttggtgctcagagcgagtacgcagacggggcactcgctaccaaaagctggaagcctcgtcatggacttcgatgaggatggtgtccgtcgctatcgggctgggaagttgctggagggaaacgctgcgttcaacttgctaggcagcgcaatcgcattgtctaggactgttgacagcttgaatctcggaccgtctatcaggcgcggcatcctgtttttccgatctagtgggattgcgagttggacagccgctggtgaaccccaccctggaaatggtccttttcacgtagggatttccaatcaacacattggctctgttaggggcgtgtgtaccgagttcatatcttccggcaattggttcattactgcacacccaatttcgggtcgaattgttgatgatgtcttaacccagatcggcatcacgaacgccaagcacactgtgcgaacgataggtctcgtagatggagttcgcattggtaactcttggctcggtcagcctcggtatcttccatatcttggaggcgcgtctggtgaaatcgtgattgagtcagtggggaagggggtaccagtgcgattggcttgggtgaacggtgagcttcaagctgatgacccagtggatgggcagttctcgatttctgatactgctgctcattggacccgccgcgcttcgttcgtagcattggccgaagtccatgcgcgcttgggcgctaaggcttactctctgcctgagcaagcggagtggatgggagtaacaaaccgaaggtgcgacctttctcattcggtggtgggggagtgggacgatacgccctacgcaaatcaagacatgatcgaagccctctacgctgcgtcgcggtcaggtatttctgagggccatgcgatatcgattatcgacagagctgtaggggttttaaggtggcagactctccggcttcttcaggaggccacctttttcgatggtcgtccgcttacccgctggagagggcgagtctttacacttggacagccgaggcttgtgcagattcgaatgaatggtaaatcggcactgcttgtctctggcgcaatccccgcgcggctcgaagccgattttcgttcaacggtaatatcgcagggtggaacagcctttcgcaggcttttgcaagagagctcctctctaccgctgttcggagcatttggagtggcgcctgaaatattgtcgaaagctctggggtggccggtggtggatgccccttttcagccggatggcactagctccagtcgactgattgaaaccaaggtaattggcgagggctaccaggtggcttcacattgggattggtctgttggtcgctttcgtagcgggccgggtcctgaggagtcggtaatgcttttcagactcgttcatccaggattgcgggaccatgacatctaccgaattcggacatgtaaatgtattaggtcattccactcccggcatgcagccatcgtcgatgcatacctgcaggccggaaggtctttatttaaatttgaccaggaccatttatctcggctcacatccgagggcacactgcccttagaaatatcagcggcaatccgcgtacggacgctcttcaacgcggcgtgtacaagcaacagttggcgatatgaggccacgaagcaagacgcggcgtggttggccggactattgccaggactcatcgatggtgtgctagatgagacagtgatagatgctgctacatcgtatcgtcgtgggcgaggcaatcggcgtcctatttggactgatggaggacttgtgtag

SEQ ID NO: 28082 - DNA, 2136 bp, Pseudomonas syringae BRIP34876
gtgacagtggatgttagaacggagcgcggcgtatctgcggctgccgaattgaggcgtttcgcaggtcattttgtccgttggcaggggcagtacggctccatcgctgttattggcctactgaacacggatggtttggaagtaattgcgaatccgatgcgattatttccccgagatggtcttgtggagattcaatccggtggtaatggcgacttacatcccggcgactgggtcgaatttgatgtaatcaagaacacgcgatatagggctccagcatataaggcccttcacttgatgcgattaccgcgtttcgcggttttaccggagtcgaccctacctatataccgtgatcttctcactcgcgaaggctggtcgggagactccaggccaggtgtctgggcactccgtttagctggggaaactgtaattgttgtcgagttggaggccggtaaggacggtagacttcgaattgcgcgagcttccgctagagaggtgaagcgctaccattatgctcaaggatgtgttgtacgtaccaacaatggcgcgagatctgacgacgtctacgttacttcgatatctagcgagatgaccgcactagactggtcgggtgatgtggaccacatatcacgtgttgttaggtccctcgcaggcatgggcgatccacgtgttccggagatcattagctggctcgagcttcatgaggagctcataacgaatcgagcatccgccacctcagaagacagagagcctgagctagacatgctacgttcggcagctttggcaaatcgccttcgagccgaccgtaaactgatggaggtttatctcgcagctgtgctccacgacgaagctgtgcgcgatgttgtagctaattatgtgaaagagggtcatggggccgaacgaaacaagatgcgtgtcgagcttgatgaggaaatcactgctgagaagatgcgtcggctcacccagctatctgttgaaattgaggcggagcgtaccgcgagtaaggctcgcatagaacaggaaactcagaagcatgaggcatccgttcgctccgagtgcgaccagagattaatgcatgctgagctagccgctttcaatcgaattcaagcgctcgaaactagtgtcactgagcgcagagaccagctagaacaccagattgccgaacaggcgcaaaaactggtgaatattaagagtgatgccgctgttgttgagacggagcagaatgaactccgggccgaggcggaaaaagctcgaacagaacttaccgacgtgaagggcgagatcgatcgcctcctagccgttgccgcacaacttagctctacaacgatcagtgcctcacagcttgcagtaagtaatgttggtgtcgggagagtctttcctaaccatccgaaggttggcgctgccctcaagggagagctaatcacgcgtcaagttatgctttcggacaagggtagagaacttctgcagagcttggttattacgctcctttctggagagctccccatcctggtcggcggggactcggcggatctgctacgcgtcgctgaggctatcatttgccccgggcggtttgtttctatcgaagcagatccgacgcttatctcactcgacgatctctgggccagaccaggatcaggtgtacctactcttctggcggcagccgctgaggccgctcgggatagtggagcagtcctagttgtaatcagaggcattgagcgttcgggggcgcgcttttggttgcctgccttgtcggaagtgcttcgttccggggggctgccacgcggactgcttgtttgctgtacggttcatgagccagagcacgacgaggtgagtaccatttcaggaagcgttccgtggtttgaggcaaagggggccttctcactgggagcagcatttgctggtccgtcgctcctaacacctccccggattaagttggaggtgcttgaccctgggccgatgcctacggacctatccatagcaaattcgcttgcgatagagtttggtgaaaatttgagtctggatatcgcaatgcgcagcgcccgcatgttcgcggaagccatcacattgctcggtgacatcgagtcggcgcagcgcctcgtcgtcaaggttgcaaagcagctgatgatgaagtcaagccaataa

SEQ ID NO: 28083 - DNA, 5838 bp, Pseudomonas syringae BRIP34881; identical to SEQ ID NO: 28079

SEQ ID NO: 28084 - DNA, 1200 bp, Pseudomonas syringae BRIP34881; identical to SEQ ID NO: 28080

SEQ ID NO: 28085 - DNA, 2517 bp, Pseudomonas syringae BRIP34881; identical to SEQ ID NO: 28081

SEQ ID NO: 28086 - DNA, 2136 bp, Pseudomonas syringae BRIP34881; identical to SEQ ID NO: 28082

SEQ ID NO: 28087 - DNA, 5874 bp, Pseudomonas syringae pv. tomato
gtgctagacccaattggtggttttcgtcgaatccaaaactttgtcatcaactatgttgagaccagtttccgcatctcaaacaaggcggcagcggaggctcgtcggaacctccttacgacggtcgacgtactggctactgagccttttatcgagccggtgctacgctacgagtcgcatcctgagaatctcgagcaactagcgcagcgagaggatggtccgctcgcacctttgagtgagtgcggccggcgagcctttgttgagctagcgctttccgggctgtttgaaggcacacgttgtgagggggagattcgtcgaaaatccattttttcgccatacgatcaccaggtggaaatgcttaagcgcggattgctttcgggcaagccgggtatcgttacatctcgcaccggcagcggcaaaacagaaagtttcatgctgccggtgttagctgcgatatccaatgaagcagtgacctgggtagcccctggcaatggctatctacaaaaaaattggtggctagaagataagggccagtggtctgcccggagacagggtgagaatcgtccaagtgcggtcagatcattggttatctacccaatgaacgccttggtcgaggaccaaatgcagcgccttcgcaagacgctagactctgatgatgcaagggaggtcatgcaagagcgcttcagagaaaaccgaatcttctttggccagtacaccagctccacacctgttacgggcttcgagtgtcatccgcggatcgctgacaataaagaggagaaacagcgtcgtacccggcgtgtcacgcgtttgcgagacgcaatgcggggtttctggcgtgatcaagatgctgcgcgtgcttttgaccttaaggcagaattaaccgcgcacgatgagggtaagagggcttcagataagacgcgttacatcttcccagccttggacgggggtgaaatgctttcgcgctgggacatgcaggctgatccccccgacatcctggttacgaacgcctcaatgcttggcaccatgctctcgcgagaggcagaggagtcggtcttcactaaaacgcgtgattggctgttaagcaacgatgatgcttatttttatcttgtcttcgatgagttgcacctgattcgcggctcggctggcaccgagacagcatttttggtgaaaacgcttattcaacggttggggctcgatcagccggcacatcgatacaagttgcgaatactcgcttcctccgcctctatgccaatagatgggagtttgggggcacaatcgcttgcttacctacgtgatctcttcgcgccttatggtactagccagaatgcgaatgatccgggagtcatagatccggagttttggcgagattgcattgtggtgggtaatccacacctaccggagttttccggaggacgaatcgaggctcagccttttgtagatctgctagacgcggcattagatggtaaagatgggtttgtcgctagaatttcaaatgcgcaagcgctaaatcctgccgtggagcgcgcggctagagccctggggcgttccgccagcggatccaccgaccgaatcaaagttctagctgagtcagccgccgctgtgttgacgcaagcttgccgcgaaggaagcgacgttcgcgctacgtcgacgacagatttgtgcgaacgtatcttcctcccccattccggggactatgacaaggctctgcgtggactgctattggcgcgcgcactcccagagtcagatgcttgggattcaagcgtttcgattaccacaacagcctttcgcgtccacacttttatccgcaatattgaaggtttattcgcttcagtcgcgatggatggcactatcccagtattcgaggactttaccgtagagcgtggcgtaacccatgccaagcctcgaattgatggagggcggggccgtcgattgtttgagttgctgtactgcgaggcatgcggtgatttgttgatcggcggccaaagaggtcagaaagttgcggacagcaccgagaccgaacttctacccgctgcagccgatctcgacaacatgcctgagaaagttgggtccgaatactacgacaaaatgacacttgatgaatttgctgtattttggccgcgtcgagtgcaatgggcggcgtcagatcgagattatgacgattgggaggccgccagcttaaatccagaaacaggactggtgtctgttcaatcagcagtgccctccggacacgtggctggatatttatatcggcagcaagaggcagcagtgaaaggtcgttacggcaagatgacggggcctttgatggcccagccgttctgctgcccgaaatgtggcaccgattactctaaccgacctgttttcagtcgttcgcgctcaccaattcgcgcattccgaaccggtgtaactaaaacctcccaactggtagctaccgagctttttgaactactgcacgcgataggtgcggagccaaaagggattgttttttctgacagtcgacaagatgcagctaatcaggcgttagagatagagactttacacctgcgcgatttgcgacgtgaggtcttagtaactgccgcacgtgaattggttaagaagtccaaggaggagtggattgatccgctcgaatttgccccgcttgtggcatctctcgcagcgaacccgtcagaaatggctttgcttttcgaaaaaattaacaaacaactgacctcgggaacgcagaagaacagcgatagaatctctcttagcaagctccttcagtgcggcgctgactcaagcattggagaacttacctccgaatttgtctcgctgggagttcacccatttgatcgccttggtaaaaagaattttgagggcaagatttggtatgacttgttcgtccagaatggagggcggccggcttattctcacaagttaaatgatgttcaaaaaacaggtctcaacaaggagatacttaaagggcagtatgagctaattgacgatgtgatttttgcaaacactttttttgcattggaagaaactggcttagcatatccgtccgttacggacgaaaatgatgaaaaagcagatcgtttggatacttggttacgtgtttttgctggagcctatcgcgtcttggacaataaatttgtcgagggcgataacgtaatagaatggctgtcaggatcagatatcaagaataagcggttgcatcgtttcgcccaagttgttttcccgggagggggcgccatcgacggtctgagcggcattcttgacgagctctcaacgttagggcatccgagcgggataattcatatcggcaagctgtatctcaagatagcaaaggaaagcgatccgtattggcgctgtgacaactgtgagagagtgcaccttcaccgcgggcccgggaggtgtactcgttgcggagagaaactaggcgagcaagcaactggacgagctgaagagttgtggcacaataattttttgggcagccgcatcgttcgtgggcaagaagaaggcgttggccgattccgtttgcgcgtagaagaattgactgggcagacggatgatttttctgatcgattgcgcaagttcaaaggtatctttgtcgacggcgagagcgaaatacagaagcgtgcccaagaaattgatatgttatctgtcaccactaccatggaagtgggaatcgacatcggggccttgcagagtgtatatcaggccaacatgcctcctcagagattcaattaccaacagcgagtcggtcgagccgggcgtcgaggccaggcgttctcgctggttattaccttctgtcgcgggcgaagtcatgacgcatattactttgcgcatccgcgtgctattactggtgacccgccacccccaccttttctcgctgtcggtcacgatcctattccgttgcggttagtgcgtaagaattggttgcgtgcagcatttaagtatttgcgtgaccagtgcgcgaaagctggcgatgtgtatccgggtgatctggttatgccacctgacgttcatggtgagtatatatccactcaagattactttcataaccccctagcgtcgtggtctgaccgtttgcacgacgcgcttattaaaactcttgctgaacgcgatagcttcattggtgtagcatccttcgatccagaacaacgaagtcgccttaaagaaaaatctgatgttgaacagttgatcaaagaaatcggcgcacttaaaaaatatgcacctaattctgaaatggggcttgcgcgatttttggccgagtggggattgttaccaatgtacggtatgcctactcgtgttcgtaacctttatctaggtcttcgccctgtgaaagtaggaggggctgaagattatgaatggtccactatggatcgcgatcttgatcttgccgtctttgaatacgcaccaggagcagtattagtcaaagataaacagaaacatcgagttgttggctttactggaagtctttctacccctcaaagtttcaagaaagatgatctttcgatcaggacgttatctcattggtatgaaaccgaaacgtgggtagcagtctgtaaaagttgcggctcagcaatcaggacagatttgatgccacaaacatcactaaagtgtgatgactgtcaggcagagattcttcctgatgagctaaagcgttatgtaacaccggctggatttcgaactgactttaatccaaaggacggtgaagaggacgtgggacgtatgtcggttcgcagtatggcgaccttggtgattccgggtgtccgtctggagcatggaaatgtgactgtgatgcacggtgccggagtaaccatcatgcagatgaatgatggtgtcgccaatattgagggggaaggtgaggggtttcttgttcaggaagcctcggacctaagggttacaatgccatcgggaaccaaaaagcctcctaagatcgatggcgaacctcaggcttatgaagcgggctggctcaggaacgctcgcagcacaagttgggggctggcgcgttggggaaatattggaaacccattgcttcccttcggcttgatctcatgcaagcagacagagtctgtccagcttgagttaggaacgtttgatcctcgacttgatctgtcacacgtagcgcgacgaggcaaatatgatcgtctgtcgacacgagcagcagcaatcagtgcaacgcaaatcctagtccaaaaggcagctctggagctggatgtatcggctgacgagttcgaggcgcttgagccgcgagtgcggtcgggaaagccgctgctgcagattgccgacgcgctgattaatgggtcaggcctctgccgtcgtctaggggaaacggttccaggcggttcgcgaccccaaattcttgatattctgcacaatgtcttggaaaaccaagatcagtggccgcttgtagattttctcaatgtatcggcagaaggcgatcactcagctcaatgccatacatcctgttattgctgcgttcagcggtacggtaaccgtcgatatcatggccttctcgattggcgcttgggattagcctatctgcgctcaatgactacaccgagctatgcatgtggcctggaggcgcaggacgctgcctatcccgaaatcataggttggcgtgagcgggcccaatggttggcggaaaacattgctcagatgcggcccggagtcttaactccttgcaacttaccgcattcgggactgccttttttgctcgaacgtaaaggcggtcacgaaacccgatacgtaattgttcaccctctttggagtttggatgctggcgcgctgtctgacttgctcggaaatgactggtctccggagctgcgctttgtagacacattcaacttggagcgtcgcccgctcaaaacaatagccaattggttaaaggctcgctga

SEQ ID NO: 28088 - DNA, 1221 bp, Pseudomonas syringae pv. tomato
atgttagatagcaaggaaaaaattggcgataaatttaatttttttgagtttttcgcaggtggtggtatggccagggccgggcttggtgatgaatggaattgcttgtatgccaatgatatggatcatattaaagctgcgacatatattaataactgggggggaagtcattttgatgagcgtgacatccacgatgttaaaacagaagatttgaaaagtaatagtgatttggcttgggcatcttttccttgtcaggatctttctgtagctggaaatggtttgggtataggcaactcaaatagcgaaggatctacaaggtcgggtgctttgtggccttttctcgagttgattgatgggttgcgtcaagagtcacgacagccgtccctattagtcttggaaaatgtcgtaggcttactttctctcgagggaggacgtgatttcgccgccatctgcgtgcgcttgggcgaaattgggtatcgttacggtgctgtaattattgatactaggcacttcttgcctcagtctcgccctcgcgtattcatcatagctgtactccgcgacatcatcattccgcataaccttaatcatgatatggcaacgcagtcttggcacccaccgactttaatgcgggcttacagatcattatcccaacaggcgcatacggattggatttggtgggacttaggacccgttccaacgttaaagcaaaacgctctagaaagccttgttcaattcgaagggatcgagtgggatacacctgaagaaacccaaaaaataatcagtaggatgactcccatacatgtagcccgccttgaaaaggcgaaagcttctgaaatcgccagcattggaagtctgtattatcgaatgcggcgagagggaagtatcaacaagcagcgtgcggagataacgttctctgaagtcttgggctgtttaagaacgccgaaaggtggtggctctcgttcaagaataattgtggcaggtaatggtgaggttaaaactcgactgctttcaatccgggaggcagctgcattgatgggactagaagctagctacgtattacctaaagcttatcaacatgcctttaaggttataggagatggtgtagcagttccacctgtgcgttttctttctgaacgacttcttaaaccgttaattttagctgcgcgggaaaacgctgcgggctattttgaagaagctctacagcaattggctacaatcgattga

SEQ ID NO: 28089 - DNA, 2544 bp, Pseudomonas syringae pv. tomato
gtggatttgccgcataattttgacgcatgggagacacggctcgttgattattttctggcgattggtcccgatggcaacgccgcccccatccgtgccttcgaagtcactcccagcacgttgacacatgcctgcggtgcagcgagtggaagcgaagcacaggttgaagagcttttccgcaaaatgttatcgcaagaccttctgttgatggactcgcttcgcgatggctctcagcggattgaaaatcggcatgtccccaattgcttttcttacctcatattaactttgctgattgacaatcttctagagggcaatacaactcagagtggagaatatcgccataaacttgcgaaatggttgggaaaggacactagggcttccaacttacgcgggatagcgctgatgtgggagagtttggttcggtggctggaaaagcgtagtcaagcaggtgagccgtttcgtcgtcttatcttgcctaaccccggtaattggactcacataggttatacacgccatctgtcatttccgagtaaggccgatctaaaacttttagtcaacttttgccagaaacacccgagagcgcatcgagacctgcacgtcagcatttctgcgtttccgagagaactggtcgatgatcgcgcctcctggggacttcgcgatgcgttcaaagagttccgggacgcttactacttgcaacgccgcgcgttgggtgaccttcgcttctggcgtctcctggaacgtgcgtccactcttattggcagtccgacacgtagtagtgtcacgatcgaaatgctattcgacgcggataaatgcgcattgttttttgcctaccttggcgagcagagcgaggccgagccgttcacctcttttaataatgcgttaatagcagtaagggctgaacacagtgaaaatttggcgaccgccgccacaatgggagttgtaatcttccgcttgattggtgcgggccgctggcgagcagaaccggaggcctgcgattccgcttttggcctgcatgtcgcgattgctgataggcacaggcgaagaattggtgatcgactggggctgcttgcaaagagcggtgattgggcggtcacaaccaatcctctgacctttgaagtggtcaaagatgcgcttaaacaagcaaaactatttccttccaaactggacttgatcgttcgtccgtatctctccggtggcattcgtagcgacggggtctggctgggccgaccacgatttttcccaagccttgactccgatacctctgactatgtgatacgggatgcattgcctcgcgagtcgggctgtttgctgacaatcaaaaagggacagctcaaagcccctcaatcaattgaaggcgccttcttcattcatcctgaaatgcttcgaggtgaagagcacgcgccctggaacattcgcctgcaattcgtgcgcaatgctttcatacatccgatgctcgcaggcgcacgctacaaattagcgccattgagagactggactgtgggggagaagctccccgttgatgttactacccaggactcgttggactgggagtcgggtgatcccgcctgtggagatcttttggaggcaatctacgcaagcggaaaaagtggatgggaggaggcgcagatcattgcactactcagctgtgccgacgatgctataagtccatggcttcttttgcgtagcctgcgtgatgcaggcatcgttgagcctcgtttacgcagcggttggaaaggacgcgtttggacattgagggagccagttatcatcgaagctcatcgcgatggtcgggctttagctctggtggaaggcgcgctttgcgcgcgaatggttgaagctttcaagctggctgttgaagggctgggtgggattccctttcgacgtctaggcattactagctgggctgcgcccttattcggcgctgaggatgttcaaggtaaagccgttgccgaacttctcggctggcgcttcgagagcgaatgcttatcgccatccgagaaaccactagcgtttgttgaaacgccgcatcaggccctgcactacgaactggctagagcctggtcttgggccaaaggacgttttgtgtccactgatgttatccaagagaatgttcaattagtgcgcttgactcatacaggtgagcgtgatcacgatgtctattgcgtcgagcagagaggcctcatacatcactatttctcgcatactgccgccattgtcgcggcctatgccctagctcgaaagtcactgtttgaatggagacctgagcaaaatctacttgttctcacggcgtgcgagggtggacttcctgacgcactggctacagaaacgcgccggcgaatgctacgcaatggagggccctgtggccgtgtatatatttatcctgctaattgcgagatggctcgctggctagatatgcgacttccgaattgtatcgccgggccgttccacgaggcgctgcagcaggatactcagggtcttattggcatcgctcgtcgcacctcgggtcgtttgcgcctacagtggcgtaacggctcaaccactctttag

SEQ ID NO: 28090 - DNA, 1836 bp, Pseudomonas syringae pv. tomato
atgcctttccttgatctccaggatgtggggactctggaagtgctgcgcagtcgcttgacagtagatggcttgaaggggccgagtcatagtggaaattgggtgattcgctacagagaagaccgcatcctcatgctaggtctcatacgctcctcagacaaccggtaccgtatggcaactggtggcaatttcaatgtatatgcttacgagcctgtgttattgcataaggtgccgtcagatggtgccgaggtttccctctatgaattaaaacggggtgaggagtgtcttgaggtattagactggacagctgacgacgagtacatcaagcgcattgtgcgtgctatggcgggtgctaacgatccacgtgctgatactgtcatagactggttgaaacgctattctgacgaggcgaccggtcaagtaggagcgagtctagtcgatagcctcgccgcgcagcaaaacgcgagatcaggtgagctggctaagcgcttgatgggtgacaaggacctgctacaggagttgactgaagcgcttctgacagactccaggcttcgctcgcgtctagaaagcgaaactcaagcgatcgcagagcaggagcgagaatccatctttatctcgctttcgggtgagctggagcgggagtttacgacgctgcgcgaacagcgtttgttggagattgattctgagttgaagttgttggaggcctcgcagcgtgaagcattgagtctacaatttaatcaagagttggcgtccaatttactggtagtaaacgaccgtattgcggctcgccaggtggagttggagtgcgagtttgaggaggagcgcgataacctgcagcggggcctcgacacgcttatcgcgcaacgtgagactatcatcgtcgaactggaaaccctaagtacacagattgagtatcaccaaactaacctttcggaccttcgatcgcttgagtctcaagcgattcaggagattaccaggctccaggaggacgctgcatcaatccatgtgccgatgagcgtcaagcttgagtccgtgctgcgtttcaatccgccgcagattgttcctgtccttagcgctggggagatgcaacatgccatcatgaactgcatgctgcttacggcagaaggcaaagagcgtatgtctcatttctttgcattgatgctggctggtgaagtaccggtagtccatgggctggaagcgcaggattttcttcttactgctgagacccttctgtcttccgggcggtcaatgcgtttggaggccgatccaactgtcattaccttcgaagatctttggcttcgtgcaggcacgcaactcccgacatccctaactcacggactggagatcgcctcaggaagatcccctgcaactgtattcgccgttatcgaacatgctgagcgatctggggcccgtttctggctccctgcgcttgcggatcgtgcgcgcaggggagagcttcctagacgtttccttatctgcacaactgtcgtaaatgacgactgtgatgaagctcaggcgattcgaagccaagcaccttggatcgatgtgactgggactattacccaagcgggatccgccttggcgctaattgtttttgcaccgactaatgttcgacagcttgatccgggcgagcgcgccgaagacatatctccggctgtggcggcggtggcgcgagttgccaaccaactcactttggtaaattccttgcgactagcccgagcagcaacggagtggatccacttgaaccctgggtaccaatacgagcaaactccggcagcgcttaccgagtttttcataaatcagtctggccagtctgggcgcattaaagagaagtcataa

SEQ ID NO: 28091 - DNA, 5874 bp, Pseudomonas syringae pv. tomato; identical to SEQ ID NO: 28087

SEQ ID NO: 28092 - DNA, 1155 bp, Pseudomonas syringae pv. tomato
atggccagggccgggcttggtgatgaatggaattgcttgtatgccaatgatatggatcatattaaagctgcgacatatattaataactgggggggaagtcattttgatgagcgtgacatccacgatgttaaaacagaagatttgaaaagtaatagtgatttggcttgggcatcttttccttgtcaggatctttctgtagctggaaatggtttgggtataggcaactcaaatagcgaaggatctacaaggtcgggtgctttgtggccttttctcgagttgattgatgggttgcgtcaagagtcacgacagccgtccctattagtcttggaaaatgtcgtaggcttactttctctcgagggaggacgtgatttcgccgccatctgcgtgcgcttgggcgaaattgggtatcgttacggtgctgtaattattgatactaggcacttcttgcctcagtctcgccctcgcgtattcatcatagctgtactccgcgacatcatcattccgcataaccttaatcatgatatggcaacgcagtcttggcacccaccgactttaatgcgggcttacagatcattatcccaacaggcgcatacggattggatttggtgggacttaggacccgttccaacgttaaagcaaaacgctctagaaagccttgttcaattcgaagggatcgagtgggatacacctgaagaaacccaaaaaataatcagtaggatgactcccatacatgtagcccgccttgaaaaggcgaaagcttctgaaatcgccagcattggaagtctgtattatcgaatgcggcgagagggaagtatcaacaagcagcgtgcggagataacgttctctgaagtcttgggctgtttaagaacgccgaaaggtggtggctctcgttcaagaataattgtggcaggtaatggtgaggttaaaactcgactgctttcaatccgggaggcagctgcattgatgggactagaagctagctacgtattacctaaagcttatcaacatgcctttaaggttataggagatggtgtagcagttccacctgtgcgttttctttctgaacgacttcttaaaccgttaattttagctgcgcgggaaaacgctgcgggctattttgaagaagctctacagcaattggctacaatcgattga

SEQ ID NO: 28093 - DNA, 2544 bp, Pseudomonas syringae pv. tomato; identical to SEQ ID NO: 28089

SEQ ID NO: 28094 - DNA, 2094 bp, Pseudomonas syringae pv. tomato
atggcggcaaattgggcgtggtatatcgggcaatgtataaaacgacatgatatcaacatggctgttaaagtcgttgccgtccggtcaggagaagggtggtcgctactcgataatccacaaaagctttttccaaagcttggagaggtggaagttcgtctacataacatctcagcatataatccgaacgattggcttagcttccaagttgctcaaagagaaccccgtggaaaatggaaggcatcgacctatcgccacctaatgcctttccttgatctccaggatgtggggactctggaagtgctgcgcagtcgcttgacagtagatggcttgaaggggccgagtcatagtggaaattgggtgattcgctacagagaagaccgcatcctcatgctaggtctcatacgctcctcagacaaccggtaccgtatggcaactggtggcaatttcaatgtatatgcttacgagcctgtgttattgcataaggtgccgtcagatggtgccgaggtttccctctatgaattaaaacggggtgaggagtgtcttgaggtattagactggacagctgacgacgagtacatcaagcgcattgtgcgtgctatggcgggtgctaacgatccacgtgctgatactgtcatagactggttgaaacgctattctgacgaggcgaccggtcaagtaggagcgagtctagtcgatagcctcgccgcgcagcaaaacgcgagatcaggtgagctggctaagcgcttgatgggtgacaaggacctgctacaggagttgactgaagcgcttctgacagactccaggcttcgctcgcgtctagaaagcgaaactcaagcgatcgcagagcaggagcgagaatccatctttatctcgctttcgggtgagctggagcgggagtttacgacgctgcgcgaacagcgtttgttggagattgattctgagttgaagttgttggaggcctcgcagcgtgaagcattgagtctacaatttaatcaagagttggcgtccaatttactggtagtaaacgaccgtattgcggctcgccaggtggagttggagtgcgagtttgaggaggagcgcgataacctgcagcggggcctcgacacgcttatcgcgcaacgtgagactatcatcgtcgaactggaaaccctaagtacacagattgagtatcaccaaactaacctttcggaccttcgatcgcttgagtctcaagcgattcaggagattaccaggctccaggaggacgctgcatcaatccatgtgccgatgagcgtcaagcttgagtccgtgctgcgtttcaatccgccgcagattgttcctgtccttagcgctggggagatgcaacatgccatcatgaactgcatgctgcttacggcagaaggcaaagagcgtatgtctcatttctttgcattgatgctggctggtgaagtaccggtagtccatgggctggaagcgcaggattttcttcttactgctgagacccttctgtcttccgggcggtcaatgcgtttggaggccgatccaactgtcattaccttcgaagatctttggcttcgtgcaggcacgcaactcccgacatccctaactcacggactggagatcgcctcaggaagatcccctgcaactgtattcgccgttatcgaacatgctgagcgatctggggcccgtttctggctccctgcgcttgcggatcgtgcgcgcaggggagagcttcctagacgtttccttatctgcacaactgtcgtaaatgacgactgtgatgaagctcaggcgattcgaagccaagcaccttggatcgatgtgactgggactattacccaagcgggatccgccttggcgctaattgtttttgcaccgactaatgttcgacagcttgatccgggcgagcgcgccgaagacatatctccggctgtggcggcggtggcgcgagttgccaaccaactcactttggtaaattccttgcgactagcccgagcagcaacggagtggatccacttgaaccctgggtaccaatacgagcaaactccggcagcgcttaccgagtttttcataaatcagtctggccagtctgggcgcattaaagagaagtcataa

SEQ ID NO: 28095 - DNA, 5874 bp, Pseudomonas syringae pv. tomato; identical to SEQ ID NO: 28087

SEQ ID NO: 28096 - DNA, 1155 bp, Pseudomonas syringae pv. tomato; identical to SEQ ID NO: 28092

SEQ ID NO: 28097 - DNA, 2544 bp, Pseudomonas syringae pv. tomato; identical to SEQ ID NO: 28089

SEQ ID NO: 28098 - DNA, 2094 bp, Pseudomonas syringae pv. tomato; identical to SEQ ID NO: 28094

SEQ ID NO: 28099 - DNA, 5874 bp, Pseudomonas syringae pv. tomato T1; identical to SEQ ID NO: 28087

SEQ ID NO: 28100 - DNA, 1221 bp, Pseudomonas syringae pv. tomato T1; identical to SEQ ID NO: 28088

SEQ ID NO: 28101 - DNA, 2544 bp, Pseudomonas syringae pv. tomato T1; identical to SEQ ID NO: 28089

SEQ ID NO: 28102 - DNA, 2094 bp, Pseudomonas syringae pv. tomato T1; identical to SEQ ID NO: 28094

SEQ ID NO: 28103 - DNA, 5793 bp, Psychrobacter aquaticus CMS 56
atgctagatccaataggtgcttacaatgatattttagagctttatctttcttatttagatacagtttatcgattacgccgtgaagatttaagtcaagaaaggcaacgcttgttacgacaaccaggcaatttaatgccagaaccttttattgagcctattttacgctatcaatcaacaaatattcgattggaagattgtttagatgacgagtgtcaggataacccattaaagaaatttaatcgtgagcaacgccgagctatcgttgaaatgatgttttctgggttgttccctggcaaaccagccacaggtgagttatcacgacagagtgtatttttaccttatgttcatcaagtgcaaatgctgcaacgcggtttaaagagtgggcatcctggtattgttgcatctggtacaggttcaggtaagacagagtcatttttattgcctattttggcagaattgacggcagaagcgacgcaatggggaacgcccccagtagattatttgcaaaaccaatggtggcgtgaaggaagtaggtttgagtaccaccgcaaaggtgaagacagtaatcgaccacaggcagtgcgtgcattaattttgtatccaatgaatgcactagtagaagatcaaatggtgcgcttacgcactatgctagactcgccagaggctatagaagtattagacaaaagagccaatggtaatcggatattttttggccgttataccagtgcaagtcctgttcctggctatttgaatcatccaagacgacaagatgatgaaaaagagaaaacagctactaagcgccgtttaaaacgcactaagaccacgttgttgacattggcgaatgatcaagaaaaagcattggcgtatgatagaagtaatcctgagactgatacaacacgttatttattcccatctcttacggggtcagagcttattacacgatgggacatgcaagaaacgccaccggatttgctgattactaatatttcaatgctgaacgcaatgctgtctagagaagttgatgctcaaatcttcgataagactaaacaatggcttgaaacagatcctaaagcttacttcttcttggttttggatgagttgcacttaatacgcggttcaacaggaaccgaaatggcagctctcattcgtactttaatcaaccgactggggttggatcgtacagagtatcgccataagctgcgtatactagcgtctagtgcttcattacccttggatggtactgaaggtgatcaaagcttggggtatctttatgacttctttggaccgtttggaacttatgtagatagtcatagtaaaggagctaaaaagcctcaggactgggcagaagcggttatttcaggcaatacggatatacccaaacccattactcaacaatgtatagatactagaccgtttatagcagtggtagattatctaacaccagatggtcgctatctaggtcagctaacgaataaattagacagagatgagcaattagagaaactactagatgcttgcaaaacagccttaggattgtctcaatctcaagcaaccagtgatatggtgaatcaagttgctgagagactggcaataagttgtacagataaagagggtaaaaccaaagctcgctcaatatcaacgttggcagaaaagatttttggtgaaagtcgagagcataaagctttacgtggtttaatgatcctcagagggctaggagatatagaggggtcagaggctatttcctttagggagcacctatttttaagaagcttggagggtttatttgccgcacccatgatacaacaaggtcggcttgtttatgaagggatgtcggttgagagtggtactagtcatatccatacgtctaaaggtacccagcggctatttgaattatttttatgtgagggatgcaatacagagtttattggagggttacgtggaaaagcttctcgtaataactcaagatcgccaattgaaattctccctcaaacgcaggaccttgaaaaacttccagagtttggcgttggttctgggattgaagatctcagtcacgaggaatttgttctattttggccctctatagcttcagccaaacgaggtgacaatgacaaagaatcgtgggtgcctgtgtcgttagatccatataatggtcagttacgttcaactcgtccaactaaccctgcggattttatctcaggaaaattcttcgacatgattaatgtatctgataaagataaacaacgtaagaagactgcagcaccaaattgctgccctgcgtgtggggctgattattcacgtcgtagtgagcaatatcgtaaatcacctattcgtagttttcgtactggttttgctaaaacatcgcagttactagccactgaagttcttgagttgcttaaacaagctggtaatagtcccaaagtgattgcgttttctgatagtcgtcaagatgcggctaaaacagccattgatattgaacgtcatcaccataatgatactcgccgtaggattctggtggatgcattaatcaatagtgcatttgttgaggatatcgaaactctaaaagcccggcgagaagaagcagaaaagaaaggggactatgatttagcagatgaaattgataacaagataaagaaaattcaaagaaatcagttaagtcctgatcgtatcccattagcagcaattttagagacaaatgaaaaaggtattatcgagacaggttttaaggctcagccactgcttgcggggatgactgctataggtgtgcaccctacagatgacaccggcgtagaaaaaattaatcacaatgagtggtttagttattttgaagagaagcaggacggaacaatctattgggatgacaagattgacggtacgaaaactacagatgcaaaaaatgcagtggcgaaagcacaacaaactttgattgaagatgttatttttgcgcgtaactattttgctttggaagaaacaggaatcggttacgcttgttttgaagctcaacatcaacagaactcagatgagcttaatgcgattttaagggtttttgcagataattatcgtgtattagccaataaatgggtgaatcaggactcaattaaagagtgggtaagcggttattctataagtagtagaagagtgaagcattttctacaagcctctggcatcagtgaagataaaatgactgatattttaaaagaaatggaaaagcttaatcatcgaggtggcattatacgaatcgaaagtttatatattcaacttgctaaacctcaagatccagtttatgaatgtaccacatgtaatagagctcatttacatcgtggtacagggatatgtacgcgttgtcaccaacctttgcctactgaacctaatctcaaatcacaacagcttagagaacgcaactacatatctaaacgattagataaagcctttgcagatgatcagtctatatttagattgcgttgcgaggagttgacaggtcaaacaagatcgcccgcagagcgattacggcgctttcggggtatttcgattgatgataacagcaatccaatcaaggaaaaagctcaagaaattgatttgctttcagttactacaacaatggaagttggtattgatatcggtgcattacaagctgtataccaagctaatatgcctccccaacgttttaattatcaacagcgtgtaggacgtgctggacgacgtaaacaagcattttctttagcaatgacattatgccgcggccgtagtcatgatatgcactattttcgccatcctgaagcaatcacaggagatgctccaccaccgcctttcttaacagtagagcacatagatattagcttgcgtttattgagaaaatcttggctaacagaagctttcaaacgattaagagaggaagatgatagcaattatccaggtgataatatgaaatctgatatacatggagagtttatactaacgactgactactacgacgaagtcaaagactggaagcaacgcttaacaactgcacttaagcagacccagtcaatcgctgaaaaactagccaatactctaggtcagggggtagtaaatcgagagcaagatcttttaacttacttaacaactgataaactgatcgatgagatcgatgtcttagaaaaagaaggtagcaatcgtgaaatgggactggcgcaattcttagctgagaacggattattaccaatgtttggcatgccgaccagagtaagaaacctatatttgaatttagagtcagttggtgaaaatgagtctgaatgggattctgtcgatcgcgaaattgatatcgctatttatgagttttctccaggacaagtggtgattcgagataaacaaattcatgaaagtatcgggtttactgatcaattaggttttgtccagctaaggcgtggtggtgctaaactcattcctgagcctaaagaagagtggtggaatgataaagtgagcattgctgactgccctacttgtggtgcactaaagctacttgcccaaagtgatgatggagtcaaatgtgacgactgtaaacacaagataccccaagaagcttttagtgtctactattcacctagtgcatttagaactgattttcgaccgcgagtgtctgacggcactgagcctcctcgtcctatgataagacgggaaactggagcgattattgcacctatgcagatggaaaaagttgtagggacaaacttatcacttgcaactggtaaagaagcttatattatcagaagaaatagaggggttttagatgtagatggaaaccctaaaagctacgagatggttcacagaattcagaataaggtatattgccaaggaaattctagattaaatattgataaggttccaaatcaagcaatattattagataaagctcaaaaacattcaaagccttggcaagtacaaccagaattacctgaagtacaagaagtaaagctgttttcaaaaaagcgaacagatgctctaaaccttagcatgttgtcaatcgccgatggtttatctatggatagactgggacctaaattagaacgctcagggacaagcttaagggctgcggctattagtgcgacacagcttatagttcagagggcttctctagctttagatatatcaccagatgagttcgaacctcttgagcctagacttcgtgaagagagaccaatcttgcagatagctgatacattggtaaatggcgctggtttctgtcaaagattaacaaaaaatataaagggaaaatcacctctaatcgtagaacttatagactcaatattaaatgatttatcagaccctatggtgggcagtttttttgaaagtaaacatcgtgaggaatgtcagcgctcttgctaccgttgtattcaacgctatggtaataggggataccatggtctactagattggcgattaggactcagttttttaagatgtttatttgatcctacacaccgagtgggtttagatggagatttcacgaagtattctgagcttaaagattggcctgagcttgctaaaattgctgcacaggatatcaagcgtctagatccgcataaacgagatattatcagtgcaggtccattaaaccttccggttgtattacataactccagtgggcctagctctgaagcatttgttattgtccatcctttttgggatgtagtggatatgagtgcagaactaaagcaaactgtcgattccttagattctagctactctataatgttcattgatacctttgaaacgaatcgtagattaatgagtgctattgaaaatgttaggtctaaataa

SEQ ID NO: 28104 - DNA, 2538 bp, Psychrobacter aquaticus CMS 56
gtggccataacaatgcaaacgactcttgctagtttgacaaagaaagactggattagttctctacaacaacattatttaagtacagaaggtccatatggcaattcagacataattaatttggatgttactccagcaggcttggcagaggcgataggtatgaatggatattccgatgaggatattcaagatgcatttatgtcagtttttactaggaaattagtaagagattttttatcaactaaagtacatgagattcaaggagcaagagcctatagtaattttcattttttaatattatcttgcttggtggctgctactactactaatgcgggagatagtaaccaatatcgagagcgactaggagctttgctagatgataatcaaggtgctgagcaaggtgtaagcggaattaatagtttatggttggctttatcaaaatggatgggtagtcaaatccagcaaggtaagagttatagaaaaattattttgcctaaagatatagggaatatgacggttattggctatgccgtaaagttagcttatccctctcgtgatgatcgaaaacagctaaaaaatattttaaaaaagctaagctatagagcattcgagagttcaacatctttattggtcgagctagatgaagattattatggtgaattaccactattgatgcaacgagaattatttaacctaagaaaactctatgaaagcaaccacgccatagagaaccattacttttggcagttaatactcagtattttatctgagattaatcgagaaaatcccaaaaaccacactttgttgtggtcggtatcggtcagatttggtggatgggatggtgatgagctagaagaggtagttttagcaaaaggaaatcgacgtcaagatttagaagtacctttttggcaagggggttttttacaattcttagaaatgcatagaataccaaaacaaattaaagctttattagataacggctgtattattctattagagcgtcatggtggtctatggacacaagatgatagaaaagctcatgcagaagatacagctattattctagccaatagccctgaaattattgagcggtttcaatatccttgtagcattgccgaaaggtggtgttattctgaaaacatgccattacaagaggccttaaagataactggtgatcaaggggtagctggggaaaatacatcagaaaagggattgaagtttgaaggagggattccagtaggacgtaataagtggctggcacgttcaggatacttaccccatatcaaaattgaatccaatagtaaatttagcacaaacccagcattaaaggttcaaattgagaatgacatcgttacaatcattgatgatgacttgattgataaagaatggcacttaaagcacactgatagttatgatgaacttacattaaaaagaattcaattttttaataatgcaccactcaatgactcatggccacaaaggaaaagtgcgtttgaggcgtcggtagaacttaattatcaattaggtaattcaattgttgaaacccaaaatgtaatgtcagtgggtgtatttcctaatcgtctgtgcgatgcattagaagcactatatgctcgtgcacaatcatctcgatcagagtcagagattattgctatcttacgaatagttttacctcaaaaacctgaatttaaatacatagtttgggatgtgctacgctctttggaggaagcagggtggctagagcaagattttagttgccgatggcggggacgtgtttggcgtctgcaagcaccaaagattgtattaacaggtggtttaaccgcaatcgtagagggtgctatcgctcataaagaactagaaatactcaaagttgaagctataagacagggtattgaaatacatattagtgctcagttggagtgggcagtacctgttataagtttgtatggtgacaaaattaagaaattagctgaagaacttcagtggagtattgaaattggtaaaagcattgtcgcaaaaccagccccaaaatgttggccaatagaaaatagaaccgttatagggcgtcaattatcgagcatttggaaagctgagccaggattgtttattccattaaatcaaaatatatccaacactaaaatgttggtaaggtttacacgtgatgatgatagggatgtatacgctattgatgaagagcagggatttgttacgacgcaacgcaatattgcaattttggagtatgcaagacaaattaaaaaaccggtttttatatacagtgatggattattaaaacgacagagtttaaatggccacttgccgttaccagttgctaaatggttacgacaatcaacgggtctgcagtccggccctgctctcacatcaaaatattcacagtatcaatatgctgtgggtgaggaacagttaaacacattgcaagctatatttgggcttgctattcaaggtaacaataaaattaaaccaaagaaacttattctggaaattgcaaagcaacgcagtcgcggtatccgcgtaagttatatttaa

SEQ ID NO: 28105 - DNA, 1884 bp, Psychrobacter aquaticus CMS 56
gtgtcagaacaatggtattttggtgaggttgattatacacctcgacctcaaacacgaatcagtggaattgcaaaagtagataatggtaaatggaaaaaacaagtcttgactagtgatttagcacctgtcggtaaagtcttcgctccttcattgtatggcgtagctgaaaaacaattccttatttttactgctaaattaaatccaagagtaaatgagcacaacagttattcatccgataaagagcatgatcattatattattgaggagcggaaaaagcctacagtcgttattgattacaggcatatgagtacagaacgaatacgctataagttagtagagtttggtttggggagtattgatgctatcgatgcagaacccaatgaagttattgttgcactatctgacacagaatgtgccattgtcgaagtcatgtcccatcctcgtaatggtcgttatgtggctaagacaagaaatgtggaagtttattcttttaatagtgcaatctttgaaggagatgcttttgaaggacagtttatagagattcctgatgtgactgttggcgatttcattcgcgaaataacatggaagctagacgtcgatatattaaatgacttattggataaactaaaagattatgatgagtatctaaaaactactactaaacagcaaagggcggatttagttagtctattagatcgtgcactcaatattacagaacaagaagattgggctgatatacatgaatggttgaaagggtataaacaaagagttgctagatcgctaatagagccaagagaagtcatcaacactttatcaaacatgcaaccttttcagcagaagttggagatagcacaacaagcggcaagtaatgcctaccgtcaaaaaatacaacctattattgaacaagagattaggtcagagctagcagacttgctatcacaacaagaaagcttgaaacaaaatatacaggaaagacatgagatattagaaaatcaaaaagtcattcaagatgagttacagcaaaagatttcaagcttgaatcaacagttagtagcagaaattggccatctgaatcaaacacttggtgatattaaagaattagatagtcaagaaaatatatcccttgtagatcgtctcaagcgagctctgcatgatcaaggaaagttaattaaccctacagacactactttcccaccatggtcgagaggatcaggaagagatgatattccatatatcgataattcagagtttgttgccaaacttcaggcattcgaagagaaagcagctatatcacaatcagagcttaacctatttgatagggctttacgctcaggtgattttgttcttttaccatcaatttcagcagaaattatcatacctaaatacgcagagattgttacgggtggagtgacttttcgagagagtttaggtccaaatatcttaaatttagatgacttatggatgcaaccaaaccaaggtaccaagactggttttgctagagcatggtcaacggcagtagcaaacccaaatcaatatcatttagtttggcttgatggcttacaacggacggccatagatttatggttaccaagtctaacaagtgtcatgtatagctctgagagaccaagtaatttacttgttatggcgactattgatgataatttcattgataaagagcgtctgtggtcagaattatcaagatttagtacgccacttaaatttgataatcaagttgagtataacaaaaggttgttacaacggctttcaattgttccagaaaaatgtacacaacttgcttatcaaaaggtatctgtagctagcgagaactactctgaaatgcttgaaaaaggtcaactatggctgaaagagttattagataaataa

SEQ ID NO: 28106 - DNA, 5886 bp, Rhizobium acidisoli
atgcttgacccgctcggagcgttcgaacgcatcagagagctgtacatctcttatctggacacggcgttccgtgtgcgccgtccggccctcgcggccgagcgtagacgtctgctgcggacttccggaacgcttgccacggttccgttcctcgaaccggtgcctcggtacagatcgtccccgttagcactcgaagaccttgccgacctcgaaagctccgaaaatccgatcggtcatctttcaaagtccggccgccgggctttcgccgaactggcgctctcgggcctctatccgggcctcgccgcggagggcgaagtcacccgcaagagcatattcaaaccatacgaacatcagatggagatgctggcaaagggcacgcggcccggatctcccggtatcgtcacctcgggtaccggctcgggcaaaacagaagcgttcatgcttccgatcctggcggctatcgcggaggaagccgtgaaatggagcgcgccgcagcccgggtatctggcgaacgcctggtggagggatacgccttccgagttcaggctacaccgagaaggggaggcgtcggatcgtcccaaggcgctgcgagcgctcgttctctatcccatgaacgcactggtcgaggaccagctcagccgtctgcgcaggacgttgacttctccggaagcgacggcggtgatggacgaaaggttcgccggaaacaggatcttcttcggccgctacacgggagccactccggttgccgggcatctagtccatccgcgccgtcctcacgaccggaaggaacaggatgctgccgcgagaagggtcgccagagtagccgcggcgatgtccagctacgagcgggaccaggagctggcgaggacgcatgatcgaaatcatccggacgacgatccgacccgatatctttttccgtccgttgacgagagtgaactcgtggcccgctgggatatgcaagcgacgccaccggacattctcgtcaccaacgtctcgatgctcgggacgatgctgtcgagagaagtcgaggcacccgttttcgatctcaccagggagtggctggagcgtgacgacgacagctatttcttcctcgtgctcgacgagctccacctcgtgcgcggatcttccggaacagaagtgtcgggcttgataaggggcctcatcgcgcagctcggcctcgacaggccggagcatcgccataagctgcgcatcctggcctccagcgcatcgcttcctctcgacggcgaacaaagggaacgaagtctgagatacctccacgacttcttcggtcccaacggcacgagcgaaacggctgacgatcccggtgcaaccggcccggaggactgggcttccgcgatcgttccggggaccccggaaataccgactcccgaaaagccgcttccgctggacggaagtccgttcagggcgttgatcgcggtcttgtctgcggacggcgcgctgatcggcaagatcggagaaaggtcggccgagctggacgccgtcgtaatcgattgcgcgaaggcacttgtcgctgtcccaccacaagccgcgggcgatgcagcgaaggaagctatcgaggcggcgtccgccgtactcacagccgcgtgcaggaccgccgacggaaacgggctgcgcgccactggggcggaaacgctagccgagcgcatattcggcgagaagacgccagcggcgatggaagccctccgggggctgaccgtcctgcgggggctcggcgacaagacgcacgatctttggggcttcaagatcgacgagaaaacgaccagcttccgcgaacacatcttcattcgcagcatcgaaggcttgttcgccaccccggtcgacacattcagcggcgtcgatttcgcgggcgtcacgatcgagcgcggaacgagctacggcaccgtgggtgagggccatcagcggattttcgaactggtctattgcgagtcctgcggcgaagaattcatcggcggacgacgcggcgaaaccggacgaagcaacggcctcgcggtagagttgttgccgtcctccccggagctggaaagtctccccgaaactggggcaaccggaaactacgaagatctcagttatcaggacttcgccgtcttctggccgacgacgcgtcccgcgcagcaaggtgacaccaccgacgaggcctggagcgaagcgaccctcgacacccggaacggtctcgtgctcggatccgtcggcgaggggcggacaggcgtccgcgggcggttgttttgcctgcctcccaaacttggcaacaacctcaaggcaccgggctccgcagggccgaagtgctgcccggcgtgcggcatcgattatagcggtcgtagcgccaaattcaggcaatcccccatccgaagcttccggacaggcttcgcgaagagctctcagctcgtggcgaccgaattgttttccgtccttcacgccagcggtgatctcgccaaggcggtcgtattctccgacagtaggcaggacgcgtcgcgggcggcgctcgacatcgagcggcggcatcatcaggacagcagacggcagctcctgatcgagtgcctcgaagcgttcgccgcggacgttccggcggagcgggaagcgcttcaggcacgactgaacgaagccgcggcgaaaatggaccacgccgaaatgtccaaaatcctggcccggctcaccgccctcccgcagaacggcgaaggtggccgggtgccgttgagcggtgtcgtcgaaacgccggtgcggacgggccaggtggtgaccgacgaggctggcccgcttcttagccggatgatcgacatcggaatgcacccgaccgacgacgtcggaattgcccggataggcgagggagatagaagggaaggcttcgagtgggacgaactcttccgccaggaagacaagcttgtccgctggcgcgagcagcaagacgccaatgcccttcaggcggcgcgaaccgacgtcatcaccgatatgcggcccttggtggacgacgtcctgttctccaagacgtacttcgccctggaagaaacggggctgggttatccatccctgttccccgcggaaggtgccgaccacgatcgcttcgacgcgtacctacgtgttttcgccgacgcatatagggtgcgtggcaatcgttgggtcgagaaaaacgagcagcgcaaggagtggccgacggggctctcggttcaaaacaagcgggtaaaaacgttcgccgcagccgcggggctcaaggagccggcggaggaactcgagaccgtcatcgaaagactcagaagcctcggtcacggcaacgggttcatcgatccggaaaagctattcgtgaggctggtggacagcgatcacggttactttgcctgcaccaactgcacgagagtccatctccatcgtggcgtcggagtgtgcactcgctgcgccgtgaagctgcccaaggagccgacggggaagaccgccgagatccgagagcggcacttccttgcgcgcagtatcgagcacgctgcggacgccgggatcgaagcgttccggctgcggtgtgaagaactgacgggccagacgggatcaccagccgaccgcctccgtcgtttccgcggcattttcgtcgacggtcaggatggcggccaaggggatctgtacaggaaggcaagggagatagacgttctctccgtcaccacgacgatggaggtcggcattgacatcggcgcgctgcaggcggtctatcaggccaacatgccgccacagcgcttcaactaccagcagcgtgtcggccgcgcgggtcgccgcggacaggcattttccatggtcgcgacgctttgccgtagcagaagtcacgacctccactatttcatgcaccctgaagccattacgggcgacgccccgccgccgccgttcctgacgtcggatcatctggccatcccgctcagactgctccgaaagttctggttgatcgaagccttcgatatcctgcgtgacgaatgcggcgaggattacccgggcgacgacgcgcgggcggacgtgcacggcgagttcgtgccggctcacattttctacggagaaggatcgccgtggccggagcgcctcgccagagctcttgacgcatcgatcggcgtgcgcgacgcgtcggcgagggcgttgggatccggcatgccgggcagggaagaggaactgctccaggctctgacacccgagatcctcatcggcgaattgatggggctgcgcgaagcggggtccggatccaatgccaacctcgcgagcttccttgccgaaaacggcctgctcccgatgtacgggatgccgaccagggtacgagacctgatcatcggcacgaagtcatccgatatcgggcaaccggaatgggataagatcgaccgtgatctcgatgtcgccatctacgaattcgcgcccggtcagagcctgatccgcgacaagcggaagcacacgtcgatcggcttcgcagcgcctacgttgatcctcaacgatggcagaaagaacacggtgaacttcatcaccacgggcggcccgaactggtacaccgatcaggccaacatagccgtctgcgaagcgtgcggggcgaccaacaccgcaccgccaggagccgttgaggacaggcggtgctccgattgcggcaaagcgatacccgccgcgtcgttcgtcagatactacatgcctgccgggttccgaacggcgttcaggccatcgcctctggaccaggacgatatggtttctaaaccgacacgacgggaaacgtcttcggaaatggaagatatcaccgcagaccctgtagacggaacgaacatgatgttcgcgatcggggacaaggcttcgatcatccggcgcaacgatggccctgtgaacgtcaacggcggtggcgacgggttcgtcgtcagggaggctgtgcagcggagcgttctcctgagggagacgccgcccaagctctggggcaataacctcaagttccagttcgtcgtcccggacgagctcacgaacacggggaaatggtccccgccggatcacggcggccttcccgccgtcgacgaaaccgtccgcttgatgtcgaggaagagaaccgattccttctacatgagcatgcggaccgtaccgccgcttctcgcgtacgatcgtctcggcggccggagcgtgtacaagacgagcatgcgtgcggccgcggtttcggcaacgcagcttctcctgcagcgtgccgcgctcgagctggatatcggacccgaggaattcgagaccctggaaccgcgactgcggggtggtctgccattgctccagatcgcggacacgctcgtcaacggtgctgggttctcaagacgactggccggatccgtcgggacgtcctcgctggcactgcagttggtgcgctccatcgtcgaaaaccccggcgacagtttggtgtcgccgtatttcaccgacgagcacaggcagacctgcaacaggtcctgctatcgctgcatgcagaggtacaacaaccgcggctatcacggactgctggactggcggcttggcgtcggttttctgaggtcctgcctcgacgaaaactggaaggccgggttgaacggggactggagcgctcccgagatatccgactggatcgaaatcgcgtctcgatctgcggctgaactccagcagctcgatccggtcaaccgtacgatagcaacggccggaactctccaacttcccgcggttgtcgagcgcaaggggggcgtcgtgtcaaccttcgttatcgtgcaccccttctggcggctggacgacgcatcgacgaatgccgggttgctcggagaagcgctctcccatttcggaacgggaaacgtccacttcgtggatacgttcgaggcagcaaggcgtcccgtgaaggctacggagttcgcaaagctacgacctgccgaggcgttctaa

SEQ ID NO: 28107 - DNA, 1062 bp, Rhizobium acidisoli
gtgaatatagaagctatcgacctgttttgcggagcgggtgggttgtcctacgggctccaggaggccgggatcgctgtcaaagccggactggatctggacggcaagtgctcgtatccattcgaagccaacatggcgggtgccaaattcctggagaaggacctctcggagacaaccggagatgagctcgctgccttctattcccaggattccgtaaagcttctcgcgggctgcgccccatgccagccgttttcgaccctgcgcaacggcagcgatcgccagacgaataagaaatggccgctcctcaacgagtttggccgcatgatagaggcgctcgctccggacgtcgtgaccatggaaaatgtccccgtactgcggggcgaggccgtcttccgccatttcctcggacttttggaatctaacggttataacgtcttctgggaggtggtcgacgcagccgactacggcgtgccgcaaaggcgaaaacgcctcgtgcttctggcgtccaagatggggccgatccggctgctcgaaccttccgaactcggtactgagcgagttaccgtcagggaagccatcggcgaccttccttctatttccgccggagagagctcgacggacgaccgtcttcatcgggtaagagcgataacgcaactcaatctcgaacggatcaaggcttcgagacccggcgggacatgggaagattggccggaacgtcttcgtctggcatgtcatcggaaaacgtcgggctctagttacaagagcgtgtacggacgtcttgagtgggacaagccgtcggggacgatcaccacccaggctcataacttcgggacgggcaggttcggccacccggaacaggacaggccgctgtcgctgcgcgagctcgccatactgcagtcctttccggaacactaccgtttcgtcgacgagggtgaagaggtcgagttcacgccgctcggccggctcataggcaacgccgttccggtaaagctcggaaacgcgatcgggcgttcgatcgtggcgcatctcgaacattacggagacgacaggtccggcacgaactaa

SEQ ID NO: 28108 - DNA, 2565 bp, Rhizobium acidisoli
atgcccgccgtcaccacgcttaccggcgcagactggaacgtcaggctctgcagccattacctctcttccgacggtccttacggcggcgtgccgatgacattcctggacgcgacggttccggagctcgcgacggcgtcgggcgaagcctggtcgggcgacgaggcgctgaactccttcttgagcggattcggtatcggcgacgtcacccgatggctcggcagggacgattacccgttgcgtgataaagaccggcctccgtacttccgctatctcgtgctgacttgcgttatcgcggtcaacgacatcgccggcgtcgaccgcgggacgcataacttcaggcgtcggctcggccagaccctgggcatggaggagctccagaccgtcaacggcgtgaaccgtctctggcgggcactcgctgactggagcgctaggcagaggcgtaacggtctggcggtgcgtgaagtcgtattgccggactacggtacgatgaacctcatcgggtatgcggtacgtatggctttcccctcatggagggatcgcacccagttcacagcgatccttaggggcattcccgaagcggtccggatttcgccgggaaggctcgtggcagagctttccaggccccaccggacgctcgacatccccaaagcgatcgtcgaagcactaaccgatttcggcacgcggcgaacgtccggccaaaccatgctcgacggacatcgtttctggtcactggtgaaaagtattgaggcagaactcgccgtggaagccggggaggcccctcatcggcgggtttccgtggaacttcgtttcggcggctacggacaggacgaacccgagttccgcctggtcgataaaacggcaggatcgttcgatgcgacaccggagggcgacggatcctggctcgacacaatggcgagtattccgcgcgatcctcgctccgccatggcgaaagcccttgctcggggatacgcgatattcaaacgttctgccgggtgctgggtttgtgacgacgccgggatagacaccaacgacatatgcatgatcgtggccgccgacggctccgcgccgcgcgcgtggcgcttgatggcggcttggagcgagatcgggccggggtggcggctttcggagcgcgtggacggatccgacatcgtcaggctactcggaatcaacgatccgggggtccgtgagctcgatcggccgaaactggtaggcggcgtttcgctgaagcgcggcgtatatctcggccgtccgggcttcctgccccgcgtcgagcaattcggtgcggggaccgtggcggcaacccgcctcgtgggctcgcacggtgaactcgcggtggccgacgacggcgtgatgacggcaacgcagccgctcgacggtatctggcgcgtctccgtcgcccaaggcggcaattccctcgacattccgttcgctcttgaacgcaatgccgctgagcctgccgtatatccaccgcctccacgggcggacagatggcggccggaggaagagctgagaaacacggtcccggcatccgttccttgtcggggaacattgtcggagtccgggtcggtcgagccgacagagacgatttctgctctttgtgaggcgatcgtttcgcgcgcgggctccgggtggcgtgacggcgatctcgtcggtctcgtcgaaagtgcctacccgaaatcaccgatcatctgggatattatacgatcattccaggaagccggctggctggacgcctactcgtcgacgagctggcgggcgcggttctggcggtgcagaccgcccggcatcatcggcatcccgggtggcgacgcggtggtggacggggcaacgggcagtgcggcgctcgatcgacttcgtgaaactgccaatcgcctcggcgtcgcggtcctggtgcacgacggtatatctccgaactccttgtcgacggtccgactttcgggacccggtataggcaagctctccgaagctttggcgtggccgatgacggtgctggagggccttcccagcccgtcggatcagtggattgaggacagccgcacgccagagggtcggattcgtacggcgatttggtcacacgaggtcgggctttttctggaatacaaccgcgatcccatgccgatcacggtcgaatgctgggcgcgagagcggcgcgacgagcccgatctttacgtggtccgggatcggtcgggcgtgttgcggaagacccggagccgcgtagccgctgttttggaaggacaccgcctgaatcgcgtcccgctttttagcaagcgggaggatcgcgtcgtcagaacccggaaatcggggcacttgccgctaccgatcgccagggcgatgagatttcgctccctccgggcttccggcgtctcgccgggcgaagggccgaaccgggagtactcctattcgccagatcgggagatcgagatgtggcttggaaattatctcggcgcggctttcgagacgggggcggcgagccgttccggaaccgccgcctcggaagtcgaatggaggcatcgaggtggacgacgccccgcctggaacgcatacccgatcggatacggtagatga

SEQ ID NO: 28109 - DNA, 2067 bp, Rhizobium acidisoli
atgacaacgcaatggtatttgggtcgcaacgcttacgacccgcgcccgaaccgactacatacgcggatccagccacgggcgttctcccgcgatggagcatggcgggtttacgacaagtggatcgactacttccctaccgagggtaaggtattttcgccgaaccatccgcaaggcgcaagtgaggcgttcttcgctttcgacgtcaccgaagtcaccgacctcacgaagcaagacaggttcaggctgcagaccctgcggaaagtggaggaagttctcgactattcggaccgcgatcccgaggacgttcgccgaatcttcgttgaacagggcgtttcaggacgtaaggccgacagggagaccgtcgtcgtcgtcctaccggatgacctatgtgtccgcatctcgctcgtgcgcgatgggaaggggaagaagagcgtggcggagcttatcgacctggccgagctgcctctttattcgttcgaccgctccttgttcgccggggacaggatcgacggctgctggtattccgttccggacgtcacggtcggaccggtgcagggcacgattgactggtcgctcgacaaggattttctggcttccctcttcaagcagctgaagcgcctttccgcaccggaaccgggagaactcccgtaccccgcaacaaggtcccaaatccacgcgttcctgaccacgctcgaccgtcacggtcttctaccggccgacgaggaaccctggcgctcggacggcgaaagggttcgtcgtctcgcgtccgacatgcgtttcgaagtcgatgaaatcgaagaactcgtgcacatcctgagttctctcgcaccagtcgaggaaaagctttccgaggccctcgacaagaggcgcagaacgctcgaagtcgaacttgccgcgagcgtcgaggccgatgtcagagcggaagtcgaaacgcgttacgaagctctttcggcgcaaaacacggaactcgacgagacgctatcgaaactcaccgtcgagaaggcgtcactcgaacgaactgtagccgaactggccgaccgccgcgatcgcacgcaacgggaaatccggtcattgaccgccaatgtagcgtctctgatcgaggtccacgaggacgggcgagaggtcaaagccgatcgtctaattcaagatatcgagaaggtattgcggggcgaaaagcctgcggtctcgcgcgtccttcacgggccaccgcgttccgaattgccgactttcgattacgatctggcccctgtgccatgggaacgtctgaatcaggaactaggtgctgcagcgtcgcagcacgggttcgagccgcgggatatcgagacgctggatctcctggcgagatcgggggaggtccttctcctttgtccggacgtcgccggcgctgtcctccggtgctatgcatcggtggtcgcacaaggcggtttcgccgttcagtcgctggatccttcgacgatcggctacgacgatctatggcgctctcctgcccgggggacaccgaccccgttgtcgcgtgcctgggccgcttgtgcgaacgacccttcggtggcccgaatggtactgttggagggcatcgagagaacgccgctcgacctctggatacacccgttgatagcgacgctgcgcgcacaggaaaggcccaaaaacctcctggtgttcctatccatggctactgcgactatcgaccgcgaccgcagcgtcgcaaatctttcggagctcgtggtgcccttcaagacgcaaggccctacggaactgaaccctgatttcttgaagaacctgctcggagacgaggacgaacccggactgtggttcgatttcagggccaagcccgcggtcgcccgaaacgaaatcggatccctgatgagcgcggagttcggtccatccggaaaaaaacggatgccgcttgcgctccgggcttctgtcgcagcacgcggtacaggaattttcgatgtcgagaagactgtccgcattctttgcgagaacctcgacgcttcgccggccgacgctgccgatcgtatcgggagcctcgaactcggcagggaatacctgcgaacgctttcaaattga

SEQ ID NO: 28110 - DNA, 4881 bp, Rhizobium sp. Leaf383
atggagatgctgagtaaaggcacacggcgcggatgtcccggcatcgtcacttccggtacgggctcgggaaagacggaggcgttcatgcttccgattctggcgaccattgcggaggaagccatcggatggagcgctccgcagccggggtatcttgctaacgcttggtggagggacgagccctcagagttcagactacaccgggaaggagaggcatcggaccgcccggcggcgatgcgagcgcttgtcctgtatccgatgaacgcactcgttgaggatcagctcagccgcctgcggcggacgttgacgtcgccagaggcagcggcggtaatggacgaacgattcgcgggaaacaggatcttcttcggccgctacacgggagctagtccagttgccgggcatctcgttcatccgcgccgtccccacgaccgcaaggagcaggacgcagcagcaagaagggtcgcccgggtggcggcggcgatgtccgcctacgaccgcgatcaggaactggcgagggcgcacgaccggaaccattctgaggacgatccgacgcgatacctttttccatccgtcgacgacgccgagctcgtcgccagatgggacatgcataggacgccgccggatattcttgtcaccaacgtttcgatgctcggcacgatgctgtcccgggaagtcgaaggacccatgttcgatcttaccagagagtggttggagagaaacggggacagctacttctttctcgtgctcgacgagctacacctaatccgcgggtcttccggcacggaggtttcggggttggttagaagcctcatcgcgaggttgggcctagacaggccggaacaccggcataagctgcgcatcctggcatccagcgcatcgctccctctcgagggcgatgacagggagcgcagcctcagataccttcacgatttcttcggtcccaatggcacgagcacgacatccgacgatcccggcgcggcaggacccgaggagtgggcttcctccattgttcccgggacccaggagataccaagaccggagaagtcgttaccgcttgagggtgtcgcgttccggtcgctgattacccatctgtctccggacggcgcgcttatcggcaagatagacaaaacgtcggacgagctcgatgccgccatactcgaatgcgctagggcgcttgtcgtttcgccgtcgcaaagtgcagccaatgccgctaaggaagctatcgaagcggcgtcagccgtactcacggccgtttgcaggaccatcgacgggaataaactccgcgccaccggtgccgatgtacttgcggaacgtttattcggcgcgacgacatccgacgcgatgcaagcgctccggggcctgaccgtcctgcgcggactcggcgaccaggcaaacgacctttggggcttcaagatcgacgacaaaacgacgagctttcgcgagcacatcttcatacgcagcatcgagggcctttttgctactccggtcgaattgtccggcaatgtcgattttgtcggcgttacgatcgagcgcggaacgagctacagcaccgtaggcgagggccaccagcgtattttcgaattggtgtactgcgaatcatgcggcgaggagttcattggcggccgtcgcggcgaaacgggacggagtaacgggatcgcggtcgagttgctgccctcgtccccggaactcgaaagtcttccggagaccggggcgaccggtaactacgaggatctcgcctaccaagacttcgcggtcttttggcctactacgcgtcctgcccagctgggcgacgccattgacgaggtctggagcgaagcaacgctggatacccggaacggtttcgtgctcggaacttcaggagagagcagaacaggcatccgagggcgcctgttctgccttcctcccaagctcggcaataacctcagggttccgggatccgctgggccgaagtgctgcccggcgtgcggcatcgattacagcgggcgtagtccgaagttcaggcagtctcctatccggagctttcggacaggtttcgccaagagctctcagctcgtggccaccgaactgttttctgtcctccatgccagcggagatcttgccaaggcggtggtattctcggacagcaggcaggacgcgtcgcgggctgcgctcgacatcgagcggcggcaccaccaggatagcaggcggcagctgctgatcgaatgtctcgaggcattcgccgcggatgttccggcggagcgggaagagcttcaggcccgcctgaacgaggccgctgcgaaaatggaccatgcccagatgtccaaaatattggcccggcttacagctcttccgcaaagcggggagggtggccgggtacctctgagcggcgtcgtcgaaacgcccgtgcggacgggccaggtcgtgacggacgaggcgggacccctcctcagcaggatgattgctatcgggatgcatccgaccgacgatgtcggtatggctcgcataggcgggggggatggcagggacggcttcgagtgggacgaactcttccgtgaggacgacaatctcgtccgatggcgagagcagcacgactcgaacgcccttcaggcggcgcggaccgacgtcatttcggacatgcggccgttggtggacgatgttctcttttctaagacctattttgcccttgaggaaacggggcttggatatccgtcacttttcccgtcggaaggagccggccacgatcggctggatgcctacctacgcgttttcgccgacgcctacagggtgcgagggaaccgttgggtcgagaagaacgaacagcgtaaggagtggacatcggggcagtcggtcctgaacaggcgcgtgaagacattcgccgcagcggggctgaaggttccggcagaggaactcggaaccgtaatagaacaactggcaaaactgggtcacggcaacggcttcatagacccggagaaactttatgtcaggctggtagacgacgatcacggttactattcatgcatcaactgtacgagagtacatctacatcgtggcatcgggcgttgtacgcgctgcgcggtggaacttcccgaggaagtgacgggcaaagcggcggaaatccgggaacggcacttcctcgctcgcagcatcagacacgccgcggaagcgggaatcgaggcgttccggctgcggtgcgaagagcttacgggccagacgggatcaccggcagatcgacttcgccgtttccgcggcatcttcgtggacggccaggatggtgcccaaggcgatctctacaggaaagcgcgggagatcgacgttctttccgtcaccacgaccatggaagtgggtatcgatataggggctctgcaggcggtttaccaagccaacatgccgccgcagcgtttcaactaccaacagcgcgtcggccgtgccgggcggcgcgggcaggcattttcgatagtagcgacactgtgccgtagcaggagtcacgatctacattacttcatgcatcccgaagcgatcaccggcgatgctccgccgccgccgttcctgacatccgatcatctggccatcccgcttaggctgctccgcaagttctggcttatcaaagccttcgatatcctcaggatggaagacggagaaaattacccgggtgacgacgctcgtgccgacatacacggggaattcgtgccggcccatgttttctacgaagaaggctcccgctggcctcagcgtcttgccggggctctcggcaagtctatcgccctgcgagagtcctcggcgagggcgcttggagccggcatgcccggcagggaagaggagttgcttcaggctctgacgaccgagacgctcatcggtgaactgatggcactgcagaacgctggggcctcatccggcgcgaacctcgcgagtttcctcgccgagaacggactgctgcccatgtacggcatgccgacaagggtacgtgacctgatcatcggcacaaagtcgtccgatatcggacagccggaatgggataaaatcgaccgggatctcgatgttgcgatctacgagttcgcgcccggtcagagcctgatccgcgacaagcgaaagcacacgtcgatcggcttcgcggcacccgcgctcatcttggctgatgtcagaaagaacacggcgaggttcgttcacaccggcggcgcggactggtataccgatcgagccaacatggccgtatgtgaagcatgtggtgcgaccaacaccgcaccgccagaggcagttgacgacaggcggtgctccgattgcagctgcatcatacctgcagcctctttcgtcaggtattacatgccagccgggttcaggacggcgtttcgaccctctcctctggaccaggacgatacggtctcgagaccgtcccgccgggagacgtcctcggagctggaagaaatcacgtcccatcccgtagacaaaaccaatatgatgttcgcgataggggacaaggcttctatcattcggcgcaacgatggccccatcaacgccaacggagacggggaagggttcgtcgtcagggaagccgtgcagcgcagcgtcctcgtgagggaggggcgcccgaaactgtggggtaacaatctgaaattccagttcgtcgtaccggacgaactcacgaacccgagcaaatggtctccaccggagaacgggggattgcccagcgtggacgagaccgtccgcttgatgtccagaaaaaggaccgactccttctacctgagcatgcgcatcgtgcctcctcgcctggcctacgaccgcctcggcggacgcagcgtatacaagacgagcatgcgtgcggccgctgtttccgcgacgcagcttctcctccagcgtgcagcactcgaactggatatcggtcccgaggaattcgagaccctagagccgtga

SEQ ID NO: 28111 - DNA, 2562 bp, Rhizobium sp. Leaf383
atggctgcggtcactacgcttaccggtgcggattggaatgccaggctctgcagtcattacctttcttccgacgggccttacggcggcgtgcctatgacattcttggatgccacggtaccggagttggtggcggcatcgggcgagacgtggtcaggcgttgaggctctagactcctttttaagcggcttcggaattgaagatgtcgttcgatggctcggtaggcgcgactatccattgccggacagagagaggccaccttacttccgttatctcgtattgacctgtgtggtcgccgtaaacgatatcgcgggcgttgatcgcgggacccacaatttcaggcgcaggctcggccagaccctggggatcggcgagctacaggctgtcgacggggtaaatcggctttggcgagggcttgccgagtggagtgctaggcaaaggcttgccgggcgaacagtacgcgaggtcgtactgccggattacggctctatgaatctgatcggctatgcggtccgaatggcctttccgtcgtggagggaccgcacgcagttcacagcgatcctaaagcgtgtcccccagccgatccgactctcacccggaagacttgtacgggagctctccaggacgcaccgaacattggatttccctccttcgatcttagaggcgctgagcgattttgcgacgcgactgaggtctggtcagacagtcctcgccggacatcgcttttggtcgctggtcgaaagtatagaggccgaactcatggccgaagccgggcagtccccttacagacggatttccatagagcttcgtttcggcggctacgagcaagatgtgcccgagttcggtctcgtctacggagatcggcgttctcatcacgagacaacggatggagccggatcgtggccggacgcaatcgccgtcatcccaaaggatcctcgctccacggtaggaagattcctcgctaagggatacgcgatattcaagcggtctgccggttgctgggtctgtgacgacacgggggtggacgtcaacgacatgtgtatgatcgtagctgccgacggctccgcgcctcgggcttggcgcgtgccgacgacttggagcgagatcggacggggatggcggatctcggaacgagtcgacggatccgacatcgtcaggctgctcggcacgggcgattcggggattcgggagctagatcggccgaagctggtaggcggcgttctcctaaagcgcggcgtgtatctgggacgacccggcatcctccctcgcatagagcagttcggtgccgggaccttggaggccacgcggttggtggggtcagaaggtgaactcgcattaagcgaagacggcggaatgaccacaactcttccgctagagggtatctggcgcgtttcggtttcccaagctggcgaagtcctggaacttcctctcactcttgaacgcaactccgcggagcctgtcgcttatcaatcgcctccacgggcggacatatggcaggccgaagaggaacttagaagcatcgagccagcatcgcctcctcatttggtggccgcttcgcgatcgggaacctccggaccgtcggaggcaatttgtagccttgcagaggcaatcgtttctagggcaggtaccgggtggagagatggcgacctcgttgcacttgtccagagcgtttacccgaggcatggggtctgggatatcataagatctttccaggaggcaggctggttggacgcctactcctcgacgcgctggcgagcgcggttgtggaggtgccgaccacctggcattgtcgcccttccaggtggcgacgcggtggtggacggtgctttgggcacggcagccctcgaccgactgcgtgaagccgccgatcgattcgatgtcaccgtccaggtacacgaagggatgtctccagattgcctgcgtactgtccgacttaccggaccctgcttacacgacctgtccgaaaccctggggtggcctatgacttcactgaatggacttccgaggccgacggatcagtggatcgaagacaatcgcacaccggatggtaggatccactcggcaagctggtcgcacgaagtcggacttttcttggaacacgttcccgacacgatgcctgtaacggtggaacgctggtcccgagagcggcgagacgagtccgatctttacgtagtacgggaccggtcgggtatattgcgcaagaccaggagccgcgtggccgctgtcttggaaggtcaccgcctcaaccgcatcccgattttcagcaagcgcaaggatcaggtcgtccggaacgggatgtccggacatttgccggtatcgatcgccagagcgatgagattccgttcgctgcgagcttcgggagtgttctccggcgatggacgcaataccgagtacatctacttcccggatcgcgaggctcaaacttggcttgagaagtatctgggagcggcccttgatgtcggggccacgggccctctcggatctaccgccgcggaagtcgaatggagacaccggaggggacggcgtccactttggaatgcacgtccgatcggatcctttaaatga

SEQ ID NO: 28112 - DNA, 2067 bp, Rhizobium sp. Leaf383
atgaagacacagtggtatctgggacgtagtgctttcgaccctcgtcctaaccggccctacacacgagttcagccacttgcattttccaatgacggcgaatggcgcgtttacgacaagtggatcgatcacttcccctccgaaggaaaggtcttctccccgaaccatccgcaagccgcgagcgaaggcatttttgctttcgacgtcacggaggtcattgatgtgtccaagcaggataggttccggctgcagacattgcgcaaggtcgaggaggtcttagactactcggaccgcgatcccgaagacgttcgcagaattttcgtcgaacacggcattccgggccgtaaggccgaacgggaaaacgtcgttttagtccttccggacgatctatgcgtccgcatttcgctcgttagggacggaaacgggaaaaagagcgttgcggatcttatcgatctcgccgagctgccactttactccttcgatcgtagtttattcgccggggagaggatcgacggctgctggtactccgttccggacgtaacggtggggcccgtgctgggcaccatagattggtcgctagacaaagacttcatcgcttccttgttcaagcaactgaagcgtctttcggcgccggagcaaggcgaacttccgtatcctacaacgaaagcgcagatccacgcgtttctgaccacgctcgatcgtcacggtcttctgccagccgacgctggaccttggcagtctgacggcagccgggttcgtcgagttgcgtcggaccttcgcttcgagctcatcgaaattgaagaactcgtgcatatcctgagttctcttgagccggtggacgagaagctttcggatatactggaggcgagacggaaagcgatcgaaatcgagattgcggagcgcgtagatgctgatgtgcgagcggctgtcgagacgcgctatcggtctctgttcgaccgaaatgtggaactcgacaatacggtttcggacctttcggttcgaaaagcttcgctggagcaagatgtcgtggagctcgccgatcgtcgcgaccgcacgaaacgggaaatactgtcgctgaccgctaaggtaacgtctcttgtcgacggacgggacgacgcgcgagaaaatgaagtacgggatctggtcagagatatcgacaaaatacttagaggtgagaagttcgtgctcccgcgcgtaagtcacgagccgcctggttccgacttgcccatgctcgattacgacttggccccgatatcttggaacaatctgcgtcaggaattgggcgctgcagcgtcgcaacacgggttcgagcagcgggatatcgaggcactggatctcttggctagatccggggaacttgttcttctttgttcagaaaacgccgtttctatccttcgatgctacgcatcggtggtctcgcagggcgggattgcgattcaatcgctcgacccctcaacgatcggttatgacgatctgtggcgttcgcccgcccggggggcaccgaccactctggcgcgtgcttgggcagcttgtgccaacgatggatcggcggctcgaattgtcctcttggaaggcattgagcgaacaccacttgacctttggctgggcccgttgatctcaacgctgcgcgggcatgcgagaccgcggaaccttctggtgttcctcagcatgggaaccgccattgtcgaccgtaaccgaagcgtgtccaatctaccgcagctcgtggttcccatgaagacgcggctgccttcggaactgaacgagcaattcctgaagcacctgctaggagctcaggacgaacccggactgtgggtggatttccaggcgaagcccgtcattccttcgaacgagatcgctgttttgatgagtgccgatttcgggccgtccggagcgaagcgaatgccgttggcgctacgggcttccgtcgcggcaagcggcaccgggtatcctgatatccagaagactgtccgaaacctttgtgaaaacctagacgcttcgccttccgaccccgacgagcgcattgcaagcctcgaatacggcagggaatacctgcgatccatttccaattga

SEQ ID NO: 28113 - DNA, 5415 bp, Ruegeria sp. ZGT118
ttgcctaacgccaccccgaacgaggtgctcaagtacatccaggaagcatatcacaaatactatgacagcgcgttctggatgcgagacggggcgctaatggcggagcgccgtgaactactcgcggaacccggccttaccgctcaagaaatccttctcgaggctgtattagcgtatccatcggcggtgcctgtcgaaaaggcttgcgaggaagcgggcctacctccgagcgtggcggagcatcttgggagagtggtatttggtgcgaactactccctcaggaagcaccaagcccagtcactagtcacttcattggcaccgaacgatgcgccgaccaggaacgtcgtggttacatctgggacgggttccgggaagaccgagagtttcctcgtgcccgttattgcgaggctcttggctgagaggctgggcggtgtcggaagcggaaccttgaaccaatggtgggaacgaccttggtcccaagagacgcattggaacgggatccggtcggggattagcgggggccccacgccagctgttcgtgctttgctgctctatcccaccaacgcgctcgtcgaggaccaggttgccaggcttcggcgcgctgctttccgcgcgaaggccatccacggccagccgctcttctacttcggccggtacactggggcgacgcctggcggaacgtttttccctagcgggcaactcaaagcaggcgaccggcaaaggatccgcgaggttgcgaaggaccttcgaaagattgctgaagaagcagagcggctccgcgaccgggacgaggagatccgcggacaattccaagatccgacctgcggcgaaatgcttacgcggtgggacatgatagacgcgccgccggacatcatgatcaccaacgtctcgatgctcaatgtcatgttgatgcgggaccacgaggcgccgatcttcgaggcgacaaagaactggctgcgctcctctccgaacaaccatttttccctggtcgtcgacgagcttcacggctaccgcggcaccgcgggcacggaagttgcactcgtaatacgcaacttgctcctgaggcttgggatggaaccggggtcaccgcagctcaggtgcctggggaccagcgcctcgctggatggagaagaaggtcgcgaatacctccagcagttcttcggggtggataagtcgacgttcgccgtcttccccggagagccacgcaaacccagcgtcgagcttcccatcgacgaatcccatgtcgcggacaaggccgacgacatcatgaggggtgatcgctcagctatcgaccaagtgttgtcgcggttttcggcacgcgatgccctcggctcggcttgcattgccgccggacggaaagacgacggcggcgttgcgccggcaagggtctccaaggtcaaggagaagcttttcggtcagggcgcagcggatacgtcgttcgctgctcttcttcatgcggctgcaacagaacagtcggtttctttcacagaaccgaaaccttctttccgagcgcacatgttcctccggcagatacagggcatgtgggcatgctcgaaccccgcatgcagcgaagtggaggagcgatttcgctacgaaggacggcagattggaaagattttcaagcagcccgctatcaagtgtccatgcggtggccaggtactggagcttctctattgctatgattgcggagaggcataccttgggggctacgttacccccaaggttgacgaggacgaggaaggcgaagtcttcttggagtccggtccaacggacctttcgtctaccgtaccgggcctggtcaacgaaaggccacatagccgcttccgttggtattggcctggaaagttggttccttccggcgtcacgacaagttggcaacacaagaacccggcgacaggcaagtcggttaccttcggcttcgcgcccgccgtataccgcccgctctacggccacctagccaaggcgcaacccggcgaaactcccactggtacgcttttccaagttccaaaaggcgtcgatgtgcccgggttgccagggcgctgcccagcgtgccagtcatcgaagagccagagccgcatcctaaaagcctttttctccggcagccgtgtgaatagcccgatccgggggctccggacaggtttaaacgtgacaacgcaggttatcgcggatcgcgctacgtcgatcttgggctcagaggatgttgccgctccaatgatcgcctttaccgatagccgagacgacgcggcagacgtggcggccggcttggagttgaaccattttcgatcgctcgtcagacaactcgtctttgccgagctggagccgaagcaggtgttctcgatagacgacgcgaaagaagtagccaagaaagtacaggcagaaaacgatctagatgctcgcgagaaggaaatagctgcggccatcaacgcgtttcaccccgacctgatgcaatccttgctgctagacagcctgcgcatggcaaacgagagccagcgcgcccgcatcagggagttttccgagaaagcgctgggaaaccctgctgttgcctggagtcaactcgtttcaggcgttcttgcccgcctactggagcttggtgaaaacccgcaaggaaccgatgcgtcgcggcaaactgtcgacaacgagccttggtggcgctttttcgacgaaacgcggcccagcggtgtcgcgcgcttggacgcctcggtcgaagaagctggccgccgcactatccgcgaaaacctctcttccctcgtggccgccgcgttgtttgacgggggcggtcgcgacctcgaaaccttaggcattgcgtacgtccggccgattggagaattctccgcaaagctgggcttggagcgtagcgaagctgagtgcatcctttcgaacgttgttcgcctcctcggacaagctcgcctctacagtggtagtggcagtagccagtcgagcacgaataccccggcaggggtacgaaaatacttggaaaaagcggcaccccgcctcaaccgcgacccagtcgtactagcagacgcgattggtgacctcttgaaaaccgagggcatcgcgaacgagaactgggttctccaggtaacacgctacgggagcctgaaactagagcttgtcccaatagaatctgggctggcgcgctgcgatcgctgctcgaggatctcggccaataccaccgtgaaagcgtgcacctcgctaaactgcgagtcggagagcttttccccgatcgatcaacccgaagacgactactaccgctggttgtccggtgaaaaagcccaccgtctgcacgttgaggaacttaccggacagaccaagccgctatcggaacaacgcaggcgccaaagactgttcaaggaagccttcctcgaaggcgaagagccacgagttcacggcatcgacgtgctgagcgtaaccaccaccatggaagtgggggtcgacatcggctccctagaactcgtcatgatggccaacatgcccccgcaacgctttaactaccagcagagggtcgggcgcgcgggtcgcgcaggacagagcttctcgtatgccctcactatttgtcgcggcggctcccacgacgacttttactactcgaatcccgaacggatcaccggtgacaccccaccacaaccctaccttgacttgtcgcgcccggagatcgtcaggcgcgtggcagctgccgagacactccgaagggcattcaatgctcttgccgaaccgccaagccgcagcgcaagtacccatggatcatttggtgctaccagtagctgggagtcaaaatacaaggcgccggtttccgagtggctggcaacatcacctgaggttaccgaggtcgtcgatgcgctatgcctaaacgcccctctttcgacgggtaaacgcgattcaatagaggcctactgccgcgaaaagctcgccgaccatgtatccgagatcgtgaagagtgatcgttatatccaagaagaactgagcgaacggctcgcgacggcgggaatcctgccgatgtttggttttccgacccaaacgcggagcttgttcggattcaaacatggcgcatctgttgacgagatggtcatttcggaccgtccccttgaccacgcggtatgggccttctcacctggctccgagatccccaaggacaagcagatccacgtcgcgtgtggtttcgagtacaagcggcaggtcggcggcaggatcatttcagaccctgatccgctgggagaccctctagtcttttccaagtgcgaggaggaaacctgcggaaacatcatgcaaggcgcgtccgaaacttgcgatgtctgtcagtcaatggcatcgcccttcaatctctaccagccaaagggattcacgacgaccggcaggccaagggattacgacgggcaacgtcaaaggggacccgcgcttaatccacctgttttggcattcaagccggactactcggccggcttcgacgttggaccgatgaaagtagctttgacatcggacgaaccgattgcgctcgtgaacgacgcaagcggcgagatgttcaacttccggcgcaaggtaaattcgatcatcgtcaacgaagagcacttctacagggatgatccaccctaccgggatctccaaggcgagcccgaaaccactggcgcaatcggggcggtattcaacacagacgttatgacgcttttgctcggaagcttgcccaacgtcggatacaacggcgttctcgacatcgataaccaacctgcggccagggcagccttggtctcgttcggcgaattcgtaaagcttgccgccgctgtcgagctcgacgtggatccttccgagcttcgcgtcggtacccagcgatggcgaacgccgcattgcgtgacgatgcaaatctacgtcgccgatgccctggaaaacggtgccggctacacgcggcatatctgcaacccgaagcgtctccgtgccttgctgcagcgacactacgacgtgcgaagagtggagtgggaggccgcagatcatgccctttgcgatcgatcctgtccagactgcctgagaaattacaacaatcgtttcttgcacgctgcgctagactggcgactcgccctggacgtcgcggagctcgtacttggccatcccctcgacacggatcgctggcttgcatcctctcagaaaatcgggagtcgcgtagtcgaactctgcaattcggaggacggcgacgtcttcttggaacaagcggacagcctcttcgcagtcacacgtttgaacccaggtcgatccctcgttctttcgcacccgctttggtacacaaccaaggatggacccgcgcaggaccgccagcacgatgccaagctaacgctgcaggcgaactatgggccagcccatcaagtcgacttcgttgatatccgggatctcgcggcatccccgcagacctacgtcgtcaagctactggaggcgtga

SEQ ID NO: 28114 - DNA, 1419 bp, Ruegeria sp. ZGT118
atgttgaaagcaggcgaactggctgcgacgagcatggtttcgaggcctcgcgtctacagcatggtcgatttgtttgccgggtgtggcggtctgtcacttggcttcgagaatgcagccttcacgcctgtattcgtcaacgaactccacgacgatgccctcaagacctaccttctaaatcgtcaccacgagctaggcgggatgcgtttttcggacaacccggcgctccggtgcaatgatgcccacgacctgaaagatgagcgattagagcagatggtggcggacttgagcagtatccgcgagatcgacttccgcttcgaccggacagcgaacgaggagagcggcggtggaagcacgctcgacgtgctcaccggtggaccgccgtgccaaggctattccgggatcggcatccgccgctcctacgccgtggatcgtaaggtcatcccgtccaaccacctctacggccggatggcggagatcattcgccggcttcgcccgcgcatcttccttttcgagaacgtgcgcggcctactcaacgccaagtggacccgcgaaggaggcgagccgatttggccggaggttcttcgtgaattcaaggagcatatccctggctacgaggtgcgctggtcactcgtccatgccaaggactacggggtgccgcagaaccggccacgcgtgctgatcgttggtatccgcaaggacatcctcgccgatgccaagaagaagggcgttgagaatctagatgatacggctgacaccgaagacgctgtaaaatgtggctttctgccggcaggttgtcctggcgaataccctgatctaggagaacttcttggcgacctcctcgacgatgacgtggaagatattctattgaaccagtcctacgcgccggggccgttcgagaccaagagttacccccgggcagcgaaaaagggcacgatccaagagaggctgagaaaggcgccggattggtacccgcaccgaggagtccgactgaccgagcaggaatatagcaagcacaagtgggccgtggtcgataagtttcgatacatgctcggccacaacggcgagattccggagaagtacaagacgcgcaaattctcgcagcgcgtcttgaaggaaaagtggggcaacgccgaacccaacatcaccgcgacttccctgccggacgattacgtccactaccgccagccgcgcatcctgacggtgcgcgaatgggcgcggctgcagctttttcccgattggtaccagtttgccggcaagcgcacgacgggaggcctgcgtcgggccggtaagcccaccgagggcatttttgaccgcgaagtgcccaagtacacgcagatcgggaacgccgttcccgtaggcctcgccgagcgtgtcggcaaacacttcaagatgatcctcgacgcggcagtcgatgcttga

SEQ ID NO: 28115 - DNA, 3081 bp, Ruegeria sp. ZGT118
atggaagaaaaagcttactggtctgtcgaaatcgacaccgagtatgcggcggcaaactccgcgcttaacaactatttttttcgcgggcgatttgaaatgctgccagtctatcttgatctggagggagacgcagaaacggaagtagccgaggctctcgagattgagcctgatgaactcggggatttcgtagggttatgcgtttcacgatcacttcggttcgatcgtgcggacccttatgtagatcataccagctggttgaaggactggagcaaggctggccggcgatccccgcctcccttcacggcacttctatgcgctttgtccatcgccgccgagagaatgggtgccgatgagaacttctcacctaacaactactacgagcgctatttcgagttgcttggggtaaagggcgcgacaaaccaacaaaaacttaagcagtacgcgaaaagcacacgccagttttggcgagcattgaacctttggctttctgagaacgactacttgctcggaaggccaaccgccaaaccgctacttagccattggcagtacgccagctatgctctctcgcaagctcttgttagagacgcagaccgcaggcgatttgaaggtctctttctggcgtacgatttgacgcctggcgacccaattggggaggcggagatggcgctcctcgtgaatgactggatgacctcgcatgggtcatccggtccaactgcttggctcaagaaactgtggaccgcgaacgagttgagagagcgcgttgtcgccgccgcgcttgacatgttcgaaagctgggagccgtcagcggccgtaacgccagggcaagcgaagaaggcgcggcttcagtggcaactaggcttccccgggtttcctagaaagagggtaactctggcgctctcggtgacacgtggtggtaacgccgaaccacttcgcccaatcaaaccggagagcattcttgaggatgagttcgttctggaagaaggcgagccgggcgtccaattcctcggaccgatcggttcgataaacctcgaccttctactgctacaatcgcaaactttcatggggcaacaaagcggcgtcacctacaactacattgctaagcccatcgtcgtgttttcgcgctctgcggaaggcaccatgttcagggaggttacccgtgcaagcctcttcgaggagcacgcgatcctgtgccacgaagcatggctcgaaaaagtcgaaggccacctcgccaagtgcgcgcgacccgggcatgccgtgttgcaatcgtccgacatgccggggattccaaggggttggtgcatcctgagaggggtcgaaatcgtgcgctccgtggacaacgcacacgataatttccatgccctgaatccgcttgatagcactgctgcgatcgcttgcgttggaggcctgaaactcggccacggaacgtggcatgttgatgcaaaaccgcacgtcgaagcaaaatccgaaaaaagcgatggtaagctcgagatcctgcatgagcgattcggccaagacgacgagatcgtggcctcatcgaaagcagtgggtgacttcatcgaactcgatctagatcaagtcgaggtcgcaccgggaaccaacctgcgggccgtggtgaaagccggcaaagctgaattggcggaaacggatttttcgttaagaagtgcagacgtaccacgcccgctcggtggaaaacgcttttaccatccgtttgccagcggccaagggctctccctgaattcagaaaccatctccttgagtccaggaaacggactggagggatgcaccatcgtgggaaggcttaatgttgagccagatcaaagcgtttcgcctcaaccagaaacttcctcgaacaagattcccgaggggatggcagaggccactcccgaggtcgattggaatcattcgcaggacgcggtccaccaagccgctgggagttgcgtgatccgcggatatcactactgggtctacgagccgttcgagaagggggacgatcggttcgaagccaagatggccgagtgcaaagactgccacgttcgcgcactgtctcggtcgcgggcggtggcgaagaaaaactggaaaaagagcaaacaggcacgatatgggacaccggttcggaggcaaacggccacgcaaggcgcgatacagcaagagcacggcggaagcttacctcagactaactccgtttcgcttgacacggttttcgatgctctctgctacctcggtcaaggcagttggcatgcatttcagcggctagtggcatccgtttcagaagaaccgtggtttccacgaacgttggccgctgaccttttcgccctcggccatcttgaaatgaaggactcgatcctttctgacgcatctgattggtcggtgcctccacccgttatggtggtgggtctcgacaagaaggcccgtctcgccggcttccactcgaagctcttacttggaaagatccgtgatgcgctggagagcgcaggtgcaatctacgaagtggtctcgcagccagggcgcgttacgctgcatcggtggtctgggctcgctggcctgcccttagacgcgctgcttgaaggtatcacggatccgcacggccgctcggtgacagttgcccacgacctcggcttggcgattgccagaaacttgccgtctatcgaaatggcttggatgctggggacaccaatgcatgtcgaaagagcggacgcactggccaagttcgacgtcagagacgcgcgctggattagagcagagaccattgaaggcactggggcttaccgggttgggctgcacggaacccgttacgtgttccgcgatcatagtggagacacgcgccaagttggccatcgggtcgccaagatcttggccgcaaagagcgaaggtacacggctccatgcctacgacatttccaccggccgcttcatcgccgctctcggggctgagcctccagggttgtttgcccgcgctctcgtcgcttctagcggtgcattgccattaattgaaggggggcgcctcatttacgagcgagtcgctcccatgatcgcaaccattatcttgaaaaaactttacgagggagaccggaccgttgcctaa

SEQ ID NO: 28116 - DNA, 5943 bp, Salmonella enterica
atgaataacccactggaaacatttgaatcgataagagatttttatatttcgtatcttgaaacggccttccgtattgattcatcagatatacagtctgaacggcgagcgttactggaacagcaagggacattatgcgccgatctatttcttgagccgatgccccgatatcagcactatggcttaactatcagtgaattacgaaatgatgctcatggtcagacatggttgcctgggtttaatgcgcaacaaagggcggcattcatcgacctctgtttaggtgggcttctgccctgcaataaaacagatccggctaagggacgttttaatctttatacccatcaactggacatgctgaaaagaggggtacagccagggaagccgggcatcgtcacctccggaaccggctccggtaaaacagaatcatttttgctgccggttctggcgcagatcgcaaaagaagccactggctggccgcaaagtccggcgttgaagcactggcaaccgtggtggcagaaggtagcggataaacagcccacctttatgcgcgagcatgaggccgtcgcacgtccgaaagcggtacgcgcgctgattctctacccgatgaatgccctggtagaagatcaactggtacgtatgcgacgggcactggattccagcgaagctcatgatgtcatggatgcgcattttggcggcaaccgaatcttttttggccgttataccagcgcaactaaagtaactggctggctcaaacatccccgactcagtgaagaaaaaaatgagaaaaagcgcgtggctaaaaaaatcactgagctacgtaagtatatgcaattaacggaagagacccatcaggaggctgtacgacaagcacagcagggcaaggataacgaattgtcgtttaatttccccagaactgctggtggagaggttctcagccgctgggaaatgcaaaagacaccgcccgatattctgatcaccaacaccagcatgctctcaacgatgctggttcgtgaggtggacgattctatttttgaacaaacccgacagtggattgagcgtgaccctgatgcctatttttatcttatccttgacgaacttcatctacagcgaggaaccgccggtaccgaagtcagctacttgcttaagcatttgatcagtcggctggggctggatcaggaaaaacaccgacacaaattgcgtattctggcctccagcgcctctttacccgttgaaggtcctgaaggcgaacaaagcgtcgaatatttatggggaatgtttggtcagaggggactaccttcaggggccacctccagcgactggagggaatgtattatcaaaggcgacacccttcccccgggcaacatgtctcttttccagggggaccaggaggcgttttatcacgcagtgcttcagttacagcaagcaccacttacatcattacaacactggcaaaatgtcgcccgcagcatgggaatgacaaccagtgaagtttctacagagcaattggcgcaacgtgtcgtcttacaggctgccaacttgcttgaaagtggctgctatacggacgatctctctccgagagccacgtcaattaaaatgctcagttcacgcctgtttaacgcccaaccccatagtgaaaaagcgctccgggcattaatctggttgcgctcgactgagggagactggtcgcaatggttttcacatgattttcctgatgatatcggcgcgccgcgtttccgcgcgcatgcttttttacgcgccctggaagggttatatgccgcgccattgcccgcctccagcgccgcatctacgcaagaaatcaatcaccgctattttggcgatcttaccgtagagtccggcttacgttacggcaaagataaaacatcgcggcgtgtcgagttgctctattgtgaatgttgcggcaatctctttttgggcggtaaaccttcagtcttttctggttcagaaagtcgaattgaacttttacccaacgacccggatacggaacagctaccggaacacgcaaaatcagtcatgatagaacgccgatctgctgaagaatacgcgctatttatgcccgtcgttgaacgtttctggccgaaaggcaacgaaacgttaaatggtgatgatgctttcggtacatggggcaaagccagttacgatccatttaccgccaccattcaacacccagtatcgctcttaaaaccgctacctgaaaaccatatcgcgggctggttctattacgtcaaacccggtgaatttgcctccccggaaagaggccagtcatccagccagtcaccgggaacggcgctaccttttcagtgtccggcatgtggtacatcctacaaatacggcaaaggtaagctctccccaatccgtagctttcgcgtcggtttttcgaaaacgacacagctactgaccagctcgctaatggcggaactacagcgctcgggtaaccgtgagcaactggtaacgttttcagacagtcgtcaggatgccgccagggcggcgctcgatctggaatcgggtcatcatgacgacgtcagacgagaaattgttgtccattcgctacagtctattgcggctgataaaccgtcccataaccaactaaaaatacgccaggcagagatagaggaccggaacaaaacactgattaacctcaacgtaaggtcagatgaggaagaggatgagatggatcgactcgctgatgaacggaagaaaatcagagggttattatcaaaacctgaaactgacagcatacctctgcgtgaaatcctcgaacctgaatcaccggatgcaggccaaccgcttggcttgctgttaagggcgcaggtagatgccggtattcacccttccgatcgtactggcatcgcgcctgttcccgatcctgaaaaacatgaagaaggtacgctgacctttgcatggcaacaactctttgaaaagaatgcgcagggggtgtggtgctggaaggcgcttccatcctatgaagataacctgctggtagcacgacaggagatttcacgcgatctgaaacggctggtgggggaaagcgtattcagtaaaacctacttcgcgttggaagagtccggctggggttatccctgccttccgattaccggaaacgactcacgggaacatctcgcgatttatgacgcaatgtttcgcgtgttggcggacgcgtaccgggttactccttcacaatatacaaagccagaaaccccatggagttcagcgagcgatgtcaaatctagaaaccgcctgtaccgctttactcaggcaatatgccagcgctcgggaggcgagcctttatctttaattgatagttttctccggcgactggagctggcgggtcatcagggcggcattattgatattggcaaaatgcactttaagctggcggaacctgccgatcgcgtctggcgttgctcccgttgcgggcgtatacacatgcacaccggcgcgggaatctgtactcgctgctactctcctttaccagaaacgccatgtagcgacgcaaaaacgctccagatgcaacactatctcggcaaacgcctctcacattcttctggtattcaccggatgcgctcagaggaactgactggaatgaccgaaaacccggcggcaaggctacgccggtttaaaggtattctgattgctgacgatgatgatattttgccggaaggaatgaaagattttgcgcccgatcgagatcttgaccgggcagctcgcgtggtagatgttctttccgtaaccacaaccatggaagtgggagtggatattggtgatttacgtgcggtctttcaggccaacatgccgccacagcgctttaattatcaacagcgtgtcggacgagccggacgacgtggacaggcgttttcattcgtattaaccgcgtgtcgcagcaagagtcacgatctgttttacttccgccatccggaaaaaattaccggcgatctccctccgccaccgtttttgaccacaaagctggaaatgatctgccagagactggtacgaaaaatttggctggtgtcggcattcaaatggttaaggcagcaaacggaaaaagccgatcacccatggccggttgacgactacgcgcatgcccctgataaccacggtgagttttttccggtgcactggctgaaagaaaaccaaacggactggctgccaaaaatccggcaggccatcgaagcagccatcctggcacgcgatgaatttgcccggacttgcacgcagcaagaccatcatttgttccagagagttattcagcctttgacgccggaacaactgattcaggatattaacgccgtactaaacgacagtgcaatggaggcgaaaggactggcagaagcgctggcggaacacggtaaattcccaatgtatggcatgccgacccgctctcgccttttgctgacaaggcccgtcagcacaggcgaaaaagaaatcgaatttgccagcatggatcgcgatctggatattgcgatacaggaatttgcccccggaaaaattctggttcaagacaaacgacgctactttacggcaggttatagtggaatgcttaaacagagcagaaaaaatccacgatcattttattcaaatgcccccgaaccgggtgaactcagaacaatgaccgcctgtccggtatgcaacatctgggctccggcaaactctctggccaccgaatgtactatctgtggtgccgttatggataaggcggaacgctatcaatgctatgttccttacggatttatcaccacgctggaaccaaaatcggccaaagaggattttgatcaaatcctgaccacggccagtcgtgtatcaattgcagaagcctacactttttctgcaatgccagagcctgacgttaatgtggcgatacagctccagccacagacatgtctgcaccgcctgaatcggggaatttacactgataaaacatggcgtggtttcagcgcaacacaggggagcctatcggtccctttcagaaagcaggggacttaccagccgctttgggcgaaccgggtttggatggataatcaaattattgaggccgacctgttagttaaaaaccgctttaccgatcggggagaaacccgaaacacattttaccttgccgcgcctaaagtgactgatctacttgcgctgatggttgcccaaaccccgccgggtctccggctacagtattccactctaacgccggcattcagagctgctgcgctctcggcgtcttttatcattgtcaactatgcatcaaaagagctactggatattgatcctgaagaaatcgaaattctggaaccccgcgttcaaatgctgaaaaacggtaagtcggtaccggttctgcaaatggccgatcgtctggttaatggttcagggttatgtgaacggctacagcagaagggcgcatccggttctctcattatccttgaggtcatgaagaatattttaaataacaaaacggcctacccgctggctgagttcctgcaatccgatcatcgcgaacgatgctttcaagggtgttatcactgcctgcaccgatacggaaaccagccgtatcacggattgctggactggcgtctgggactggatgttattcaacttcttctggatcaaacctataacgccgggctgaacagtgattttacatctccgggcgtgtctgactggccggaaaatgccctacgattagccaaagaggccgcttcgctatacagcgacagtgacgtaaaagtgatagggaatatacccgtgattcgcaccggggacgggcgctgggccgccgtactacatccattctgggatcccgatgctgtatttgctgcaaaccccgaacttgaggcattttcatatgaggtggacgtagacgcgacgaatacttttgcattgtcccgccgcatggggactgaaatggcgaaattacggactcaggcgttctcatctcaggagtga

SEQ ID NO: 28117 - DNA, 1086 bp, Salmonella enterica
atgagcagtgttttcgagagagaaaacgataatattcgggtactttcactattctccggttgtggtggtatggattttgggattacctcagccggtggagacatcgtctttgccaacgatgttgtagagaatgcctgcaaaacattagggaactatttccccgatactgatatcaggcatagcgatatctctcaaattcagtcttttccagatgttgatattgttgttggtggctatccctgccagtcattttcaatggcaggtaacagaaaaccaaacaatgacgacagaacaaacctttataaacactttctacgggtattagagactgttcggcctaagtattttgttgctgaaaatgtttctggcttgaaacatttaggtgcaggtagctttctggaacaacagctcacggcatataaagctgccgggtaccaggtcagctatcatatggtaaacgcaagggcttacggcgtgccccagtcgcgcaagcgtttgtttattattggcgtcagaaacgatcttgggcaatgctttgaatttcctgctgaaacacatggcaaagcgacaaaaaagaatcctcatttaaaaccctatgtttcacatggtgaggccattagggatttaccactatggcctgaaggtgagttttacgaacgaccacatgatcctgaagggcatttctcatggtatttcatgtcccgaaatcgtaaagctctatgggacagccctgcttataccgtcgtagctaactggcgtcatgtgacattacatcctgccagtccggtgatgaagttaacatggtcaaacctggaggatggctggaagcagcgctgggacttttctgatgaatatgaacatctaattgttgatacttctcgtcccaaactggaacaggcaaggcggttatcatggcgggaatgtgcacgaatacaaacttttccacagggttttgaacctgtaggtgacgtcgagtcaaaatttacccaaattggtaatgctgttcctcctctactggctgaggttctttttcggcatttgttttctggtgccggtttgaaaaagatgacagcgaacggtaattag

SEQ ID NO: 28118 - DNA, 2766 bp, Salmonella enterica
atggatgattctttcccggttactttagagcaatggaatgctgaactagtaaatatcgtcttttttgagtcttcgcatacgggctcgactttaagccgaattgatgccacggggcgcgtttttgagcaacttgcaggttcacgtagcaaagaggatgctaagcgaagttttctggattcgtttggaaaaaaggcgtctaaaatccaggatgcactcagggatgagtcgcggttagatattttagcgcaaagaaaaggataccctacttattttgccattttatatttaacattgcttgctgccagtgctgatgatgagacgcatgacgaaggggattttcgggttcgattttctgtactgctcggttttgataaaaataaaaaatttgtttttactgaattacccaatttatgggaaagattagaacgatggagtagtagaaaacaaaactgtacccgtttagtcctcccagaaccatcaaaacatgaaagattgattgggtattctaagagaattgcttttccctgctataaggatgaggtttttttacgggatatactcgtcaataatgaattagatagccattcaacttttgagtcagttaataagctagtacatcaatatctatcttattttggcgagatttttaatcaggagtttattgagttcagaacattactttcaaaggctgccatgcggcaggcttatgactctcctttttggggcgcggttcgtgatattactgtacatactgagagagaacaactcaaagagaatggtaagtattgtattcacatggagcttaatgattcaggtcatccagagatttatcttcttatggatgacgctgctgttactgcctcagaaattaagcattattactccttgtctaatgaaatagagaactataataatatatattacgaacgagacataggtactacattaaattccctggatttattattaaaaagacggaagggttatttctataaatcacgagcgggggctgcactgcggtctgggtgtttgccgctttttcgtgatgatttttttcatattagttcagaaggagattattatgataattctccactctatttaattcttcaccataaatatgcagacagtattttcatagccttgaagaatgctggtgaaagagcacaacgtcgggatattaaatctaccaagtggtcggtagtttcttccgataacgttggcaggcaaacgctggataagatagctcatttgttaccagaggaagcccgtcgttttctaatacagggatggcgccctgcccggcctcgtatgtcaggcgcagctcggtttggacaggctatactgcttaaccctgccagtacgcctattattcatatgcctgaagtattaagaggatgctatgtcattagaaataaaaacggagaagaattaacccatggctcgctatcgcagggggctgaaggattattcattccaccagaggaactgatggaaatatctggtcaggcattttgtcgctatgaacttacgttggcgtattcagatatcccagtaaattttgatgtacacgtgttagatcatgcgccttacgccacttattgtaaaattacagagccacatgattggttgactgatggaccatcgggagtattaatggcgttaggggatacggcagtgctccccccactgaaacgcgaagaaataacgccattgagtggtgctcagatgttatggcagtatgaaaattgccttcctgtaacatgtcaatataccgaattacataatatacccgcagcatttgactggatcgctgaggcgctggccttgcgttttcagcgccgtagcacattgccttttggtgaattaaaacaacacattgaaccagtatcacaggtaacaaggatacccgaatggcaattgcgtcgcatgctctttgccgctggctggctttgtgtagtacaacgacgttattcgccatattcgttagtctcattggctgaaagaaccatttccgttgatgtcactgaacagggaattattgcccgaattatgggaatgtttacaagaagtgaacgtaatcttctacaagaagcacttaatgacggtgagcgaatagggcgccggttagttgaggataacggctgttcaatggggtgtattgaattgcatctgtcagccagagaacgtgtccatactttcattgagcagtttgggttacgtttgattaattacgacgatttacccgtcaatgctttgagtggagtattgttaccgtcgtctcaaatgcagtttatcccgactttacccccggatctccatgtatcgctttggcaagctgaaaaataccaatggtcagaagaacaacggctaactcaaacggctaataacctattgttacgatgtcaggaaaaacagcgttatcgttattttattcggcagaatgccggatactggcaaaccgatagcttctcctgggccttaatggctcagatgatatgttcaggagtaacgtttggtgtgcgtaaaggcgatagtgactggtcctggtcaacgaagttcattgcgttaccgccctccgttttacagtggtggttccacgttgctcatggctgtttgtcgataacagataatggtagctacttatttgcaggcggcaaagtaccactctgggacaatgtaatgaccttcccttcctgccaacgagcgttggcacgacggagcagagcgctgacaatacgcaagctgcgcagaaccttacagtaa

SEQ ID NO: 28119 - DNA, 2781 bp, Salmonella enterica
atggctaaaaagaaaagtattatcagcgaccggctgggccaaatgtactacttcggtacagaatctcatgaattgagcagatgcttgcaagagtgcaaacaacgactcaccagaaatggcgctaaagcggataatttaccgaaaggaccagagaaaaggttacattttctccgtacgttaccacttaaggccaaacctgttgtgtctgattggcttcgtgaaaatttaacgtttcctgaacaaaatgacccacaaatcgttcttagggatctgttagaagcagaaagtaatgcggaagatattgaactctgtaaaccgttatggcgcactattcttggattctatatttcttctgactgtcctgaaattataacgagattcctgaatggtgaaaaaattgatttaccccaacaaggtgtttctgactccttgacaattaatgtcactgatgaagacattgaacaatgtgctttaattagccagggtaaagaaattcctataccggagcgtactattccactgtttattggaggattggttgacgtactcaagggaacgcatacagctgataatcgatggcggacaaagctatcagaacattctttaccgctggcacgaaaactgggtgaacttatcgatcagtttgaagctagtaacgacattaaagcgatggatagtaccagtattatacaggctcctcccgttgtatccaaagaaatcgacggtacgatggatgaggttatgttcattggtaaagtgttagcgctaactgcgtccggtgctttttttgttacaccgattagtctgttaattgatggcaacctacgagacctccctgaggcactggtaaaagatctttaccctcatagcggtgaagccattggttttgagaaccatttcagcaaaaaatttgctcggggtgaaatggcaatatggaaagcccgatatcagccgtctgataaacctgcgcagtatgtcattactgactacctgtcgcgcgtttatcctgtagttgcgctaccccatgcctccgatgagcctgacgctgtcagggagtggctactcaccaactaccagccgcaaaacgatacgccggtcatttttcagctaagtgatggcgtatccctgagattaccgggtgacttgcttgatcctaaaaaatatgactttgatatgccgctggagagttatcgtcaggttcctcagacactacttaattctcatgccctaacggtgatcactgaacttcctcaggtgagtgaaaaatatgattgcgctgaagccagcacgtggatcaaacgcctgcttaaacgaactgattcagcaaaatatttccctcaatttagtaaagggcagctacaaaatttaactcattttattgctgaacatgagtctgataacgaggcgtcctatcttcgcgcagtatctcatctggaacagatagcagatatgagatcctttcttaatgatacgactcaacagttactggctttacctgaggttgagacgcaaattaatattgagaaacaggaaatattggctcgttacgaagacgaacagcaccagattaaacaatcaataacggtattatctgaaaagaaaatacagcttgaaaatgaaatagccgatcagaagaaaaagttgaaaaaagaaactgatcgcattaataaagcgctacgtcagcaagaaaatgaactggaacaacggataaaaaagaccttcgaagccgcatctcaagcgggagtggaaacgctggcccagacagcgctactgcgggcaataatcaaaaatgaaacagcacaggagcaacctgtccaacaacgaataacctcagaacctgtagccgaatcagcaaattctaatttcccattagcagagacgaatgctctgactcgcaagcatcaactgatatcggctatcgaaaaacaggcactggcgacgggactaagtgaatctttattatccagcctgattgctactgcgagtattacacccgcggtcggattgatgggaaaacagacaaaacaggctatcgcctcattagcgaaccttttagctggtaatgtttggggggaagtgtcggtacatagcgatcattttagcttcagtgatttaatgaactcccccacactgatccgcttatctggcgatgctcttaccatgacgctgggtgattttttgacccaacaacaagaggcagggctggcgagcatcgttgaattgcgtggttttaaccgcactccgccagaaactctacttcctgaactccatgagtgtttattcagaactccctatcctgccgcatgcagttggacggatcggcggcaggctctacgacatttacccattcggcacccgatgctttttttactcacattcaccaccgggaaaagcacgtttccattgcaggctcctcttgctcaccagttccccctgtttctggcagagaatatatggtcggatgaacgaccatttgcgcaaaatactgacatcacgccttctcgtattactccagaactatggcagacaatgtatgtgggcaaccaccagccagggcatcaggcttgtgctccatgggaagcgctaaaagcagcgctactctctttacttcctgatgaacaagcgcaagccgttgcccgtctggcttacggtctcggccgtagtacaacacaagatattgcgaccacgattgacgctcttgccccagaattagggccatatgttcaggaaatgactaccggcgaatcggcaagcgtacttgagcaccttttccagttataa

SEQ ID NO: 28120 - DNA, 5838 bp, Salmonella enterica
atgttagatccgattggcggctttcgccgtattcaggatttctttatatcatatattgaaaccagtttccgaattgccgatcctttcgtagcagcgtcaaggcgcgaattgctgaacagcagcggagagttcgccgcagagccctatattgaacccgttttacggtatgagtcttcggataaaactcttgaagatttggccgatatggaaaacggtccgttaaagagcttatcgcaggaaggccgaaaagcgttcgtcgaactagcgttatccggtttgtttgattcaaaatccggcgacgcgtcttggcggcgtcggtcagtccatgcgccttatattcatcaggtgaaaatgctggaacgaggcattcgtgccggtcgccctggcatagtgacatccgggacgggatcgggaaaaacggaaagctttatgttgcccatactggccgcattatcgaatgaggcgatcggttggcccgctccccgcgacagttacctgcaaaatcgctggtggcataacgcggaagcgaactgggtttctcgtcgtaaaggggaaaaacgcccggcagcaatcagagcgttagtgctttatccgatgaacgctttagttgaagatcaaatggcgcgtttgcgcaaaacgctggattccgatgaagcgcgacagacgatggaacatcgtttcgccggaaaccgcatcttcttcggacaatataccagcgccacgccggttaccggttatgccagccatcctcgcctttccggcgatcgtacggagaaaagccgccgcgcccgtaaccttgaaaaattacgtaaggcgttgaaccgaatcgattgcgatcaacaggccgctcgcgcattcgacaaggaaaaagaaaaatcgtcggagaagacccgatatatctttccttcaacagacggcggcgagatggttactcgttgggatatgcaggccgctccgcctgacgtactcgtcaccaacgcttccatgctgggagcgatgctttcgcgagaagtcgaagacgctattttcgacatgacgcgcgaatggcttatgagtaatgaagacgcttacttctatctggtattcgatgaattacatttaatgcgcggctccgcaggaacggaaaccgcaatgttgattaagtcgctaatcattcgactaggactcgacgatccgaagcaccgctataagctgcgtttgctggcgtcttccgcgtctttgccgatggaaggcgcggatggagaacaatcgagaaagtatctacgcgatctcttcgctcccttcggcacttgtcgcgatccccgggatgaaggcagcgactctccggaattctggcgtaactgcgtcgttgagggtactcccttcatacctgaaccagaaagtaaagttgacgcgcggccttttgccgccctgatgaggatggcgcttacagggcaaggcgacgttgtccgccgcgtaaagatgacagacgagtttgagcgagctttagttaacgcttttcaggctcttggcgtaaaagagcgaaatatccgtcaaggcgttaagctggcggcggaaaccgcagccgcgttattaacccacgcctgcattgaaaaaaaaggcgacaagccgcgcgccacgtctcccaagcatatcatcgacaaaatttttctggcggaaagcctggatggagagaaggaatctgagctcgcgttacgcggattaatgttgttacgcgcgcttccggattccgtacttgactgcgataagcctgacgccgctacgccggcttttcgcgtgcatacgttcgtcagaaatattgaaggtttcttcgcgtcggtctcgcccggagagcgaaaagcgaaattcgccgatttttgcctagaacgtggcctgtcgcacgcgccttcaacctcacaagaaaagcgcggtcggcgtttattcgaaatgctttattgtgaagcttgcggcgatttactgcttggtggtcagaggggacaaaattgcggaggcgctacggtagaactattaccctcgacgaccaatcttgaaaatcttcccgaacgccccggcgcggaatattacgatgatatggcgctggatgaatttgcggttttctggcctgttgaaaaaacgcccgccgctagtgaagccagtgaaaaaaggtgggatgtttggcaggaggcgacgctgaatcctgtcacaggtattgcgactgtcgggcaagaaacatcgccattgaaccccgaggcgattcgcggatatctctattttcagaacccgcctccggcgaaaaaaggagagccggtaaaaccgccttccgcacaacctttctgttgccctaactgcggtatcgactattccagtcgaccggcaactaaccgcgccagaacgcctattcgcgcattccgtaccggcgtgacgaaatcatctcaactggtagcgacagagctattcgaattgctgcatgcgatcggcgcggatgcgaagagtattgtcttttcggatagccgacaggatgcagcttcgatggcgctggagattgaacgcctgcacttacgcgatttgcgcagggaaatactggttgcggccgccagaacgatgatcagcgaggcggaaaaagaatatattccagaagaagaatttaaagaaaaaagagataaagctatacaggctggggatgatgatgagctcgacaggctgtatgagctcaaaacaaggcaaaaagatattgcgagactttgtaaattcagacgggtaaaaatagatagcttattggagtcggaaggagactccattggaaaaatatcctcagaattagctgggttgggaatatcgccttacaaatatcgcccgagcgctgatggaaacgacaaagttatttggtacgaaaactttgtaaaagataagaacattgttaggtaccacgaaaaactttctttatctgacaggctggcgatcaaacaaaggattatagacgatcaatctgaattgatagacgatgttattttcgccaatacttttttcgcgttagaggaaacgggtctggcatatccctgcgtctcggataacgaggatacgcccgaactcgacgcctggttaagagtattcgccggcgtttatcgcgtaaaagaaaacaaatatgtcgatcctgaacaatccgacggctggtacgttggagaagatgttaaaaaagcgaaagtcaagcgcgtcgccagagccgtattcggcgacgataagtatctggataatttgacgctagtcttaaatcagttcgctgctcgagagcatacggcagggttattcaatattggcaaattgttcctcaaggtagcgaaatcaggcgatccctactggcaatgcggcaactgtgggcggatccacttacatctagggtttaaacgttgtactcgttgcgcggaaccgcttgatatcactcccaaagattctgttgaaacgctatgggaacagaatttccttggcaaacgcattgtgcgcggagaacgggacggcgttaagcgctttcggttgaacgttgaagaattgacagggcagacggatgacttttccgatcggcttcgtaaattcaaggggattttcgtcgataagatgagcgaacttgaaaagctggacgccgagatcgatatgcttgccgtcaccacgacaatggaggttggcatcgatatcggttcgcttcagtcggtttatcaggccaacatgccgcctcagcgcttcaattaccagcagcgcgtcggccgagccgggcggcgcggtcaagctttttcttttgtcattacattttgccgcggacgcacgcacgacgcctattatttcgcccatcctcacgccattaccggcgatccgccgcctccacccttcctggcggtagatcacgacgctatcccattaaggcttttgcgtaaagtctggctcagaagcgcctttaacctattacgtgaagaagatcgcgagaacgggatagattttcctggcgataaacttgtcccacctgacgttcatggcgaatacgtttcgacgcatgattactattatgatgataacgcgaactggtctgaacgattgcagggcgcgctggaagcgacgcagagcatacgcgaacgttttatcgaagcagcgacgttcgatccggaacagcgtcagcatctttattccgcattgaatgcgaaaaaaataatcgatgaaatcaccgaactgagcgcttacgcgcctgacgacaacgtagggctcgcccgttttctggctgaacgcgggagactgccgatgtatggaatgccgacccgggtacgcaatctgtatctgggattacgtgaaaaaaaaggtctgaacaatcagactgaatacgaatggtcgataatggatcgagatcttgaccttgcggtattcgagtatgctcccggctcggtattaatcaaggataagaaaaagcacaaggtgatcggcttcaccggaaattatcgggaaccgcataaccgaaataatcgcgtgtcggatctctctacggtgggctcgtggctggagtcatccagtcatgtcgcattttgcccagcatgcggttccgcaaagctggagttgcgtcaaccggacaatgacaaatgtaaagattgcggcgagcctatcaaacctgacgaatttaaactctatatcacgcctgccgctttccgtacagatttcgaacccaaagacgatatagatagtttcacccgcatgtctctaaagactaccgcgacagtatcaaatgaagagactccgacacactgcgatcccttgatcatacgacgcggcgaagtcactatattgcgtcttaacgacggtcctattaatggagaaaaagaaggagaacgctttactgtcgacctcacgagcgatcaaaaagcgccgattcctttcgctgcttaccgcccgccgattaaaggcgagcaggcgattgattctaattggttaagagagcaagataattcacgttggcggcgtaaaggcgagagcagaaatttcggtctggtctctggtaaggagactgagtcgcttcatctcgaattaacaaggttcgatcctcgtcttaatttgaatatggtcgccaggtacggcgaacatatgcacttgcctacgcgagcggcggccatcagcgcgattcagatattgacgcataaggccgccctctatctggatgtctcgcctgatgagttcgaaacgcttgaacctcgattgcattttggcaaacctatactgcagatcgcagacgcgttaatcaatggctcaggattatgcagacgtcttgccgaaccggcggttgccggaagttctcccttaataatcaaattgctgcatgaaattctgaaagatgaacgcggctggccaatggttgattttctaaagaaagatcatccggttcaatgtcggacagcatgttacaaatgtatacaacgctacggaaaccgccaatatcacggcttactggactggcgtttaggaatagcctatttacgcgccatggttatgccggaattcgcatgtggcctgaatgctgaagactggaaccatccagagatgaaaggatggaaagaaagagcgtttgaacttgcggaggatgtcgaggcgttacgaccagggaccatcaaattgttaaaggaacattctttgccaattcttgaaataaatgatggaaaagagctttggcgcgcggctgttacacatcccttatggcaatgccgagacgctgagcgcggtaccctaattgattcttttggattagataatataggagcgtcattacgatttatcgacacctttgagctggaaagacgaccattgcgcgctttggcgaagctcaacagaggttaa

SEQ ID NO: 28121 - DNA, 1188 bp, Salmonella enterica
atgcgcgaggcggaattcggtttctatgagtttttcgccggtggcggcatggcccgggccggcttaggaaaaaaatggcgatgcctgttcgccaacgatatggatccgataaaaacggcgagttatatcgaaaattggggagccgaacattttgatggccgcgatgtacgtgaaataaaaccagacgatttaacaggatccgcagatttagtctgggcctcatttccctgtcaggacttgtctctggctggtaatggacttgggatcggcgaaatcgacgctagtgaggatgaaaccacgcgttccggcgcgatatggccttttcttgatctagtagacaaacttgaagagggaaatcggaagccgccgatactgattcttgaaaatgtccttgggctgctgacattggatcagggacggcatttcgctgcgatatgtcgccagttaagtaaaatgggctatcgctatggcgcaatgatcatcgatgcaaagctctttttgcctcaatccagaccccgcgtgtttattgttgcgattagtcgtcagttctccgttcctgcatctttactttcaaaagaacctctaacgcaatggcattcttcttcgcttcttcgcgcctgcgaagcgcttccagcggagacgctcggcgactggatctggtggacgcccggcgatgcgccgggttcgagaacaaaggaacttaccgaccttattgattgtgaagatcaaaacacattatggcactctgccgatgaaacccaaagactgatcgatatgatggctccggcgcatctgacacgtttggcgaaggcgcgggaatcaggagaaacgacaataggcagtctttatcttcgcatgcgcagagaaaaaggcgttaaccggcaacgagcagaaatcacgttttctcctgttatcggttgtctgagaacgccgaaaggcggcgcatcccgcgcccgtattattgtcgccgataaaggcgaggtaaaaacgcgcctgctgtcggttaaagaagcggcggcattgatggggctgccggaagatttcatccttccgaccgcgtatcaatcagcgtttaagatcattggcgacggacttgccgttccttccgtccgttttctggccgagcgcatactagagcctctggcggcatcggtccgaaacgacagccatcagacggagaacagataa

SEQ ID NO: 28122 - DNA, 2559 bp, Salmonella enterica
atgaactggacgctgcccgtaacacctgatggttgggaaagtaagctagtcgattattttctccgtttcggcatcgacggcgacgcacaggatattcgttggtttgaagtgacgccgtcgacgctctcggcggcattcgcaggaagcggcgtcggtgcggatgaaatagaagaagcatttcggacctgtatgtcgaacataccggatctgcctcagcgccttgaaagcggcatgatggaaagatccaatgacaaatcgcccggatatttcacttatcttgtcatgacgctacttatcagcagtcaattcgatgcccaagaaggacacaatgactttcgcctgaagttacagaactggctgcggaccggacatagctatcagaatctggcgggcgttaacgccatgtgggaagcgctggccggttggcttgaacgacgagttcagaaaggagaaccttatcgccgactgtgcctaccggagatccccccaagctggagccatatcggatataccctgcgtctggcttttcccgggaaagcggatgtgcgcttgatgcgccgtgttcttacgagtcatccgcaaaccatttccagtccacggctgttgatcagctattttcaggtcgctatccagaaagagaacgcctctcacgctcatgcgctgaaacaggcgtttagcgagtttaaagacgcttggttttcaggacgcagagcgcttgccgacatgcctttctggcgtttgcgacagcgggctatagcgctgatctccgatgttgagacgcgtaaggcgttcatcgatatgcgcgtcgatttcgacggttcgcgatgttacttcagcgccgcaagcgagaatgacgaaagcgttttcgccccttcgttgtctgacgcgttattatcggcttctgcgggaaatagctataatttgggcatcgccacgcagagcggcctgctctttttccatcaagtcggtcatggatgctggagagctatagccgctcccgatgcgttttctttcaaatttcacatcgcgttatcctgtaaatacgctgcgcgcgcgagacaatattttgacgatgcggtcacagaaaacgactggattctgacgtcgcgtccgcagagtcgtcatgcggcgatggaaatatttcgtgcgctgaaaacatcatcgactacgctggatgaacagatctctcgcttacagctttccggtggcatccgagtgccgggcgggtggctgggactacccgcttttctaccaaccgtccattcagacacgcaaaattacagaatttactcgcctcagggaaacggcgcgaaagttagcgtcagggaagaagatggacgcttgacgtcatcaatgcctcttaacggcgagtttattatcgaacctgagctggaaatcggcgagaaaacgccgccatggcgacaacgggcgcgttttttcgagcgcgccgttcctcgtcctgcgcaggaagatagcgccagatatcgcctcgaacttcttaccgattggaagacgtctcccctgacaacgccggcattccacattgaactccccctgacgacagaaaataacgatgaacgtctcgaacatctccttgaagcgatttatgcaagcggcgccagcggatgggaggaaatcgaattggtcgcgcttctggaacgcgccgcagacagcgtcaatgtgtggcatttgattcgctgtttgcatgacgcaggtctgatagaaccgcgcttacgccaaggctggaaaggtcgggtatggacgttagtcaaaccttcgctgttttgtatccgcaatggggataacagcatgatcgtcgtggaaggcgctacctgcgccagccttatggatgattttcaaaaagcggtctccgggctgggcggaaaatgctttcgtcgcagcggcgtaagcgtctggtctcctcccgtatgcggcgcggagatcgatgatcctgtcgagttgtcccgagttatggaatggccgcttattgatatatcgtcaacgcctgatatgacgccgctcgcgttaacctcgacctgtcgtaccgccgaattccaccttcaagcagcagtgtgggactggcgttcagggcgtttctctccgcatgcggcctccaataacgcctcgacgcttttaacgcgccatgtccatccgggcgggcgcgatcatgacgtatacaaggttgtttcccggcgcaaaatggcgtttttcttatcccgaaccgccgcgattatcgccgcgaatgtgagtgcgcgccgcccgacattcagacgagtcgggaatcatcgctttatttgccttgtcgacgattgtggtttgcctgacgcactggcgatgggattacgacgcagcgtgctcagaaacggcggcccaacggaagccggatacgcttatcctatcgacgacgtcgctttccgttggctaaatcgactgcttcccggatgcttcgctccattcccgccggatgacggcgatgacgcaaatcgtttagttgcggcagcgcgccattccggcgggaaaacgcgcctgcggtggcaaaacggacgtctggcgttatag

SEQ ID NO: 28123 - DNA, 2097 bp, Salmonella enterica
atgaaagatcttccctggtatattggccgatacgatcgacgaaacgatcggttctcgtattttaaagtcgtcgctcagcaaacggaaaatggttggcacgcaatcgacagccctaaaaaaatgtttcctcgtacaggtgaagtcgaacttaccggattcgacgcgtctcagcttcgtccaaacgactggatcgtctttcaggtagataccaatacgcgcagcaaattgacgagagcgaaacatcctcgccgtatttatccttattatgatttatcctcggcacagtctcttcagaaagctcgccatcgtctgagcctggaaggcatcgaaacgtgcggcgaaccggggcaatggactattcgcttcgaggcgggcggagtcattctggcgaacctgacagagtcgaaaccaggtttttttattttgtcacgaaatcagtacgttgccgaatatgcgtttaatgacagcggaatcatctccgtatccggtctgtctgaaaataacaaaatattttatatgccggacgcagatgcctcgcccacgcgacgccatgactggacacctgacaaacattacattgaaaatgccgttcagcttatcgccggaaccgactcgtcaacgcagatcgcttcctggcttcgcaagcatgtcgacgagcaaaacggaaaattgaaatccggcgtcgacgatctgttggctgccgctcagattctccgatccggagagttggcgaaaaaaatagaagaagaggacgcgctggcccgggaactctcccaggctgtgttgaatgacgagcgtatcgccgctcagcttgaacgccagatacaaagcatcgcggaagaagaacgggacaggttgcgcgccgaacaacaaaaagcgctcaacgaagctttttgcgccgagcgtctgctccgtagcgaagcgattgaagaggaaatgacggtctttcagacggagagaaaaagcgagatcgaacagcaaatcgcgcaattacgtttggacgaagaagaaaaattacaaaaggaattcgaagaaaagcagttaagcatagaaaaaacgttaaaacatgaaaaagacgctctcgaaagcgaaatcaaccggctgaaaaacgccgccgcagatttatgccgtcaaaacgaaagtcagcgccggacgttgtcttctctggagatcaaacgcgaagcgtcttcaggcgcgcttcgggaagttgaagagcgcgttgcgctggcgcggatcgaacttgagaaaatcaatgccgctattgctgaaaaagcgcgtcgaatggcgcattcggcgatccctgcgatatgtcttcccgccgaagctaaaacagtttcccgcgcagaactgggacgtatcatcagtgaaaacaaactactgacgcacgaaggaaaaatactgatggagcaattcctggcgttgacgcttgccggcgaatgcccgttgctctacggctctgaaacacaggactttctggctatcgccgcgtcgcttatttcttcaggacgcgctatccgacaaattgccgatccgacgatgatttcctatgaggatctgtggatccgcgcaggaaataatctggcgacgccgctttatcaaggattgttattgagcgacgcccatcgtccccgaacaattcttgccgtcatcgaacgcgtcgaatgctccgccgcgcgtttctggctgcctgctctgaaagaggggttgcgtaatggcgatctgccccgacgattcctggtgtgcggcacaattacgaatgaagataacgaggaagcggaaaagataaaggaggaacatctttttctgccggtggaaaacattgtcgttcgaaatgcgattacgcgtgcgccgctttatctctccaccagacatcatagcgaactaacgcccgaagccgcgccgccagaatcgcttgaggaaaaacttgccattgcggatgaaatgtcgggcgatcgtctgaacgtggtaaatacgctgcgggcgacgaaagcggcgctggaggtcgggttggccgtcgacgaagacaaaacggcgcatcaaaagcgattagtcgatttattcgcaaatttgcaaaatagcgaaatctgcgctccataa

SEQ ID NO: 28124 - DNA, 5838 bp, Salmonella enterica; identical to SEQ ID NO: 28120

SEQ ID NO: 28125 - DNA, 1188 bp, Salmonella enterica; identical to SEQ ID NO: 28121

SEQ ID NO: 28126 - DNA, 2559 bp, Salmonella enterica; identical to SEQ ID NO: 28122

SEQ ID NO: 28127 - DNA, 2097 bp, Salmonella enterica; identical to SEQ ID NO: 28123

SEQ ID NO: 28128 - DNA, 5838 bp, Salmonella enterica; identical to SEQ ID NO: 28120

SEQ ID NO: 28129 - DNA, 1188 bp, Salmonella enterica; identical to SEQ ID NO: 28121

SEQ ID NO: 28130 - DNA, 2559 bp, Salmonella enterica; identical to SEQ ID NO: 28122

SEQ ID NO: 28131 - DNA, 2097 bp, Salmonella enterica; identical to SEQ ID NO: 28123

SEQ ID NO: 28132 - DNA, 5943 bp, Salmonella enterica
atgaataacccactggaaacatttgaatcgataagagatttttatatttcgtatcttgaaacggccttccgtattgattcatcagatatacagtctgaacggcgagcgttactggaacagcaagggacattatgcgccgatctatttcttgagccgatgccccgatatcagcactatggcttaactatcagtgaattacgaaatgatgctcatggtcagacatggttgcctgggtttaatgcgcaacaaagggcggcattcatcgacctctgtttaggtgggcttctgccctgcaataaaacagatccggctaagggacgttttaatctttatacccatcaactggacatgctgaaaagaggggtacagccagggaagccgggcatcgtcacctccggaaccggctccggtaaaacagaatcatttttgctgccggttctggcgcagatcgcaaaagaagccactggctggccgcaaagtccggcgttgaagcactggcaaccgtggtggcagaaggtagcggataaacagcccacctttatgcgcgagcatgaggccgtcgcacgtccgaaagcggtacgcgcgctgattctctacccgatgaatgccctggtagaagatcaactggtacgtatgcgacgggcactggattccagcgaagctcatgatgtcatggatgcgcattttggcggcaaccgaatcttttttggccgttataccagcgcaactaaagtaactggctggctcaaacatccccgactcagtgaagaaaaaaatgagaaaaagcgcgtggctaaaaaaatcactgagctacgtaagtatatgcaattaacggaagagacccatcaggaggctgtacgacaagcacagcagggcaaggataacgaattgtcgtttaatttccccagaactgctggtggagaggttctcagccgctgggaaatgcaaaagacaccgcccgatattctgatcaccaacaccagcatgctctcaacgatgctggttcgtgaggtggacgattctatttttgaacaaacccgacagtggattgagcgtgaccctgatgcctatttttatcttatccttgacgaacttcatctacagcgaggaaccgccggtaccgaagtcagctacttgcttaagcatttgatcagtcggctggggctggatcaggaaaaacaccgacacaaattgcgtattctggcctccagcgcctctttacccgttgaaggtcctgaaggcgaacaaagcgtcgaatatttatggggaatgtttggtcagaggggactaccttcaggggccacctccagcgactggagggaatgtattatcaaaggcgacacccttcccccgggcaacatgtctcttttccagggggaccaggaggcgttttatcacgcagtgcttcagttacagcaagcaccacttacatcattacaacactggcaaaatgtcgcccgcagcatgggaatgacaaccagtgaagtttctacagagcaattggcgcaacgtgtcgtcttacaggctgccaacttgcttgaaagtggctgctatacggacgatctctctccgagagccacgtcaattaaaatgctcagttcacgcctgtttaacgcccaaccccatagtgaaaaagcgctccgggcattaatctggttgcgctcgactgagggagactggtcgcaatggttttcacatgattttcctgatgatatcggcgcgccgcgtttccgcgcgcatgcttttttacgcgccctggaagggttatatgccgcgccattgcccgcctccagcgccgcatctacgcaagaaatcaatcaccgctattttggcgatcttaccgtagagtccggcttacgttacggcaaagataaaacatcgcggcgtgtcgagttgctctattgtgaatgttgcggcaatctctttttgggcggtaaaccttcagtcttttctggttcagaaagtcgaattgaacttttacccaacgacccggatacggaacagctaccggaacacgcaaaatcagtcatgatagaacgccgatctgctgaagaatacgcgctatttatgcccgtcgttgaacgtttctggccgaaaggcaacgaaacgttaaatggtgatgatgctttcggtacatggggcaaagccagttacgatccatttaccgccaccattcaacacccagtatcgctcttaaaaccgctacctgaaaaccatatcgcgggctggttctattacgtcaaacccggtgaatttgcctccccggaaagaggccagtcatccagccagtcaccgggaacggcgctaccttttcagtgtccggcatgtggtacatcctacaaatacggcaaaggtaagctctccccaatccgtagctttcgcgtcggtttttcgaaaacgacacagctactgaccagctcgctaatggcggaactacagcgctcgggtaaccgtgagcaactggtaacgttttcagacagtcgtcaggatgccgccagggcggcgctcgatctggaatcgggtcatcatgacgacgtcagacgagaaattgttgtccattcgctacagtctattgcggctgataaaccgtcccataaccaactaaaaatacgccaggcagagatagaggaccggaacaaaacactgattaacctcaacgtaaggtcagatgaggaagaggatgagatggatcgactcgctgatgaacggaagaaaatcagagggttattatcaaaacctgaaactgacagcatacctctgcgtgaaatcctcgaacctgaatcaccggatgcaggccaaccgcttggcttgctgttaagggcgcaggtagatgccggtattcacccttccgatcgtactggcatcgcgcctgttcccgatcctgaaaaacatgaagaaggtacgctgacctttgcatggcaacaactctttgaaaagaatgcgcagggggtgtggtgctggaaggcgcttccatcctatgaagataacctgctggtagcacgacaggagatttcacgcgatctgaaacggctggtgggggaaagcgtattcagtaaaacctacttcgcgttggaagagtccggctggggttatccctgccttccgattaccggaaacgactcacgggaacatctcgcgatttatgacgcaatgtttcgcgtgttggcggacgcgtaccgggttactccttcacaatatacaaagccagaaaccccatggagttcagcgagcgatgtcaaatctagaaaccgcctgtaccgctttactcaggcaatatgccagcgctcgggaggcgagcctttatctttaattgatagttttctccggcgactggagctggcgggtcatcagggcggcattattgatattggcaaaatgcactttaagctggcggaacctgccgatcgcgtctggcgttgctcccgttgcgggcgtatacacatgcacaccggcgcgggaatctgtactcgctgctactctcctttaccagaaacgccatgtagcgacgcaaaaacgctccagatgcaacactatctcggcaaacgcctctcacattcttctggtattcaccggatgcgctcagaggaactgactggaatgaccgaaaacccggcggcaaggctacgccggtttaaaggtattctgattgctgacgatgatgatattttgccggaaggaatgaaagattttgcgcccgatcgagatcttgaccgggcagctcgcgtggtagatgttctttccgtaaccacaaccatggaagtgggagtggatattggtgatttacgtgcggtctttcaggccaacatgccgccacagcgctttaattatcaacagcgtgtcggacgagccggacgacgtggacaggcgttttcattcgtattaaccgcgtgtcgcagcaagagtcacgatctgttttacttccgccatccggaaaaaattaccggcgatctccctccgccaccgtttttgaccacaaagctggaaatgatctgccagagactggtacgaaaaatttggctggtgtcggcattcaaatggttaaggcagcaaacggaaaaagccgatcacccatggccggttgacgactacgcgcatgcccctgataaccacggtgagttttttccggtgcactggctgaaagaaaaccaaacggactggctgccaaaaatccggcaggccatcgaagcagccatcctggcacgcgatgaatttgcccggacttgcacgcagcaagaccatcatttgttccagagagttattcagcctttgacgccggaacaactgattcaggatattaacgccgtactaaacgacagtgcaatggaggcgaaaggactggcagaagcgctggcggaacacggtaaattcccaatgtatggcatgccgacccgctctcgccttttgctgacaaggcccgtcagcacaggcgaaaaagaaatcgaatttgccagcatggatcgcgatctggatattgcgatacaggaatttgcccccggaaaaattctggttcaagacaaacgacgctactttacggcaggttatagtggaatgcttaaacagagcagaaaaaatccacgatcattttattcaaatgcccccgaaccgggtgaactcagaacaatgaccgcctgtccggtatgcaacatctgggctccggcaaactctctggccaccgaatgtactatctgtggtgccgttatggataaggcggaacgctatcaatgctatgttccttacggatttatcaccacgctggaaccaaaatcggccaaagaggattttgatcaaatcctgaccacggccagtcgtgtatcaattgcagaagcctacactttttctgcaatgccagagcctgacgttaatgtggcgatacagctccagccacagacatgtctgcaccgcctgaatcggggaatttacactgataaaacatggcgtggtttcagcgcaacacaggggagcctatcggtccctttcagaaagcaggggacttaccagccgctttgggcggaccgggtttggatggataatcaaattattgaggccgacctgttagttaaaaaccgctttaccgatcggggagaaacccgaaacacattttaccttgccgcgcctaaagtgactgatctacttgcgctgatggttgcccaaaccccgccgggtctccggctacagtattccactctaacgccggcattcagagctgctgcgctctcggcgtcttttatcattgtcaactatgcatcaaaagagctactggatattgatcctgaagaaatcgaaattctggaaccccgcgttcaaatgctgaaaaacggtaagtcggtaccggttctgcaaatggccgatcgtctggttaatggttcagggttatgtgaacggctacagcagaagggcgcatccggttctctcattatccttgaggtcatgaagaatattttaaataacaaaacggcctacccgctggctgagttcctgcaatccgatcatcgcgaacgatgctttcaagggtgttatcactgcctgcaccgatacggaaaccagccgtatcacggattgctggactggcgtctgggactggatgttattcaacttcttctggatcaaacctataacgccgggctgaacagtgattttacatctccgggcgtgtctgactggccggaaaatgccctacgattagccaaagaggccgcttcgctatacagcgacagtgacgtaaaagtgatagggaatatacccgtgattcgcaccggggacgggcgctgggccgccgtactacatccattctgggatcccgatgctgtatttgctgcaaaccccgaacttgaggcattttcatatgaggtggacgtagacgcgacgaatacttttgcattgtcccgccgcatggggactgaaatggcgaaattacggactcaggcgttctcatctcaggagtga

SEQ ID NO: 28133 - DNA, 1086 bp, Salmonella enterica; identical to SEQ ID NO: 28117

SEQ ID NO: 28134 - DNA, 2766 bp, Salmonella enterica
atggatgattctttcccggttactttagagcaatggaatgctgaactagtaaatatcgtcttttttgagtcttcgcatacgggctcgactttaagccgaattgatgccacggggcgcgtttttgagcaacttgcaggttcacgtagcaaagaggatgctaagcgaagttttctggattcgtttggaaaaaaggcgtctaaaatccaggatgcactcagggatgagtcgcggttagatattttagcgcaaagaaaaggataccctacttattttgccattttatatttaacattgcttgctgccagtgctgatgatgagacgcatgacgaaggggattttcgggttcgattttctgtactgctcggttttgataaaaataaaaaatttgtttttactgaattacccaatttatgggaaagattagaacgatggagtagtagaaaacaaaactgtacccgtttagtcctcccagaaccatcaaaacatgaaagattgattgggtattctaagagaattgcttttccctgctataaggatgaggtttttttacgggatatactcgtcaataatgaattagatagccattcaacttttgagtcagttaataagctagtacatcaatatctatcttattttggcgagatttttaatcaggagtttattgagttcagaacattactttcaaaggctgccatgcggcaggcttatgactctcctttttggggcgcggttcgtgatattactgtacatactgagagagaacaactcaaagagaatggtaagtattgtattcacatggagcttaatgattcaggtcatccagagatttatcttcttatggatgacgctgctgttactgcctcagaaattaagcattattactccttgtctaatgaaatagagaactataataatatatattacgaacgagacataggtactacattaaattccctggatttattattaaaaagacggaagggttatttctataaatcacgagcgggggctgcactgcggtctgggtgtttgccgctttttcgtgatgatttttttcatattagttcagaaggagattattatgataattctccactctatttaattcttcaccataaatatgcagacagtattttcatagccttgaagaatgctggtgaaagagcacaacgtcgggatattaaatctaccaagtggtcggtagtttcttccgataacgttggcaggcaaacgctggataagatagctcatttgttaccagaggaagcccgtcgttttctaatacagggatggcgccctgcccggcctcgtatgtcaggcgcagctcggtttggacaggctatactgcttaaccctgccagtacgcctattattcatatgcctgaagtattaagaggatgctatgtcattagaaataaaaacggagaagaattaacccatggctcgctatcgcagggggctgaaggattattcattccaccagaggaactgatggaaatatctggtcaggcattttgtcgctatgaacttacgttggcgtattcagatatcccagtaaattttgatgtacacgtgttagatcatgcgccttacgccacttattgtaaaattacagagccacatgattggttgactgatggaccatcgggagtattaatggcgttaggggatacggcagtgctccccccactgaaacgcgaagaaataacgccattgagtggtgctcagatgttatggcagtatgaaaattgccttcctgtaacatgtcaatataccgaattacataatatacccgcagcatttgactggatcgctgaggcgctggccttgcgttttcagcgccgtagcacattgccttttggtgaattaaaacaacacattgaaccagtatcacaggtaacaaggatacccgaatggcaattgcgtcgcatgctctttgccgctggctggctttgtgtagtacaacgacgttattcgccatattcgttagtctcattggctgaaagaaccatttccgttgatgtcactgaacagggaattattgcccgaattatgggaatgtttacaagaagtgaacgtaatcttctacaagaagcacttaatgacggtgagcgaatagggcgccggttagttgaggataacggctgttcaatggggtgtattgaattgcatctgtcagccagagaacgtgtccatactttcattgagcagtttgggttacgtttgattaattacgacgatttacccgtcaatgctttgagtggagtattgttaccgtcgtctcaaatgcagtttatcccgactttacccccggatctccatgtatcgctttggcaagctgaaaaataccaatggtcagaagaacaacggctaactcaaacggctaataacctattgttacgatgtcaggaaaaacagcgttatcgttattttattcggcagaatgccggatactggcaaaccgatagcttctcctgggccttaatggctcagatgatatgttcaggagtaacgtttggtgtgcgtaaaggcgatagtgactggtcctggtcaacgaagttcattgcgttaccgccctccgttttacagtggtggatccacgttgctcatggctgtttgtcgataacagataatggtagctacttatttgcaggcggcaaagtaccactctgggacaatgtaatgaccttcccttcctgccaacgagcgttggcacgacggagcagagcgctgacaatacgcaagctgcgcagaaccttacagtaa

SEQ ID NO: 28135 - DNA, 2781 bp, Salmonella enterica; identical to SEQ ID NO: 28119

SEQ ID NO: 28136 - DNA, 5838 bp, Salmonella enterica; identical to SEQ ID NO: 28120

SEQ ID NO: 28137 - DNA, 1188 bp, Salmonella enterica; identical to SEQ ID NO: 28121

SEQ ID NO: 28138 - DNA, 2559 bp, Salmonella enterica; identical to SEQ ID NO: 28122

SEQ ID NO: 28139 - DNA, 2097 bp, Salmonella enterica; identical to SEQ ID NO: 28123

SEQ ID NO: 28140 - DNA, 5838 bp, Salmonella enterica; identical to SEQ ID NO: 28120

SEQ ID NO: 28141 - DNA, 1188 bp, Salmonella enterica; identical to SEQ ID NO: 28121

SEQ ID NO: 28142 - DNA, 2559 bp, Salmonella enterica; identical to SEQ ID NO: 28122

SEQ ID NO: 28143 - DNA, 2097 bp, Salmonella enterica; identical to SEQ ID NO: 28123

SEQ ID NO: 28144 - DNA, 5838 bp, Salmonella enterica; identical to SEQ ID NO: 28120

SEQ ID NO: 28145 - DNA, 1188 bp, Salmonella enterica; identical to SEQ ID NO: 28121

SEQ ID NO: 28146 - DNA, 2559 bp, Salmonella enterica; identical to SEQ ID NO: 28122

SEQ ID NO: 28147 - DNA, 2097 bp, Salmonella enterica; identical to SEQ ID NO: 28123

SEQ ID NO: 28148 - DNA, 5838 bp, Salmonella enterica; identical to SEQ ID NO: 28120

SEQ ID NO: 28149 - DNA, 1188 bp, Salmonella enterica; identical to SEQ ID NO: 28121

SEQ ID NO: 28150 - DNA, 2559 bp, Salmonella enterica; identical to SEQ ID NO: 28122

SEQ ID NO: 28151 - DNA, 2097 bp, Salmonella enterica; identical to SEQ ID NO: 28123

SEQ ID NO: 28152 - DNA, 5838 bp, Salmonella enterica; identical to SEQ ID NO: 28120

SEQ ID NO: 28153 - DNA, 1188 bp, Salmonella enterica; identical to SEQ ID NO: 28121

SEQ ID NO: 28154 - DNA, 2559 bp, Salmonella enterica; identical to SEQ ID NO: 28122

SEQ ID NO: 28155 - DNA, 2097 bp, Salmonella enterica; identical to SEQ ID NO: 28123

SEQ ID NO: 28156 - DNA, 5838 bp, Salmonella enterica; identical to SEQ ID NO: 28120

SEQ ID NO: 28157 - DNA, 1188 bp, Salmonella enterica; identical to SEQ ID NO: 28121

SEQ ID NO: 28158 - DNA, 2559 bp, Salmonella enterica; identical to SEQ ID NO: 28122

SEQ ID NO: 28159 - DNA, 2097 bp, Salmonella enterica; identical to SEQ ID NO: 28123

SEQ ID NO: 28160 - DNA, 5838 bp, Salmonella enterica; identical to SEQ ID NO: 28120

SEQ ID NO: 28161 - DNA, 1188 bp, Salmonella enterica; identical to SEQ ID NO: 28121

SEQ ID NO: 28162 - DNA, 2559 bp, Salmonella enterica; identical to SEQ ID NO: 28122

SEQ ID NO: 28163 - DNA, 2097 bp, Salmonella enterica; identical to SEQ ID NO: 28123

SEQ ID NO: 28164 - DNA, 5838 bp, Salmonella enterica
  subsp. arizonae serovar 62:z36:- str. 5335/86
atgttagatccgattggcggttttcgccgtattcaggacttctttatttcatatattgaaaccaacttccgaatcgccgacccttcggtcgcggcgtcgaggcgcgaactgctgaacagcaacggggagttcgccgcggaaccttatattgaacccgttttacgatacgcgtcttcgaataagacccttgaagatttggccgatatggaaaacgggccgttaaataatttatcgccggaaggccgaagagcgttcgtcgaactggcgttatccggcttgttcgattcgaaatccggcgacgcggcctggccgcgtcgttcagtccatacgccttatcttcatcaggcgaaaatgctggagcgcggcattcgccccggttgccccggcatagtgacatcgggtacgggttcaggaaaaacggaaagctttatgttgcccatactggccgcattatcgaatgaggcgatcagttggcccgttccctgcgacggttacctgcgaaaccgatggtggaataacgaggaagcgaactgggtttcgcgccgtaaaggagaaaaacgcccggcggcggtcagagcgctagtgctttacccgatgaacgcgctggttgaagatcaaatggcgcgtttgcgtaagacgctggattccgatgaggcgcgacagacgatggaacatcatttcgccggaaaccggattttcttcgggcaatataccagcgccacgccggttaccggttacgccagccatccccgtctttccggcgatcgctcggagaaaaaccgccgcgcccgtaatcttgaaaaattacgtaaggcgttaaaccggatcgattgcaatcaacaggccgcgcgcgcgttcgacgaaaacaaaaacgaaaagtcgtcggaaaagacccgatatatatttccttccacagacggcggcgaaatggtgtctcgctgggatatgcaggccgcgccgcctgacgttctcgtcaccaacgcctccatgctgggagcgatgctttcacgggaagtcgaagacgctattttcgacatgacgcgcgaatggctgatgaacaatgacgacgcttacttttatctggtattcgatgaactgcatttaatgcgcggttccgcagggacggaaaccgctatgctgattaaatcgctgatcattcgactcgggcttgacgatccgaagcatcgctacaagctgcgtttgctggcgtcttccgcgtctctgccgatggatggcgcggatggagaacaatcgagaaagtatctgcgcgatctcttcgcccccttcggcacttatcgcgactcccgggataccggcagcgatgcgccggatttctggcgtaactgcgttattgagggagctccgttcatacctgaaccagaaagaaaagttgacgcgcggccttttgccgccctgatgcgaacggcgctggcagggcaaggcgacgctgtccgccgcgtggagatgacagacgagtttgagcgagctttgttcaacgcttttcaggcccttggcgtgaaggagcgagatagccgtcagggtattaagccggcggcggaaatcgcagccgcgttattaaccaacgcctgcattgaaaaaaacggcgacaagccgcgcgcgacggcccccaagcacatcatcgacaagatttttctggagaaaagctggaacggagaggaagagtctgaacttgcgttacgcgggttaatgttgttgcgcgcgcttccggattctggacttgccagcgaaaaacctgacgccgctacgccggcttttcgcgtgcatacgttcgtcagaaatatcgagggtttcttcgcgtctgtctggcccggagagcgaaaagcgaaattcgccgatttttgcctggaacgcggcctgtcgcacgcgccttcagcctcaggagaaaaacgcggtcggcgtttattcgaaatgctttattgcgaagcttgcggcgatttactgcttggcggccagaggggacaaagttgcgaaggcgctacggtagagctgttgccctcggcgaccaacctggaaaatcttcccgaacgccccggcgcggaatattacgatgatatgacgctggatgagtttgcggttttctggcctgttgaaaaaacgcccgccgccagtgaaaaagggtgggacgtctggcagaaagcggcgctgaatcctgtcacaggcattgtgactgtcgggcaagaaacatcggcgacgaacgccgagacggttcacggatatctctatttccagaatccgcccccggcgaaaaaaggagagccggtaaaaccgccttccgcgcaacctttctgttgtcctaactgcggtatcgattattccagccgaccggcgaccaaccgagccagaacgcccattcgcgcattccgtaccggcgtgacgaagtcatctcaactggtggcgacagagctattcgaattgctgcacgcgatcggcgcggacgcgaagagcatagtcttttcggatagccggcaagatgcggcgtcgatggcgctggagattgaacgtctgcacttacgcgatttgcgcagggaaatactggtcgcagccgccagagagatgatcagcgacgcggaaaaagaatatattccagaagaagaatttaaagaaaaaagagacaaagcgatacaggccggagacgatgatacgctcgaaaggctgtatgagctcaaaacaaaccaaaaagggattgcgaatctgtgtaaattcaggcgggtaaagatagatagcttattggagtcgggaggcgattctatcggaaaaatatcctccgaattggcagggttgggaatatcgccttataaatatcgcccaagcgctgatggagacgacaaagccgtctggtacgacaattttataaaagacaagaacatcgttaaataccatgaaaaactttctttgtctgacaggctggcgatcaaacagaggataatagacgatcaatccgaattaatagacgacgttattttcgccaatactttttttgcgttagaagaaaccggtctggcgtatccatgcgtctcggataatgagaatacgcccgaacttgacgcctggttaagggtattcgccggcgtctatcgcgttaaagaaaacaaatatgtcgatcccgaacaatccgacagctggcatgttggaaaggatgttaaaaaagcaaaagtcaagcgcctcgccagagccttattcggcgacgataattatctggataatttgacgcaagtcttaaatcagttcgccgctcgaggacatacggcaggtttactcaatattggcaaattgttcctcaaagtagcgaaatcaggcgatccctactgggaatgcggcaactgcggacggatccacttacatttaggatttaaacgttgtacccgttgcgcggaacagcttgatatcactcccaaagattctgttgaagcgctatgggaacagaatttccttggcaaacgcattgcgcgcggcgaacgggacggcgttaagcgcttccggctaaacgtcgaagaattgacagggcagacggatgatttttccgatcggctgcgtaaattcaagggcattttcgtcgataagatgagcgaacttgaaaagctggacgccgagatcgatatgcttgccgtcaccacgactatggaagtcggcatcgatatcggttcgcttcagtcggtttatcaggccaacatgccgcctcagcgctttaattaccagcagcgcgtcggccgtgccggacgacgcggtcaggctttttcttttgtgattacgttttgtcgcggacgcacgcacgacgcctattatttcgcccatcctcacgccattaccggcgatccgccgccgccgcccttcctggcggtagatcatgacgctatcccattaaggcttttgcggaaagtctggctcagaagcgcattcaatttattgcgtgaagaagattgcgaaaagaaggtggatttccctggagataaacttgtcccgcctgacgttcatggcgaatacgtttcgacgcatgattactattatgacgataacgcaaactgggctgaacgattgcagggcgcgctggaagcgacgcagagcatacgcgagcgttttatcgaagcggcgacgttcgatccgaaacagcgtcagcgtctttattccgcattgaatgcgaaaaaaataatcgatgaaatcgccgaactgagcgcttacgcgcctgacgataacctaggacttgcccgttttctggctgaacgcggaaaactgccgatgtatggaatgccgacccgggtacgcaatctgtatctgggattacgtgaaaaaaaaggtctgaacaaccagactgaatacgaatggtcgacaatggatcgcgaccttgacctcgcggtttttgagtatgcccccggctcggtattaattaaggataagaaaaaacacaaggtgatcggcttcaccggaaattatcgggaaccacaaatccgggataatcgcgtgttggacctctctacagtgggttcgtggcaggagtcatccagtcatgtcgcattttgtccggcatgcggttccgcaaagctggagttgcgtcaaccggacaacgacattgattgcaaagattgcggcgcgcctatcaaacctgacgaattcaaactctatatcacgcctgccgctttccgtacggattttgaacccaaagacgatatggatagttttacccgcatgtctttaaggactaccgcgacggtattaaatgaagagattccgacgcgctgcgatcctttgattatacgacgtggcgaagtcactattttgcgccttaacgatggacccattaatggggagaaagaaggagaacgttttactatcgaccttgcgagcgatcaaaaggcgccagttcctttcgccgcttaccgcctgtcgattaaaggcgagcaggcgattgactcaaactggttaagagagcgcgataattcacgttggcggcgtaaaggcgagaaaaaaaatttcggcctggtatccggtaaggagactgagtcgcttcacctcgaattaatacggttcgattcccgccttaatctgaatatggtcgccagatacggcgagtatatgcacttgcctacgcgagcggcggccatcagcgcgattcagatattgacgcataaggccgccctctatctggatgtctcgcctgatgagttcgaaacgcttgaaccacgattgcattttggcaaacctatactgcaaatcgcggacgcgttaatcaatggttcaggattatgcaggcgccttgccgaaccggctgttgccggcgattctcctttaataatcaaattgctgcatgaaatcctggaggatgagcgcggctggccgatggtcgattttctaaagaaggatcatcctgttcaatgccggacagcatgttacaaatgcatacaacgctacggcaaccgccggtatcacggcttactggactggcgtttaggaatagcctatttacgcgccatggttacgccggaattcgcatgcggcctgaatcccgaagactggaaccatccagagatgaaaggatggaaagaaagagcgtttgaacttgcggaggatgtcgaggcgttacgaccggggactatcacattgttaaaggaatattctttgccggttctcactgaaataaaggatggaaaagaactttggcgcgcggctgtcgcgcatcccttatggcgatggcgagacgctgaacgcgacgctctgattgacgcttttggattggacgataaaggggtaccgctacgatttatcgacacttttgaactggaaagacgaccgttgcgcgcgctggcgcagcttaaacgaggctaa

SEQ ID NO: 28165 - DNA, 1236 bp, Salmonella enterica
  subsp. arizonae serovar 62:z36:- str. 5335/86
atgaaaaaagaagccgttacaagcaaggatgagacaaaagaaacgcgcgaggcggaattcggtttctatgagtttttcgcgggcggcggcatggccagggccggtctgggaaaacggtggcgatgtctgttcgccaacgatatggacccgataaagacggcgaactatatcgaaaattggggaaacgagcatttcgataaccgcgatgtgcgtgaagtcaatcccggcgatctggccggacgcgcggatttggtctgggcctcatttccctgtcaggatttatcgctggccggcaacggacttgggatcggcgaaatcgacgccagcgaggatgaaaccacgcgttccggcgctgtatggccttttctggatttgatggacaaacttggcgaggacaaccggaagccgtcgatactggttctggaaaacgttcttgggttattaacgctggatcaagggcgccatttcgccgcgatatgccgccagttaagtaaaacgggttatcgttacggcgcgatgattattgacgcgaagcattttctgccacagtcccgtccccgcgtatttatcgtcgcgattgaccgtcagttttccattcccgcaggtttatgttcacaagagccgctggcgcaatggcattcctcttcgctccttcgcgcctgtaacgcgctttcggaacaggcgcgcggtgactggatctggtggacgcccggcgacgcgccggatacccgaaccagagagcttgccgatattattgagtgcgaagataaaaacgcgttatggcattccgccgatgaaacccgccgattgctcgacatgatggcgcaggcgaatctgacgcgtctggcgaaggcgcaggaatcgggtgagacgatgatcggcagcctttatttacgcatgcgcaaagaaaagggcgttaatcggcaacgggcggaaattacattctcgacggttcttggttgtctgagaaccccgaaaggcggggcttctcgtccgcgtattatcgtcgtccgcggcaataaggtgagaacgcgtttattgtcagtccaagaggctgcggcgctgatggggctgccggaagattttatcctcccggcggcatatcagtcggcttttaaaatcatcggcgacgggcttgccgttccgtccgtccgttttctggccgaacgcatactggagcctctggcggaagcgatacgaaacgatagccgtcagacggagggcatgcaggtatga

SEQ ID NO: 28166 - DNA, 2550 bp, Salmonella enterica
  subsp. arizonae serovar 62:z36:- str. 5335/86
atgaactggacgcctcccgtgaccttcgatggctgggaaagtaagctggtcgggtattttctccggttcggaactgacgacgacgcgcgtgatattcgctggttcgaagtcacgccgtcgacgctcgcggcggcattctccgacagcggagccagcgcggatgaaatagaaaaagcgtttcaggcttatatgtcgaaaataccggatctgccgctgcgccttgaaagcggcatgatggaaagatccaatgacaaatcgcccgggtattttacttatcttgtcatgacgctgcttgtcagcagtcagttcgacgcacaggaagaaagcaatgattttcgcctgaagttacagagctggctgcagacagaacatagttatcaaaatctggcgggcgtgaacgcgatgtggaaagcgttggccgggtggcttgagcggcgaatagagcgcggcgagccgtatcgccgactcaatctaccggaaatccccgcaagctggagccatatcggctataccctgcgtctggcttttcccgggagagcggatctgcgtttgatgcgccgtgttcttacgagccatccgcaaaccgtttcaagccccagactgctaattgattattttcaggcggcgattcaaaaagagaacgcctctcatgcgctgaggcaggcgtttagcgagttcagagatgcctggttttcagggcgcagagcgcttgccgacatgcctttctggcgtttgcgccagcgggctatggcgttgtcctccgatattgatacgcgtaaagcgatcatcgatatgtgcgtcgatttcgacggttcgcggtgttatttcagcgccgccggcgagaatgacgaaagcgttttcgccccttcgttgtcggacgccttattatcagcgtctgcggaaaatagcgacaatctgggaagcgccgcgcaaagcggcttactcttttttcatcaggtcggtcacggacgctggagagctatcgccgctcccgatgcgttttcgcccaaatttcacatcgcgttatcctgtcaatacgccgcgcgcgcaagccaatattttgacgatgcggttacagaaaacgactggattctgacgccgcgtccgcagagccgtcatgcggcgatggagatatttcgcgcgctgaaagcgtcgaccgcgctggatgaacacgtctctcgcccacagttttccgacggaatcagagtgccgggcggatggctgggattacccgcttttttgccgaccatcaaatcagacacgcagaattacagaatttacgcgccccagggaaacggcgcggaaatcagcgtcaggaaggcggatggacgtttgacgtcgtcaattcctcttagcggcgagtttattatcgaacctgagccggaaatcggcgagaaaacggcgccatggcggcggcgggcgcgttttttcgagcgcgccgttccgcgcccggctcaggaagaaagcgccagatatcgtctcgaacgtcttaccgactggagcgcgtctcccctgagcacgccgatattccgcgccgatatccccctgaaagcagaaagcggcgacgcgcctgtcgatcatctccttgaagcgatttacgcaagcggcgccagcggctgggaggaaatcgaattagtctcgcttctggaacgcgccgcagacggcgtcaacgtatggcatctgattcgctgtttgcatgacgctggtctgatagagccgcgcttgcgtcagggctggaaaggccgcgtatggacgaccgtcagcccctcgttgttgcatattagcgccggagaaaacagcctcgtcgttgtggaaggcgccgtttgcgccagccttatcgatgattttcaaaccgcggttttagcgctgggcggaaaatattttcgtcgccgcggcgtcagcgtctggtcccctcccgtattcggcgcgaggatcgatgatcccgtcgcgttatcgcggattatgggatggcagcttgtcgatgcgtcgtcgacgcctgatatgacgccgctcgcgttaacgtccacttgtcgtaccgacgaattacacgcccaggcggcaatctgggactggcgttcaggacgcttctctgcgcatgcggcctccgataacgccgcggcgctattaacgcgtcatgtccatccgggcgggcgcgatcacgatgtgtacaaggttgtttcccggcgcaaaacggcgtttttcttatcccgaaccgccgcgattatcgccgcatgcgttagcgcgcgtcgcccgatgttcagacgcgtcggggggcgtcgtttgatttgtcttttcgacgattgcggcttacccgacgcgctggcggcgggattgcggcgcggcgcgctcagaaacggaggtccgacggaggacggatatgtttatccactcgacgacgtcgctttccgctggctgaatcgactgcttcccggatgcttcgctttgcttccatcgggtgacggcgataacgcaaatcgtttagtttccgcagcgcgccattccggcgggaaagcgcgtctgatatggcgaaacggacgcctgacgttatag

SEQ ID NO: 28167 - DNA, 2097 bp, Salmonella enterica
  subsp. arizonae serovar 62:z36:- str. 5335/86
atgaaagatattccctggtatattggccggtacgatcgacgaaacgatcggttttcttattttaaagtcgtcgcgcagcaaacagataaaggttggcacgcgatcgacaaccccaaaaaaatgtttcctcgtaccggggaggtcgaacttactggttttgacgcatcaaagctacgaccaaatgattggattgtcttccaggttgattcaggcgcccgtagcaaattagcgagagccaaaaatccctgtcgtatttatccttactatgatttatccccggcgcaaaccctccttgagtcgcgtcgccgtcttagtttagaaggcatcgaaacatgcggcgaaccgggtctatgggctatccgcttcgaagcgggcggcgtcattctggcgaacctggcagagtcgaaaccaggttgttttattctgtcaaggaatcagaacgttgctgaatacgcgttcaatgacggcggactcatcgccgtatccgggctgtctaaaaataaccaaatgttttatatgcccggcgcggatgcctcgcccacgcggctccatgactggaccccggataaaaactacattgaaaatgccgctcagcttatcgccgatgccgattcgtctatgatgatcgctacatggcttcgcaagcacgccgacgggcaaaacggaaaattaaaatccggcgtcgacgatctgttggccgccgctcaggccctccgctccggggaactggcgaaaaaactagaagaagaggattctctgtcccgggaactcgctaaagcgctattgaatgacggccatatcgccgctctgcttgaacgccagatacaaaacatcgcggaagaagaacggacccgattgcgctccgagcagcgaaaagcgctcgacgcagcgttttccgacgaacgtctgcgccgtcgcgaagcgattgaagcggaaatgacgctttttcagacggagagaaaaagcgagatcgaacggcaaatcgcgcaatcgcgtttggacgaagaagaaaggttgcgcgcggaattcgcagaaaagcggttaagcatagaaaaaacgctaaaacatgaaaaagacgctttcgaaagcgaaatcgaccggctgaaaaacgccgccgctgatttatgccgtcaaaacgagagtcagcgccagacgttgtcttctctggaggctgagcgcgcagtgtcttcgagcgcgcttcgggatgctgaagagcgcgtcgccctggcgcgaagcgagcttgagaaaatcaatgccgctattgttgaaaaagcgcgccgaatggcgcatgcgacgatacctgagatacgccttcccgccgaagccaaaacagtttcccgcatagaacttgaccgtatcgtcagcgaacacaatttactgacgtccgagggaaaaatactgatggagaaattcctgacgttaacgctggccggcgaatgtccattactgtacggccctgaaacacaggactttctggctatcgccgcgtcgcttatttcttcagggcgcgctatccgacagattgccgatccgacgatgattacctatgaggatctttgggttcgcgcgggaagcggtctggcgacgccgctttaccagggattgttgctgagcgacgccttacggcctcgcacgatcttcgccgttatcgaacgcgtcgaatgttccgccgcgcgcttctggttgcctgcgctgaaagacgggttgcgcaatggcgatctgccccggcgatttctggtctgcggcacaatggcgaatgaagatggcgaagaagcggaaaagataaaggaagaacatcttttcctgcaggtggaaaacatcgtcgatcgcaatgcgattacgcgcgcgccgctttatctttccgccaggcgtcatagcgaactggatcccggcgccgcgccgccagaatcgcttgcggaagtactcgctatcgcggaggaaatgtcgggcggccgcctgaacgcggtaaatacgctgcgggcgactaaagcggcgttggaggccgccgtgtccggcgataaagacaagacgatacgccaaaagcgattagtcgatttgttcgtgaacttacaaaatagcgaaatctgcgccccatag

SEQ ID NO: 28168 - DNA, 5838 bp, Salmonella enterica; identical to SEQ ID NO: 28164
  subsp. arizonae serovar 62:z36:- str. RKS2983

SEQ ID NO: 28169 - DNA, 1236 bp, Salmonella enterica; identical to SEQ ID NO: 28165
  subsp. arizonae serovar 62:z36:- str. RKS2983

SEQ ID NO: 28170 - DNA, 2550 bp, Salmonella enterica; identical to SEQ ID NO: 28166
  subsp. arizonae serovar 62:z36:- str. RKS2983

SEQ ID NO: 28171 - DNA, 2097 bp, Salmonella enterica; identical to SEQ ID NO: 28167
  subsp. arizonae serovar 62:z36:- str. RKS2983

SEQ ID NO: 28172 - DNA, 5943 bp, Salmonella enterica
  subsp. enterica serovar Bareilly str. CFSAN000235
atgaataacccactggaaacatttgaatcgataagagatttttatatttcgtatcttgaaacggccttccgtattgattcatcagatatacagtctgaacggcgagcgttactggaacagcaagggacattatgcgccgatctatttcttgagccgatgccccgatatcagcactatggcttaactatcagtgaattacgaaatgatgctcatggtcagacatggttgcctgggtttaatgcgcaacaaagggcggcatttatcgacctctgtttaggtgggcttctgccctgcaataaaacagatccggctaagggacgttttaatctttatacccatcaactggacatgctgaaaagaggggtacagccagggaagccgggcatcgtcacctccggaaccggctccggtaaaacagaatcatttttgctgccggttttggcgcagatcgcaaaagaagccacaggctggccgcaaagtccggcgttgaagcactggcaaccgtggtggcagaaggtagcggataaacagcccacctttatgcgcgagcatgaggccgtcgcacgtccgaaagcggtacgcgcgctgattctctacccgatgaatgccctggtagaagatcaactggtacgtatgcgacgggcactggattccagcgaagctcatgatgtcatggatgcacattttggcggtaaccgaatcttttttggccgttataccagcgcaactaaagtaactggctggctcaaacatccccgactcagtgaagaaaaaaatgagaaaaagcgcgtggctaaaaaaatcactgagctacgtgagtatatgcaattaacggaagagacccatcaggaggctgtacgacaagcacagcagggtaaagataaagaattatcgtttaacttccccagaactgttggtggagaggttctcagccgctgggaaatgcaaaagacaccacccgatattctgatcaccaacaccagcatgctctcaacgatgctggttcgtgaggtggacgatcctatttttgaacaaacccgacagtggattgagcgtgaccctgatgcctatttttatcttatccttgacgaacttcatctacagcgaggaaccgccggtaccgaagtcagctacttgcttaagcatttgatcagtcggctggggctggatcaggaaaaacaccgacacaaattgcgtattctggcctccagcgcctctttacccgttgaaggtcctgaaggcgaacaaagcgtcgaatatttatggggaatgtttggtcagcggggactaccttcaggtgctacgtctagcgactggagggaatgtattatcaaaggcgacacccttcccccgggcaacatgtctcttttccatggggacctggaggcgttttatcacgcagtgcttcagttacagcaagcaccacttacatcattacaacactggcaaaatgtcgcccgcagcatgggaatgacaaccagtgaagtttctacagagcaattggcgcaacgtgtcgtcttacaggctgccaacttgcttgaaagtggctgctatacggacgatctctctccgagagccacgtcaattaaaatgctcagttcacgcctgtttaacgcccaaccccatagtgaaaaagcgctccgggcattaatctggttgcgctcgactgagggagactggtcgcaatggttttcacatgattttcctgatgatatcggcgcgccgcgtttccgcgcgcatgcttttttacgcgcactggaagggttatatgccgcgccattgcccgcctccagcgccgcatctacgcaagaaatcaatcaccgctattttggcgatcttaccgtagagtccggcttacgttacggcaaagataaaacatcgcggcgtgtcgagttgctctattgtgaatgttgcggcaatctctttttgggcggtaaaccttcagtcttttctggttcagaaagtcgaattgaacttttacccaacgacccggatacggaacagctaccggaacacgcaaaatcagtcatgatagaacgccgatctgctgaagaatacgcgctatttatgcccgtcgttgaacgtttctggccgaaaggcaacgaaacgttaaatggtgatgatgctttcggtacatggggcaaagccagttacgatccatttaccgccaccattcaacacccagtatcgctcttaaaaccgctacctgaaaaccatatcgcgggctggttctattacgtcaaacccggtgaatttgcctccccggaaagaggccagtcatccagccagtcaccgggaacggcgctaccttttcagtgtccggcatgtggtacatcctacaaatacggcaaaggtaagctctccccaatccgtagctttcgcgtcggtttttcgaaaacgacacagctactggccagctcgctaatggcggaactacagcgctcgggtaaccgtgagcaactggtaacgttttcagacagtcgtcaggatgccgccagggcggcgctcgatctggaatcgggtcatcatgacgacgtcagacgagaaattgttgtccattcgctacagtctattgcggctgataaaccgtcccataaccaactaaaaatacgccaggcagagatagaggaccggaacaaaacactgattaacctcaacgtaaggtcagatgaggaagaggatgagatggatcgactcgctgatgaacggaagaaaatcagagggttattatcaaaacctgaaactgacagcatacctctgcgtgaaatcctcgaacctgaatcaccggatgcaggccaaccgcttggcttgctgttaagggcgcaggtagatgccggtattcacccttccgatcgtactggcatcgcgcctgttcccgatcctgaaaaacatgaagaaggtacgctgacctttgcatggcaacaactctttgaaaagaatgcgcagggggtgtggtgctggaaggcgcttccatcctatgaagataacctgctggtagcacgacaggagatttcacgcgatctgaaacggctggtgggggaaagcgtattcagtaaaacctacttcgcgttggaagagtccggctggggttatccctgccttccgattaccggaaacgactcacgggaacatctcgcgatttatgacgcaatgtttcgcgtgttggcggacgcgtaccgggttactccttcacaatatacaaagccagaaaccccatggagttcagcgagcgatgtcaaatctagaaaccgcctgtaccgctttactcaggcaatatgccagcgctcgggaggcgagcctttatctttaattgatagttttctccggcgactggagctggcgggtcatcagggcggcattattgatattggcaaaatgcactttaagctggcggaacctgccgatcgcgtctggcgttgctcccgttgcgggcgtatacacatgcacaccggcgcgggaatctgtactcgctgctactctcctttaccagaaacgccatgtagcgacgcaaaaacgctccagatgcaacactatctcggcaaacgcctctcacattcttctggtattcaccggatgcgctcagaggaactgactggaatgaccgaaaacccggcggcaaggctacgccggtttaaaggtattctgattgctgacgatgatgatattttgccggaaggaatgaaagattttgcgcccgatcgagatcttgaccgggcagctcgcgtggtagatgttctttccgtaaccacaaccatggaagtgggagtggatattggtgatttacgtgcggtctttcaggccaacatgccgccacagcgctttaattatcaacagcgtgtcggacgagccggacgacgtggacaggcgttttcattcgtattaaccgcgtgtcgcagcaagagtcacgatctgttttacttccgccatccggaaaaaattaccggcgatctccctccgccaccgtttttgaccacaaagctggaaatgatctgccagagactggtacgaaaaatttggctggtgtcggcattcaaatggttaaggcagcaaacggaaaaagccgatcacccatggccggttgacgactacgcgcatgcccctgataaccacggtgagttttttccggtgcactggctgaaagaaaaccaaacggactggctgccaaaaatccggcaggccatcgaagcagccatcctggcacgcgatgaatttgcccggacttgcacgcagcaagaccatcatttgttccagagagttattcagcctttgacgccggaacaactgattcaggatattaacgccgtactaaacgacagtgcaatggaggcgaaaggactggcagaagcgctggcggaacacggtaaattcccaatgtatggcatgccgacccgctctcgccttttgctgacaaggcccgtcagcacaggcgaaaaagaaatcgaatttgccagcatggatcgcgatctggatattgcgatacaggaatttgcccccggaaaaattctggttcaagacaaacgacgctactttacggcaggttatagtggaatgcttaaacagagcagaaaaaatccacgatcattttattcaaatgcccccgaaccgggtgaactcagaacaatgaccgcctgtccggtatgcaacatctgggctccggcaaactctctggccaccgaatgtactatctgtggtgccgttatggataaggcggaacgctatcaatgctatgttccttacggatttatcaccacgctggaaccaaaatcggccaaagaggattttgatcaaatcctgaccacggccagtcgtgtatcaattgcagaagcctacactttttctgcaatgccagagcctgacgttaatgtggcgatacagctccagccacagacatgtctgcaccgcctgaatcggggaatttacactgataaaacatggcgtggtttcagcgcaacacaggggagcctatcggtccctttcagaaagcaggggacttaccagccgctttgggcgaaccgggtttggatggataatcaaattattgaggccgacctgttagttaaaaaccgctttaccgatcggggagaaacccgaaacacattttaccttgccgcgcctaaagtgactgatctacttgcgctgatggttgcccaaaccccgccgggtctccggctacagtattccactctaacgccggcattcagagctgctgcgctctcggcgtcttttatcattgtcaactatgcatcaaaagagctactggatattgatcctgaagaaatcgaaattctggaaccccgcgttcaaatgctgaaaaacggtaagtcggtaccggttctgcaaatggccgatcgtctggttaatggttcagggttatgtgaacggctacagcagaagggcgcatccggttctctcattatccttgaggtcatgaagaatattttaaataacaaaacggcctacccgctggctgagttcctgcaatccgatcatcgcgaacgatgctttcaagggtgttatcactgcctgcaccgatacggaaaccagccgtatcacggattgctggactggcgtctgggactggatgttattcaacttcttctggatcaaacctataacgccgggctgaacagtgattttacatctccgggcgtgtctgactggccggaaaatgccctacgattagccaaagaggccgcttcgctatacagcgacagtgacgtaaaagtgatagggaatatacccgtgattcgcaccggggacgggcgctgggccgccgtactacatccattctgggatcccgatgctgtatttgctgcaaaccccgaacttgaggcattttcatatgaggtggacgtagacgcgacgaatacttttgcattgtcccgccgcatggggactgaaatggcgaaattacggactcaggcgttctcatctcaggagtga

SEQ ID NO: 28173 - DNA, 1086 bp, Salmonella enterica
  subsp. enterica serovar Bareilly str. CFSAN000235
atgagcagtgtttttgagagagaaaacgataatattcgggtactttcactattctccggttgtggtggtatggattttgggattacctcagccggtggagacatcgtctttgccaacgatgttgtagagaatgcctgcaaaacattagggaactatttccccgatactgatatcaggcatagcgatatctctcaaattcagtcttttccagatgttgatattgttgttggtggctatccctgccagtcattttcaatggcaggtaacagaaaaccaaacaatgacgacagaacaaacctttataaacactttctacgggtattagagactgttcggcctaagtattttgttgctgaaaatgtttctggcttgaaacatttaggtgcaggtagctttctggaacaacagctcacggcatataaagctgccgggtaccaggtcagctatcatatggtaaacgcaagggcttacggcgtgccccagtcgcgcaagcgtttgtttattattggcgtcagaaacgatcttgggcaatgctttgaatttcctgctgaaacacatggcaaagcgacaaaaaagaatcctcatttaaaaccctatgtttcacatggtgaggccattagggatttaccactatggcctgaaggtgagttttacgaacgaccacatgatcctgaagggcatttctcatggtatttcatgtcacgaaatcgtaaagctctatgggacagccctgcttataccgtcgtagctaactggcgtcatgtgacattacatcctgccagtccggtgatgaagttaacatggtcaaacctggaggatggctggaagcagcgctgggacttttctgatgaatatgaacatctaattgttgatacttctcgtcccaaactggaacaggcaaggcggttatcatggcgggaatgtgcacgaatacaaacttttccacagggttttgaacctgtaggtgacgtcgagtcaaaatttacccaaattggtaatgctgttcctcctctactggctgaggttctttttcggcatttgttttctggtgccggtttgaaaaagatggcagcgaacggtaattag

SEQ ID NO: 28174 - DNA, 2766 bp, Salmonella enterica
  subsp. enterica serovar Bareilly str. CFSAN000235
atggatgattctttcccggttactttagagcaatggaatgctgaactagtaaatatcgtcttttttgagtcttcgcatacgggctcgactttaagccgaattgatgccacggggcgcgtttttgagcaacttgcaggttcacgtagcaaagaggatgctaagcgaagttttctggattcgtttggaaaaaaggcgtctaaaatccaggatgcactcagggatgagtcgcggttagatattttagcgcaaagaaaaggataccctacttattttgccattttatatttaacattgcttgctgccagtgctgatgatgagacgcatgacgaaggggattttcgggttcgattttctgtactgctcggttttgataaaaataaaaaatttgtttttactgaattacccaatttatgggaaagattagaacgatggagtagtagaaaacaaaactgtacccgtttagtcctcccagaaccatcaaaacatgaaagattgattgggtattctaagagaattgcttttccctgctataaggatgaggtttttttacgggatatactcgtcaataatgaattagatagccattcaacttttgagtcagttaataagctagtacatcaatatctatcttattttggcgagatttttaatcaggagtttattgagttcagaacattactttcaaaggctgccatgcggcaggcttatgactctcctttttggggcgcggttcgtgatattactgtacatactgagagagaacaactcaaagagaatggtaagtattgtattcacatggagcttaatgattcaggtcatccagagatttatcttcttatggatgacgctgctgttactgcctcagaaattaagcattattactccttgtctaatgaaatagagaactataataatatatattacgaacgagacataggtactacattaaattccctggatttattattaaaaagacggaagggttatttctataaatcacgagcgggggctgcactgcggtctgggtgtttgccgctttttcgtgatgatttttttcatattagttcagaaggagattattatgataattctccactctatttaattcttcaccataaatatgcagacagtattttcatagccttgaagaatgctggtgaaagagcacaacgtcgggatattaaatctaccaagtggtcggtagtttcttccgataacgttggcaggcaaacgctggataagatagctcatttgttaccagaggaagcccgtcgttttctaatacagggatggcgccctgcccggcctcgtatgtcaggcgcagctcggtttggacaggctatactgcttaaccctgccagtacgcctattattcatatgcctgaagtattaagaggatgctatgtcattagaaataaaaacggagaagaattaacccatggctcgctatcgcagggggctgaaggattattcattccaccagaggaactgatggaaatatctggtcaggcattttgtcgctatgaacttacgttggcgtattcagatatcccagtaaattttgatgtacacgtgttagatcatgcgccttacgccacttattgtaaaattacagagccacatgattggttgactgatggaccatcgggagtattaatggcgttaggggatacgacagtgctccccccactgaaacgcgaagaaataacgccattgagtggtgctcagatgttatggcagtatgaaaattgccttcctgtaacatgtcaatataccgaattacataatatacccgcagcatttgactggatcgctgaggcgctggccttgcgttttcagcgccgtagcacattgccttttggtgaattaaaacaacacattgaaccagtatcacaggtaacaaggatacccgaatggcaattgcgtcgcatgctctttgccgctggctggctttgtgtagtacaacgacgttattcgccatattcgttagtctcattggctgaaagaaccatttccgttgatgtcactgaacagggaattattgcccgaattatgggaatgtttacaagaagtgaacgtaatcttctacaagaagcacttaatgacggtgagcgaatagggcgccggttagttgaggataacggctgttcaatggggtgtattgaattgcatctgtcagccagagaacgtgtccatactttcattgagcagtttgggttacgtttgattaattacgacgatttacccgtcaatgctttgagtggagtattgttaccgtcgtctcaaatgcagtttatcccgactttacccccggatctccatgtatcgctttggcaagctgaaaaataccaatggtcagaagaacaacggctaactcaaacggctaataacctattgttacgatgtcaggaaaaacagcgttatcgttattttattcggcagaatgccggatactggcaaaccgatagcttctcctgggccttaatggctcagatgatatgttcaggagtaacgtttggtgtgcgtaaaggcgatagtgactggtcctggtcaacgaagttcattgcgttaccgccctccgttttacagtggtggatccacgttgctcatggctgtttgtcgataacagataatggtagctacttatttgcaggcggcaaagtaccactctgggacaatgtaatgaccttcccttcctgccaacgagcgttggcacgacggagcagagcgctgacaatacgcaagctgcgcagagccttacagtaa

SEQ ID NO: 28175 - DNA, 2781 bp, Salmonella enterica
  subsp. enterica serovar Bareilly str. CFSAN000235
atggctaaaaagaaaagtattatcagcgaccggctgggccaaatgtactacttcggtacagaatctcatgaattgagcagatgcttgcaagagtgcaaacaacgactcaccagaaatggcgctaaagcggataatttaccgaaaggaccagagaaaaggttacattttctccgtacgttaccacttaaggccaaacctgttgtgtctgattggcttcgtgaaaatttaacgtttcctgaacaaaatgacccacaaatcgttcttagggatctgttagaagcagaaagtaatgcggaagatattgaactctgtaaaccgttatggcgcactattcttggattctatatttcttctgactgtcctgaaattataacgagattcctgaatggtgaaaaaattgatttaccccaacaaggtgtttctgactccttgacaattaatgtcactgatgaagacattgaacaatgtgctttaattagccagggtaaagaaattcctataccggagcgtactattccactgtttattggaggattggttgacgtactcaagggaacgcatacagctgataatcgatggcggacaaagctatcagaacattctttaccgctggcacgaaaactgggtgaacttatcgatcagtttgaagctagtaacgacattaaagcgatggatagtaccagtattatacaggctcctcccgttgtatccaaagaaatcgacggtacgatggatgaggttatgttcattggtaaagtgttagcgctaactgcgtccggtgctttttttgttacaccgattagtctgttaattgatggcaacctacgagacctccctgaggcactggtaaaagatctttaccctcatagcggtgaagccattggttttgagaaccatttcagcaaaaaatttgctcggggtgaaatggcaatatggaaagcccgatatcagccgtctgataaacctgcgcagtatgtcattactgactacctgtcgcgcgtttatcctgtagtcgcgctaccccatgcctccgatgagcctgacgctgtcagggagtggctactcaccaactaccagccgcaaaacgatacgccggtcatttttcagctaagtgatggcgtatccctgagattaccgggtgacttgcttgatcctaaaaaatatgactttgatatgccgctggagagttatcgtcaggttcctcagacactacttaattctcatgccctaacggtgatcactgaacttcctcaggtgagtgaaaaatatgattgcgctgaagccagcacgtggatcaaacgcctgcttaaacgaactgattcagcaaaatatttccctcaatttagtaaagggcagctacaaaatttaactcattttattgctgaacatgagtctgataacgaggcgtcctatcttcgcgcagtatctcatctggaacagatagcagatatgagatcctttcttaatgatacgactcaacagttactggctttacctgaggttgagacgcaaattaatattgagaaacaggaaatattggctcgttacgaagacgaacagcaccagattaaacaatcaataacggtattatctgaaaagaaaatacagcttgaaaatgaaatagccgatcagaagaaaaagttgaaaaaagaaactgatcgcattaataaagcgctacgtcagcaagaaaatgaactggaacaacggataaaaaagaccttcgaagccgcatctcaagcgggagtggaaacgctggcccagacagcgctactgcgggcaataatcaaaaatgaaacagcacaggagcaacctgtccaacaacgaataacctcagaacctgtagccgaatcagcaaattctaatttcccattagcagagacgaatgctctgactcgcaagcatcaactgatatcggctatcgaaaaacaggcactggcgacgggactaagtgaatctttattatccagcctgattgctactgcgagtattacacccgcggtcggattgatgggaaaacagacaaaacaggctatcgcctcattagcgaaccttttagctggtaatgtttggggggaagtgtcggtacatagcgatcattttagcttcagtgatttaatgaactcccccacactgatccgcttatctggcgatgctcttaccatgacgctgggtgattttttgacccaacaacaagaggcagggctggcgagcatcgttgaattgcgtggttttaaccgcactccgccagaaactctactccctgaactccatgagtgtttattcagaactccctatcctgccgcatgcagttggacggatcggcggcaggctctacgacatttacccattcggcacccgatgctttttttactcacattcaccaccgggaaaagcacgtttccattgcaggctcctcttgctcaccagttacccctgtttctggcagagaatatatggtcggatgaacgaccatttgcgcaaaatactgacatcacgccttctcgtattactccagaactatggcagacaatgtatgtgggcaaccaccagccagggcatcaggcttgtgctccatgggaagcgctaaaagcagcgctactctctttacttcctgatgaacaagcgcaagccgttgcccgtctggcttacggtctcggccgtagtacaacacaagatattgcgaccacgattgacgctcttgccccagaattagggccatatgttcaggaaatgactaccggcgaatcggcaagcgtacttgagcaccttttccagttataa

SEQ ID NO: 28176 - DNA, 5943 bp, Salmonella enterica; identical to SEQ ID NO: 28172
  subsp. enterica serovar Bareilly str. CFSAN000236

SEQ ID NO: 28177 - DNA, 1854 bp, Salmonella enterica
  subsp. enterica serovar Bareilly str. CFSAN000236
aatatatattacgaacgagacataggtactacattaaattccctggatttattattaaaaagacggaagggttatttctataaatcacgagcgggggctgcactgcggtctgggtgtttgccgctttttcgtgatgatttttttcatattagttcagaaggagattattatgataattctccactctatttaattcttcaccataaatatgcagacagtattttcatagccttgaagaatgctggtgaaagagcacaacgtcgggatattaaatctaccaagtggtcggtagtttcttccgataacgttggcaggcaaacgctggataagatagctcatttgttaccagaggaagcccgtcgttttctaatacagggatggcgccctgcccggcctcgtatgtcaggcgcagctcggtttggacaggctatactgcttaaccctgccagtacgcctattattcatatgcctgaagtattaagaggatgctatgtcattagaaataaaaacggagaagaattaacccatggctcgctatcgcagggggctgaaggattattcattccaccagaggaactgatggaaatatctggtcaggcattttgtcgctatgaacttacgttggcgtattcagatatcccagtaaattttgatgtacacgtgttagatcatgcgccttacgccacttattgtaaaattacagagccacatgattggttgactgatggaccatcgggagtattaatggcgttaggggatacggcagtgctccccccactgaaacgcgaagaaataacgccattgagtggtgctcagatgttatggcagtatgaaaattgccttcctgtaacatgtcaatataccgaattacataatatacccgcagcatttgactggatcgctgaggcgctggccttgcgttttcagcgccgtagcacattgccttttggtgaattaaaacaacacattgaaccagtatcacaggtaacaaggatacccgaatggcaattgcgtcgcatgctctttgccgctggctggctttgtgtagtacaacgacgttattcgccatattcgttagtctcattggctgaaagaaccatttccgttgatgtcactgaacagggaattattgcccgaattatgggaatgtttacaagaagtgaacgtaatcttctacaagaagcacttaatgacggtgagcgaatagggcgccggttagttgaggataacggctgttcaatggggtgtattgaattgcatctgtcagccagagaacgtgtccatactttcattgagcagtttgggttacgtttgattaattacgacgatttacccgtcaatgctttgagtggagtattgttaccgtcgtctcaaatgcagtttatcccgactttacccccggatctccatgtatcgctttggcaagctgaaaaataccaatggtcagaagaacaacggctaactcaaacggctaataacctattgttacgatgtcaggaaaaacagcgttatcgttattttattcggcagaatgccggatactggcaaaccgatagcttctcctgggccttaatggctcagatgatatgttcaggagtaacgtttggtgtgcgtaaaggcgatagtgactggtcctggtcaacgaagttcattgcgttaccgccctccgttttacagtggtggatccacgttgctcatggctgtttgtcgataacagataatggtagctacttatttgcaggcggcaaagtaccactctgggacaatgtaatgaccttcccttcctgccaacgagcgttggcacgacggagcagagcgctgacaatacgcaagctgcgcagaaccttacagtaa

SEQ ID NO: 28178 - DNA, 2781 bp, Salmonella enterica
  subsp. enterica serovar Bareilly str. CFSAN000236
atggctaaaaagaaaagtattatcagcgaccggctgggccaaatgtactacttcggtacagaatctcatgaattgagcagatgcttgcaagagtgcaaacaacgactcaccagaaatggcgctaaagcggataatttaccgaaaggaccagagaaaaggttacattttctccgtacgttaccacttaaggccaaacctgttgtgtctgattggcttcgtgaaaatttaacgtttcctgaacaaaatgacccacaaatcgttcttagggatctgttagaagcagaaagtaatgcggaagatattgaactctgtaaaccgttatggcgcactattcttggattctatatttcttctgactgtcctgaaattataacgagattcctgaatggtgaaaaaattgatttaccccaacaaggtgtttctgactccttgacaattaatgtcactgatgaagacattgaacaatgtgctttaattagccagggtaaagaaattcctataccggagcgtactattccactgtttattggaggattggttgacgtactcaagggaacgcatacagctgataatcgatggcggacaaagctatcagaacattctttaccgctggcacgaaaactgggtgaacttatcgatcagtttgaagctagtaacgacattaaagcgatggatagtaccagtattatacaggctcctcccgttgtatccaaagaaatcgacggtacgatggatgaggttatgttcattggtaaagtgttagcgctaactgcgtccggtgctttttttgttacaccgattagtctgttaattgatggcaacctacgagacctccctgaggcactggtaaaagatctttaccctcatagcggtgaagccattggttttgagaaccatttcagcaaaaaatttgctcggggtgaaatggcaatatggaaagcccgatatcagccgtctgataaacctgcgcagtatgtcattactgactacctgtcgcgcgtttatcctgtagtcgcgctaccccatgcctccgatgagcctgacgctgtcagggagtggctactcaccaactaccagccgcaaaacgatacgccggtcatttttcagctaagtgatggcgtatccctgagattaccgggtgacttgcttgatcctaaaaaatatgactttgatatgccgctggagagttatcgtcaggttcctcagacactacttaattctcatgccctaacggtgatcactgaacttcctcaggtgagtgaaaaatatgattgcgctgaagccagcacgtggatcaaacgcctgcttaaacgaactgattcagcaaaatatttccctcaatttagtaaagggcagctacaaaatttaactcattttattgctgaacatgagtctgataacgaggcgtcctatcttcgcgcagtatctcatctggaacagatagcagatatgcgatcctttcttaatgatacgactcaacagttactggctttacctgaggttgagacgcaaattaatattgagaaacaggaaatattggctcgttacgaagacgaacagcaccagattaaacaatcaataacggtattatctgaaaagaaaatacagcttgaaaatgaaatagccgatcagaagaaaaagttgaaaaaagaaactgatcgcattaataaagcgctacgtcagcaagaaaatgaactggaacaacggataaaaaagaccttcgaagccgcatctcaagcgggagtggaaacgctggcccagacagcgctactgcgggcaataatcaaaaatgaaacagcacaggagcaacctgtccaacaacgaataacctcagaacctgtagccgaatcagcaaattctaatttcccattagcagagacgaatgctctgactcgcaagcatcaactgatatcggctatcgaaaaacaggcactggcgacgggactaagtgaatctttattatccagcctgattgctactgcgagtattacacccgcggtcggattgatgggaaaacagacaaaacaggctatcgcctcattagcgaaccttttagctggtaatgtttggggggaagtgtcggtacatagcgatcattttagcttcagtgatttaatgaactcccccacactgatccgcttatctggcgatgctcttaccatgacgctgggtgattttttgacccaacaacaagaggcagggctggcgagcatcgttgaattgcgtggttttaaccgcactccgccagaaactctactccctgaactccatgagtgtttattcagaactccctatcctgccgcatgcagttggacggatcggcggcaggctctacgacatttacccattcggcacccgatgctttttttactcacattcaccaccgggaaaagcacgtttccattgcaggctcctcttgctcaccagttacccctgtttctggcagagaatatatggtcggatgaacgaccatttgcgcaaaatactgacatcacgccttctcgtattactccagaactatggcagacaatgtatgtgggcaaccaccagccagggcatcaggcttgtgctccatgggaagcgctaaaagcagcgctactctctttacttcctgatgaacaagcgcaagccgttgcccgtctggcttacggtctcggccgtagtacaacacaagatattgcgaccacgattgacgctcttgccccagaattagggccatatgttcaggaaatgactaccggcgaatcggcaagcgtacttgagcaccttttccagttataa

SEQ ID NO: 28179 - DNA, 5943 bp, Salmonella enterica; identical to SEQ ID NO: 28172
  subsp. enterica serovar Bareilly str. CFSAN000754

SEQ ID NO: 28180 - DNA, 1086 bp, Salmonella enterica; identical to SEQ ID NO: 28173
  subsp. enterica serovar Bareilly str. CFSAN000754

SEQ ID NO: 28181 - DNA, 2766 bp, Salmonella enterica; identical to SEQ ID NO: 28134
  subsp. enterica serovar Bareilly str. CFSAN000754

SEQ ID NO: 28182 - DNA, 2781 bp, Salmonella enterica; identical to SEQ ID NO: 28175
  subsp. enterica serovar Bareilly str. CFSAN000754

SEQ ID NO: 28183 - DNA, 5841 bp, Salmonella enterica subsp. enterica serovar Cubana str. 76814
atgttagatccgattggcggctttcgccgtattcaggatttctttatatcatatattgaaaccagtttccgaattgccgatccgttcgtagcagcgtcaaggcgcgaattgctgaacagcagcggagagttcgccgcagagccctatattgaacccgttttacggtatgagtcttcggataaaactcttgaagatttggccgatatggaaaacggtccgttaaagagcttatcgcaggaaggccgaaaagcgttcgtcgaactagcgttatccggtttgtttgattcaaaatccggcgacgcgtcttggcggcgtcggtcagtccatgcgccttatattcatcaggtgaaaatgctggaacgaggcattcgtgccggtcgccctggcatagtgacatccgggacgggatcgggaaaaacggaaagctttatgttgcccatactggccgcattatcgaatgaggcgatcggttggcccgctccccgcgacagttacctgcaaaatcgctggtggcataacgcggaagcgaactgggtttctcgtcgtaaaggggaaaaacgcccggcagcaatcagagcgttagtgctttatccgatgaacgctttagttgaagatcaaatggcgcgtttgcgcaaaacgctggattccgatgaagcgcgacagacgatggaacatcgtttcgccggaaaccgcatcttcttcggacaatataccagcgccacgccggttaccggttatgccagccatcctcgcctttccggcgatcgtacggagaaaagccgccgcgcccgtaaccttgaaaaattacgtaaggcgttgaaccgaatcgattgcgatcaacaggccgctcgcgcattcgacaaggaaaaagaaaaatcgtcggagaagacccgatatatctttccttcaacagacggcggcgagatggttactcgttgggatatgcaggccgctccgcctgacgtactcgtcaccaacgcttccatgctgggagcgatgctttcgcgagaagtcgaagacgctattttcgacatgacgcgcgaatggcttatgagtaatgaagacgcttacttctatctggtattcgatgaattacatttaatgcgcggctccgcaggaacggaaaccgcaatgttgattaagtcgctaatcattcgactaggactcgacgatccgaagcaccgctataagctgcgtttgctggcgtcttccgcgtctttgccgatggaaggcgcggatggagaacaatcgagaaagtatctacgcgatctcttcgctcccttcggcacttgtcgcgatccccgggatgaaggcagcgactctccggaattctggcgtaactgcgtcgttgagggtactcccttcatacctgaaccagaaagtaaagttgacgcgcggccttttgccgccctgatgaggatggcgcttacagggcaaggcgacgttgtccgccgcgtaaagatgacagacgagtttgagcgagctttagttaacgcttttcaggctcttggcgtaaaagagcgaaatatccgtcaaggcgttaagctggcggcggaaaccgcagccgcgttattaacccacgcctgcattgaaaaaaaaggcgacaagccgcgcgccacgtctcccaagcatatcatcgacaaaatttttctggcggaaagcctggaaggagagaaggaatctgagctcgcgttacgcggattaatgttgttacgcgcgcttccggattccgtacttgactgcgataagcctgacgccgctacgccggcttttcgcgtgcatacgttcgtcagaaatattgaaggtttcttcgcgtcggtctcgcccggagagcgaaaagcgaaattcgccgatttttgcctagaacgtggcctgtcgcacgcgccttcaacctcacaagaaaagcgcggtcggcgtttattcgaaatgctttattgtgaagcttgcggcgatttactgcttggtggtcagaggggacaaaattgcggaggcgctacggtagaactattaccctcgacgaccaatcttgaaaatcttcccgaacgccccggcgcggaatattacgatgatatggcgctggatgaatttgcggttttctggcctgttgaaaaaacgcccgccgctagtgaagccagtgaaaaaaggtgggatgtttggcaggaggcgacgctgaatcctgtcacaggtattgcgactgtcgggcaagaaacatcgccattgaaccccgaggcgattcgcggatatctctattttcagaacccgcccccggcgaaaaaaggagagccggtaaaacctccttccgcacaacctttctgttgccctaactgcggtatcgactattccagtcgaccggcaactaaccgcgccagaacgcctattcgcgcattccgtaccggcgtgacgaaatcatctcaactggtagcgacagagctattcgaattgctgcatgcgataggcgcggatgcgaagagtattgtcttttcggatagccgacaggatgcggcttcgatggcgctggagatcgaacgcctgcacttacgcgatttgcgcagggaaatactggtcgcggccgccagaacgatgatcagcgaggcggaaaaagaatatattccagaaaaagaatttaaagaaaaaagagataaagcgatacaagctggggatgatgatgaactcgacaggctgtatgagctcaaaacaaggcaaaaagatattgcgagactttgtaaattccgacgggtaaaaatagatagcttattggagtcagaaggagactccatcggaaaaatatcctcagaattagctgggttgggaatatcaccttacaaatatcgcccgagcgctgatggaaacgacaaagtcgtttggtacgaaaactttgtaaaagataagaacattgttaggtaccacgaaaaactttctttatctgacaggctggcgatcaaacaaaggattatagacgatcaatctgaattgatagacgatgttattttcgccaatacttttttcgcgttagaggaaacgggtctggcgtatccctgcgtctcggataatgagaatacgcccgaactcgacgcctggttaagagtgttcgcaggcgtttatcgcgtaaaagaaaacaaatatgtcgatcctgaacaatccgacggctggtacgttggagaagatattaaaaaagcgaaagtcaagcgcgtcgccagagccgtattcggcgacgacaaatatctggataatttgacgctagtcttaaatcagttcgctgatcgagagcatacggcagggctattcaatattggcaaattgttcctcaaggtagcgaaatcaggcgatccctactggcaatgcggcaactgtgggcggatccacttacatttagggtttaaacgttgtacccgttgtgcggaaccgcttgatatcactcccaaagattctgttgaaacgctatgggaacagaatttccttggcaaacgcattgtacgcggcgaacgggacggcgttaagcgatttcgattgaacgttgaagaattgacagggcagactgatgacttttccgatcgacttcgtaaattcaaagggattttcgtcgataagatgagcgaacttgaaaaactggacgccgagatcgatatgcttgccgtcaccacgacaatggaggttggtatcgatatcggttcgcttcagtcggtttatcaggccaacatgccgcctcagcgtttcaattaccagcagcgcgtcggtcgggccgggcggcgcggtcaggcttattcttttgtcattacgttttgccgtggacggactcacgacgcctattatttcgcccatcctcacgcgattacaggcgatccgccgcccccaccctttttggcggtagatcacgacgctatcccattaaggcttttgcgtaaagtctggctcagaagcgcctttaatctattgcgtgaagaagatcgcgagaacgggatagattttcctggcgataaacttgtcccgcctgacgttcatggcgaatatgtttctacgcatgattactattatgacgataacgcgaactgggctgaacgattgcagggtgcgctggaagcgacgcagagcatacgcgaacgttttatcgaagcgtcgacgttcgatccggaacaacgccagaatcttcattccgcattgaatgcgaaaaaaataatcgatgaaatcgccgacctgaacgcttacgcgcctgacgacaacgtggggctcgcccgttttctagctgaatgcggaaaattgccgatgtatggaatgccgacccgggtacgcaatttgtatctgggattacgtgagaaaaaaggtctgaacaaccagactgaatacgaatggtcgacaatggatcgcgatcttgaccttgcggtattcgagtatgctcccggctcggtattaattaaggataagaaaaagcacaaggtgatcggcttcacaggaaattatcgggaaccgcataatcggaataatcgcgtgtcggatctctcgacggtgggctcgtggctggagtcatccagtcatgtcgcattttgcccggcatgcggttccgcaaagctggaattgcgtcaaccagacaatgaaattcaatgtaaggattgcggcgcgcctataaatcctgacgagttcaaactctacatcacgcctgccgctttccgtacggatttcgagcccaaagacgatctggatagttttacccgcatgtctttaaagactaccgcgacagtattaaacgaagaaactccgacacactgtgatcccttgatcatacgacgtggagaagtcactatactgcgccttaacgacggtcctattaatggagaaaaagaaggagaacgttttactgtcgacctcacaagcgatcaaaaagcgccggttcctttcgttgcttaccgctcgccgattaaaggcgagcaagcgattgattctaattggttaaaagaacaagataattcacgttggcggcgtaaaggcgagagcagaaatttcggtctggtctccagtaaggagactgagtcgcttcatctcgaattaacaaggttcgatcctcgtcttaatttgaatatggtcgccaggtatggcgagcatatgcacttgcctacgcgagcggcggccatcagcgcgattcagatattaacgcataaggccgccctctatctggatgtctcgcctgatgagttcgaaacgcttgaacctcgattgcattttggcaaacctatactgcagatcgcagacgcgttaatcaatggctcaggattatgcagacgtcttgccgaaccggcggttgccggaagttctcccttaataatcaaattgctgcatgaaattctgacagatgaacgcggctggccgatggctgattttctaaagaaagatcatccagttcaatgtcggacagcatgttacaaatgtatacaacgctacggaaaccgccaatatcacggcttactggactggcgtttaggaatagcctatttacgcgccatggttatgccggaattcgcatgcggcctgaatgttgaagactggaaccatccagaaatgaaaggatggaaagaaagagcgtttgaacttgcggaggatgtcgaggcgttacgaccggggactatcaaattgttaaaggaacattctttaccagttcttgaaataaatgatggaaaagatctttggcgcgcggctgttacacatcccttatggcaatgccgagacgctgaacgtgatgccctaattggttcttttggattagataatataggagcgccattacgatttatcgacacctttgaactggaaagacggccactgcgcgctttggcgaaacttaaccgaggttaa

SEQ ID NO: 28184 - DNA, 1236 bp, Salmonella enterica subsp. enterica serovar Cubana str. 76814
atgaaaaaagaagccgttacgagcaagaacggatcaggatcagaagagatgcgcgaggcggaattcggtttctatgagtttttcgccggtggcggcatggcccgggccggcttaggaaaaaaatggcgatgcctgttcgccaacgatatggatccgataaaaacggcgagttatatcgaaaattggggagccgaacattttgatggccgcgatgtacgtgaaataaaaccagacgatttaacaggatccgcagatttagtctgggcctcatttccctgtcaggacttgtctctggctggtaatggacttgggatcggcgaaatcgacgctagtgaggatgaaaccacgcgttccggcgcgatatggccttttcttgatctagtagacaaacttgaagagggaaatcggaagccgccgatactgattcttgaaaatgtccttgggctgctgacattggatcagggacggcatttcgctgcgatatgtcgccagttaagtaaaatgggctatcgctatggcgcaatgatcatcgatgcaaagctctttttgcctcaatccagaccccgcgtgtttattgttgcgattagtcgtcagttctccgttcctgcatctttactttcaaaagaacctctaacgcaatggcattcttcttcgcttcttcgcgcctgcgaagcgcttccagcggagacgctcggcgactggatctggtggacgcccggcgatgcgccgggttcgagaacaaaggaacttaccgaccttattgattgtgaagatcaaaacacattatggcactctgccgatgaaacccaaagactgatcgatatgatggctccggcgcatctgacacgtttggcgaaggcgcgggaatcaggagaaacgacaataggcagtctttatcttcgcatgcgcagagaaaaaggcgttaaccggcaacgagcagaaatcacgttttctcctgttatcggttgtctgagaacgccgaaaggcggcgcatcccgcgcccgtattattgtcgccgataaaggcgaggtgaaaacgcgcctgctgtcggttaaagaagcggcggcattgatggggctgccggaagatttcatccttccgaccgcgtatcaatcagcgtttaagatcattggcgacggacttgccgttccttccgtccgttttctggccgagcgcatactagagcctctggcggcatcggtccgaaacgacagccatcagacggagaacagataa

SEQ ID NO: 28185 - DNA, 2559 bp, Salmonella enterica subsp. enterica serovar Cubana str. 76814
atgaactggacgctgcccgtaacacctgatggttgggaaagtaagctagtcgattattttctccgtttcggcaccgacggcgacgcacaggatattcgttggtttgaagtgacgccgtcgacgctctcggcggcattcgcaggaagcggcgtcggtgcggatgaaatagaagaagcatttcggacctgtatgtcgaacataccggatctgcctcagcgccttgaaagcggcatgatggaaagatccaatgacaaatcgcccggatatttcacttatcttgtcatgacgctacttatcagcagtcaattcgatgcccaagaaggacacaatgactttcgcctgaagttacagaactggctgcggaccggacatagctatcagaatctggcgggcgttaacgccatgtgggaagcgctggccggttggcttgaacgacgagttcagaaaggagaaccttatcgccgactgtgcctaccggagatccccccaagctggagccatatcggatataccctgcgtctggcttttcccgggaaagcggatgtgcgcttgatgcgccgtgttcttacgagtcatccgcaaaccatttccagtccacggctgttgatcagctattttcaggtcgctatccagaaagagaacgcctctcacgctcatgcgctgaaacaggcgtttagcgagtttaaagacgcttggttttcaggacgcagagcgcttgccgacatgcctttctggcgtttgcgacagcgggctatagcgctgatctccgatgttgagacgcgtaaggcgttcatcgatatgcgcgtcgatttcgacggttcgcgatgttacttcagcgccgcaagcgagaatgacgaaagcgttttcgccccttcgttgtctgacgcgttattatcggcttctgcgggaaatagctataatttgggcatcgccacgcagagcggcctgctctttttccatcaagtcggtcatggatgctggagagctatagccgctcccgatgcgttttctttcaaatttcacatcgcgttatcctgtaaatacgctgcgcgcgcgagacaatattttgacgatgcggtcacagaaaacgactggattctgacgtcgcgtccgcagagtcgtcatgcggcgatggaaatatttcgtgcgctgaaaacatcatcgactacgctggatgaacagatctctcgcttacagctttccggtggcatccgagtgccgggcgggtggctgggactacccgcttttctaccaaccgtccattcagacacgcaaaattacagaatttactcgcctcagggaaacggcgcgaaagttagcgtcagggaagaagatggacgcttgacgtcatcaatgcctcttaacggcgagtttattatcgaacctgagctggaaatcggcgagaaaacgccgccatggcgacaacgggcgcgttttttcgagcgcgccgttcctcgccctgcgcaggaagatagcgccagatatcgcctcgaacttcttaccgattggaagacgtctcccctgacaacgccggcattccacattgaactccccctgacgacagaaaataacgatgaacgtctcgaacatctccttgaagcgatttatgcaagcggcgccagcggatgggaggaaatcgaattggtcgcgcttctggaacgcgccgcagacagcgtcaatgtgtggcatttgattcgctgtttgcatgacgcaggtctgatagaaccgcgcttacgccaaggctggaaaggtcgggtatggacgttagtcaaaccttcgctgtttcgtatccgcaatggggataacagcatgatcgtcgtggaaggcgctacctgcgccagccttatggatgattttcaaaaagtggtctccgggctgggcggaaaatgctttcgtcgcagcggcgtaagcgtctggtctcctcccgtatgcggcgcggagatcgatgatcctgtcgagttgtcccgagttatggaatggccgcttattgatatatcgtcaacgcctgatatgacgccgctcgcgttaacctcgacctgtcgtaccgccgaattccaccttcaagcagcagtgtgggactggcgttcagggcgtttctctccgcatgcggcctccaataacgcctcgacgcttttaacgcgccatgtccatccgggcgggcgcgatcatgacgtatacaaggttgtttcccggcgcaaaatggcgtttttcttatcccgaaccgccgcgattatcgccgcgaatgtgagtgcgcgccgcccgacattcagacgcgtcgggaatcatcgctttatttgccttgtcgacgattgtggtttgcctgacgcactggcgatgggattacgacgcagcgtgctcagaaacggcggcccaacggaagccggatacgcttatcctatcgacgacgtcgctttccgttggctaaatcgactgcttcccggatgcttcgctccattcccgccggatgacggcgataacgcaaatcgtttagttgcggcagcgcgccattccggcgggaaaacgcgcctgcggtggcaaaacggacgtctggcgttatag

SEQ ID NO: 28186 - DNA, 2097 bp, Salmonella enterica subsp. enterica serovar Cubana str. 76814
atgaaagatcttccctggtatattggccgatacgatcgacgaaacgatcggttctcgtattttaaagtcgtcgctcagcaaacggaaaatggttggcacgcaatcgacagccctaaaaaaatgtttcctcgtacaggtgaagtcgaacttaccggattcgacgcgtctcagcttcgtccaaacgactggatcgtctttcaggtagataccaatacgcgcagcaaattgacgagagcgaaacatcctcgccgtatttatccttattatgatttatcctcggcacagtctcttcagaaagctcgccatcgtctgagcctggaaggcatcgaaacgtgcggcgaaccggggcaatggactattcgcttcgagacgggcggagtcattctggcgaacctgacagagtcgaaaccaggtttttttattttgtcacggaatcagtacgttgccgaatatgcgtttaatgacagcggaatcatctccgtatccggtctgtctgaaaataacaaaatattttatatgccggacgcagatgcctcgcccacgcgacgccatgactggacacctgacaaacattacattgaaaatgccgttcaacttatcgccggaaccgactcgtcaacgcagatcgcttcctggcttcgcaagcatgtcgacgagcaaaacggaaaattgaaatccggcgtcgacgatctgttggctgccgctcagattctccgatccggagagttggcgaaaaaaatagaagaagaggacgcgctggcccgggaactctcccaggctgtgttgaatgacgagcgtatcgccgctcagcttgaacgccagatacaaagcatcgcggaagaagaacgggacaggttgcgcgccgaacaacaaaaagcgctcaacgaagctttttgcgccgagcgtctgctccgtagcgaagcgattgaagaggaaatgacggtctttcagacggagagaaaaagcgagatcgaacagcaaatcgcgcaattacgtttggacgaagaagaaaaattacaaaaggaattcgaagaaaagcagttaagcatagaaaaaacgttaaaacatgaaaaagacgctctcgaaagcgaaatcaaccggctgaaaaacgccgccgcagatttatgccgtcaaaacgaaagtcagcgccggacgttgtcttctctggagatcaaacgcgaagcgtcttcaggcgcgcttcgggaagttgaagagcgcgttgcgctggcgcggatcgaacttgagaaaatcaatgccgctattgctgaaaaagcgcgtcgaatggcgcattcggcgatccctgcgatatgtcttcccgccgaagctaaaacagtttcccgcgcagaactgggacgtatcatcagtgaaaacaaactactgacgcacgaaggaaaaatactgatggagcaattcctggcgttgacgcttgccggcgaatgcccgttgctctacggctctgaaacacaggactttctggctatcgccgcgtcgcttatttcttcaggacgcgctatccgacaaattgccgatccgacgatgatttcctatgaggatctgtggatccgcgcaggaaataatctggcgacgccgctttatcaaggattgttattaagcgacgcccatcgtccccgaacaattcttgccgtcatcgaacgcgtcgaatgctccgccgtgcgtttctggctgcctgctctgaaagaggggttgcgtaatggcgatctgccccgacgattcctggtgtgcggcacaattacgaatgaagataacgaggaagcggaaaagataaaggaggaacatctttttctgccggtggaaaacattgtcgttcgaaatgcgattacgcgcgcgccgctttatctctccaccagacatcatagcgaactaacgcccgaagccgcgccgccagaatcgcttgaggaaaaacttgccattgcggatgaaatgtcgggcgatcgtctgaacgtggtaaatacgctgcgggcgacgaaagcggcgctggaggtcgggttggccgtcgacgaagacaaaacggcgcatcaaaagcgattagtcgatttattcgcaaatttgcaaaatagcgaaatctgcgctccataa

SEQ ID NO: 28187 - DNA, 5841 bp, Salmonella enterica; identical to SEQ ID NO: 28183
  subsp. enterica serovar Cubana str. CFSAN002050

SEQ ID NO: 28188 - DNA, 1188 bp, Salmonella enterica
  subsp. enterica serovar Cubana str. CFSAN002050
atgcgcgaggcggaattcggtttctatgagtttttcgccggtggcggcatggcccgggccggcttaggaaaaaaatggcgatgcctgttcgccaacgatatggatccgataaaaacggcgagttatatcgaaaattggggagccgaacattttgatggccgcgatgtacgtgaaataaaaccagacgatttaacaggatccgcagatttagtctgggcctcatttccctgtcaggacttgtctctggctggtaatggacttgggatcggcgaaatcgacgctagtgaggatgaaaccacgcgttccggcgcgatatggccttttcttgatctagtagacaaacttgaagagggaaatcggaagccgccgatactgattcttgaaaatgtccttgggctgctgacattggatcagggacggcatttcgctgcgatatgtcgccagttaagtaaaatgggctatcgctatggcgcaatgatcatcgatgcaaagctctttttgcctcaatccagaccccgcgtgtttattgttgcgattagtcgtcagttctccgttcctgcatctttactttcaaaagaacctctaacgcaatggcattcttcttcgcttcttcgcgcctgcgaagcgcttccagcggagacgctcggcgactggatctggtggacgcccggcgatgcgccgggttcgagaacaaaggaacttaccgaccttattgattgtgaagatcaaaacacattatggcactctgccgatgaaacccaaagactgatcgatatgatggctccggcgcatctgacacgtttggcgaaggcgcgggaatcaggagaaacgacaataggcagtctttatcttcgcatgcgcagagaaaaaggcgttaaccggcaacgagcagaaatcacgttttctcctgttatcggttgtctgagaacgccgaaaggcggcgcatcccgcgcccgtattattgtcgccgataaaggcgaggtgaaaacgcgcctgctgtcggttaaagaagcggcggcattgatggggctgccggaagatttcatccttccgaccgcgtatcaatcagcgtttaagatcattggcgacggacttgccgttccttccgtccgttttctggccgagcgcatactagagcctctggcggcatcggtccgaaacgacagccatcagacggagaacagataa

SEQ ID NO: 28189 - DNA, 2559 bp, Salmonella enterica; identical to SEQ ID NO: 28185
  subsp. enterica serovar Cubana str. CFSAN002050

SEQ ID NO: 28190 - DNA, 2097 bp, Salmonella enterica; identical to SEQ ID NO: 28186
  subsp. enterica serovar Cubana str. CFSAN002050

SEQ ID NO: 28191 - DNA, 5841 bp, Salmonella enterica subsp. enterica serovar Cubana str. CVM42234; identical to SEQ ID NO: 28183

SEQ ID NO: 28192 - DNA, 1188 bp, Salmonella enterica subsp. enterica serovar Cubana str. CVM42234; identical to SEQ ID NO: 28188

SEQ ID NO: 28193 - DNA, 2559 bp, Salmonella enterica subsp. enterica serovar Cubana str. CVM42234; identical to SEQ ID NO: 28185

SEQ ID NO: 28194 - DNA, 2097 bp, Salmonella enterica subsp. enterica serovar Cubana str. CVM42234; identical to SEQ ID NO: 28186
